(19) United States
(12) Patent Application Publication
(10) Pub. No.: US 2005/0020813 A1
(43) Pub. Date: Jan. 27, 2005

(54) Streptococcus pneumoniae proteins and nucleic acids

(76) Inventors: Vega Masignani, Siena (IT); Herve Tettelin, Rockville, MD (US); Claire Fraser, Potomac, MD (US)

Correspondence Address: Rebecca Hale;Chiron Corporation, Intellectual Property R338, PO Box 8097, Emeryville, CA, 94662-8097, US

(21) Appl. No.: 10/472,928

(22) PCT Filed: Mar. 27, 2002
(86) PCT No.: PCT/IB02/02163

(30) Foreign Application Priority Data
Mar. 27, 2001 (GB) 0107658.7

(51) Int. Cl. A61K 39/09; C07K 1/00; C07K 14/00; C07K 17/00

(52) U.S. Cl. 530/350

(57) ABSTRACT

The invention provides proteins and nucleic acid sequences from Streptococcus pneumoniae, together with a genome sequence. These are useful for the development of vaccines, diagnostics, and antibiotics.

### TECHNICAL FIELD

[0001] This invention relates to nucleic acid and proteins from the bacteria Streptococcus pneumoniae.

### BACKGROUND ART

[0002] Streptococcus pneumoniae is a Gram-positive spherical bacterium. It is the most common cause of acute bacterial meningitis in adults and in children over 5 years of age.

[0003] It is an object of the invention to provide materials for improving the prevention, detection and treatment of Streptococcus pneumoniae infections.

[0004] More specifically, it is an object of the invention to provide proteins which can be used in the development of vaccines. Further objects are to provide proteins and nucleic acid which can be used in the diagnosis of S.pneumoniae infection, to provide proteins and nucleic acid which can be used for the detection of S.pneumoniae, to provide nucleic acid which is useful for the expression of S.pneumoniae proteins, and to provide proteins which are useful targets for antibiotic research.

### DISCLOSURE OF THE INVENTION

[0005] The invention provides proteins comprising the S.pneumoniae amino acid sequences disclosed in the examples. These amino acid sequences are the even SEQ IDs between 2 and 4978.

[0006] It also provides proteins comprising amino acid sequences having sequence identity to the S.pneumoniae amino acid sequences disclosed in the examples. Depending on the particular sequence, the degree of sequence identity is preferably greater than 50% (e.g. 60%, 70%, 80%, 90%, 95%, 99% or more). These proteins include homologs, orthologs, allelic variants and functional mutants. Typically, 50% identity or more between two proteins is considered to be an indication of functional equivalence. Identity between proteins is preferably determined by the Smith-Waterman homology search algorithm as implemented in the MPSRCH program (Oxford Molecular), using an affine gap search with parameters gap open penalty=12 and gap extension penalty=1.

[0007] The invention further provides proteins comprising fragments of the S.pneumoniae amino acid sequences disclosed in the examples. The fragments should comprise at least n consecutive amino acids from the sequences and, depending on the particular sequence, n is 7 or more (e.g. 8, 10, 12, 14, 16, 18, 20, 30, 40, 50, 60, 70, 80, 90, 100 or more). Preferably the fragments comprise one or more epitopes from the sequence. Other preferred fragments are (a) the N-terminal signal peptides of the proteins disclosed in the examples, (b) the proteins disclosed in the examples, but without their N-terminal signal peptides, and (c) the proteins disclosed in the examples, but without their N-terminal amino acid residue.

[0008] The proteins of the invention can, of course, be prepared by various means (e.g. recombinant expression, purification from S.pneumoniae, chemical synthesis etc.) and in various forms (e.g. native, fusions, glycosylated, non-glycosylated etc.). They are preferably prepared in substantially pure form (i.e. substantially free from other streptococcal or host cell proteins). Proteins of the invention are preferably streptococcal proteins.

[0009] Preferred proteins are the 432 proteins listed in the table in the examples.

[0010] According to a further aspect, the invention provides antibodies which bind to these proteins. These may be polyclonal or monoclonal and may be produced by any suitable means. To increase compatibility with the human immune system, the antibodies may be chimeric or humanised (e.g. Breedveld (2000) Lancet 355(9205):735-740; Gorman & Clark (1990) Semin. Immunol. 2:457-466), or fully human antibodies may be used. The antibodies may include a detectable label (e.g. for diagnostic assays).

[0011] According to a further aspect, the invention provides nucleic acid comprising the S.pneumoniae nucleotide sequences disclosed in the examples. These nucleotide sequences are the odd SEQ IDs between 1 and 4977, and genome sequence SEQ ID 4979.

[0012] In addition, the invention provides nucleic acid comprising nucleotide sequences having sequence identity to the S.pneumoniae nucleotide sequences disclosed in the examples. Identity between sequences is preferably determined by the Smith-Waterman homology algorithm as described above.

[0013] Furthermore, the invention provides nucleic acid which can hybridise to the S.pneumoniae nucleic acid disclosed in the examples, preferably under “high stringency” conditions (e.g. 65° C. in a 0.1×SSC, 0.5% SDS solution).

[0014] Nucleic acid comprising fragments of these sequences are also provided. These should comprise at least n consecutive nucleotides from the S.pneumoniae sequences and, depending on the particular sequence, n is 10 or more (e.g. 12, 14, 15, 18, 20, 25, 30, 35, 40, 50, 60, 70, 80, 90, 100, 150, 200 or more).

[0015] According to a further aspect, the invention provides nucleic acid encoding the proteins and protein fragments of the invention.

[0016] The invention also provides: nucleic acid comprising nucleotide sequence SEQ ID 4979; nucleic acid comprising nucleotide sequences having sequence identity to SEQ ID 4979; nucleic acid which can hybridise to SEQ ID 4979 (preferably under ‘high stringency’ conditions); nucleic acid comprising a fragment of at least n consecutive nucleotides from SEQ ID 4979, wherein n is 10 or more e.g. 12, 14, 15, 18, 20, 25, 30, 35, 40, 50, 60, 70, 80, 90, 100, 150, 200, 250, 300, 350, 400, 450, 500, 600, 700, 800, 900, 1000, 1500, 2000, 3000, 4000, 5000, 10000, 100000, 1000000 or more

[0017] Nucleic acids of the invention can be used in hybridisation reactions (e.g. Northern or Southern blots, or in nucleic acid microarrays or ‘gene chips’) and amplification reactions (e.g. PCR, SDA, SSSR, LCR, NASBA, TMA) etc.

[0018] It should also be appreciated that the invention provides nucleic acid comprising sequences complementary to those described above (e.g. for antisense or probing purposes, or for use as primers).

[0019] Nucleic acid according to the invention can, of course, be prepared in many ways (e.g. by chemical synthesis, from genomic or cDNA libraries, from the organism itself etc.) and can take various forms (e.g. single stranded, double stranded, vectors, primers, probes etc.). The nucleic acid is preferably in substantially isolated form.

[0020] Nucleic acid according to the invention may be labelled e.g. with a radioactive or fluorescent label. This is particularly useful where it is to be used as a primer or probe e.g. in PCR, LCR, NASBA, TMA.

[0021] In addition, the term “nucleic acid” includes DNA and RNA, and also their analogues, such as those containing modified backbones, and also peptide nucleic acids (PNA) etc.

[0022] According to a further aspect, the invention provides vectors comprising nucleotide sequences of the invention (e.g. cloning or expression vectors) and host cells transformed with such vectors.

[0023] According to a further aspect, the invention provides compositions comprising protein, antibody, and/or nucleic acid according to the invention. These compositions may be suitable as immunogenic compositions, for instance, or as diagnostic reagents, or as vaccines.

[0024] The invention also provides nucleic acid, protein, or antibody according to the invention for use as medicaments (e.g. as immunogenic compositions or vaccines) or as diagnostic reagents. It also provides the use of nucleic acid, protein, or antibody according to the invention in the manufacture of: (i) a medicament for treating or preventing infection due to streptococcus; (ii) a diagnostic reagent for detecting the presence of streptococcus or of antibodies raised against streptococcus; and/or (iii) a reagent which can raise antibodies against streptococcus. Said streptococcus may be any species, group or strain, but is preferably S.pneumoniae, particularly a type 4 strain. The disease may be meningitis, pneumonia, sepsis, otitis media or an ear infection.

[0025] The invention also provides a method of treating a patient, comprising administering to the patient a therapeutically effective amount of nucleic acid, protein, and/or antibody of the invention. The patient may either be at risk from the disease themselves or may be a pregnant woman (‘maternal immunisation’ e.g. Glezen & Alpers (1999) Clin. Infect. Dis. 28:219-224).

[0026] Administration of protein antigens is a preferred method of treatment for inducing immunity. Administration of antibodies of the invention is another preferred method of treatment. This method of passive immunisation is particularly useful for newborn children or for pregnant women. This method will typically use monoclonal antibodies, which will be humanised or fully human.

[0027] The invention also provides a kit comprising primers (e.g. PCR primers) for amplifying a target sequence contained within a Streptococcus (e.g. S.pneumoniae) nucleic acid sequence, the kit comprising a first primer and a second primer, wherein the first primer is substantially complementary to said target sequence and the second primer is substantially complementary to a complement of said target sequence, wherein the parts of said primers which have substantial complementarity define the termini of the target sequence to be amplified. The first primer and/or the second primer may include a detectable label (e.g. a fluorescent label).

[0028] The invention also provides a kit comprising first and second single-stranded oligonucleotides which allow amplification of a Streptococcus (e.g. S.pneumoniae) template nucleic acid sequence contained in a single- or double-stranded nucleic acid (or mixture thereof), wherein: (a) the first oligonucleotide comprises a primer sequence which is substantially complementary to said template nucleic acid sequence; (b) the second oligonucleotide comprises a primer sequence which is substantially complementary to the complement of said template nucleic acid sequence; (c) the first oligonucleotide and/or the second oligonucleotide comprise(s) sequence which is not complementary to said template nucleic acid; and (d) said primer sequences define the termini of the template sequence to be amplified. The non-complementary sequence(s) of feature (c) are preferably upstream of (i.e. 5′ to) the primer sequences. One or both of these (c) sequences may comprise a restriction site (e.g. EP-B-0509612) or a promoter sequence (e.g. EP-B-0505012). The first oligonucleotide and/or the second oligonucleotide may include a detectable label (e.g. a fluorescent label).

[0029] The template sequence may be any part of a genome sequence (e.g. SEQ ID 4979). For example, it could be a rRNA gene or a protein-coding gene. The template sequence is preferably specific to S.pneumoniae.

[0030] The invention also provides a computer-readable medium (e.g. a floppy disk, a hard disk, a CD-ROM, a DVD etc.) and/or a computer database containing one or more of the sequences in the sequence listing. The medium preferably contains SEQ ID 4979.

[0031] The invention also provides a hybrid protein represented by the formula NH₂-A-[-X-L-]ₙ-B—COOH, wherein X is an amino acid sequence of the invention as described above, L is an optional linker amino acid sequence, A is an optional N-terminal amino acid sequence, B is an optional C-terminal amino acid sequence, and n is an integer greater than 1. The value of n is between 2 and x, and the value of x is typically 3, 4, 5, 6, 7, 8, 9 or 10. Preferably n is 2, 3 or 4; it is more preferably 2 or 3; most preferably, n=2. For each n instances, —X— may be the same or different. For each n instances of [—X-L-], linker amino acid sequence -L- may be present or absent. For instance, when n=2 the hybrid may be NH₂—X₁-L₁-X₂-L₂-COOH, NH₂—X₁—X₂—COOH, NH₂—X₁-L₁-X₂—COOH, NH₂—X₁—X₂-L₂—COOH, etc. Linker amino acid sequence(s) -L- will typically be short (e.g. 20 or fewer amino acids i.e. 19, 18, 17, 16, 15, 14, 13, 12, 11, 10, 9, 8, 7, 6, 5, 4, 3, 2, 1). Examples include short peptide sequences which facilitate cloning, poly-glycine linkers (i.e. Glyₙ, where n=2, 3, 4, 5, 6, 7, 8, 9, 10 or more), and histidine tags (i.e. Hisₙ where n=3, 4, 5, 6, 7, 8, 9, 10 or more). Other suitable linker amino acid sequences will be apparent to those skilled in the art. -A- and —B—are optional sequences which will typically be short (e.g. 40 or fewer amino acids i.e. 39, 38, 37, 36, 35, 34, 33, 32, 31, 30, 29, 28, 27, 26, 25, 24, 23, 22, 21, 20, 19, 18, 17, 16, 15, 14, 13, 12, 11, 10, 9, 8, 7, 6, 5, 4, 3, 2, 1). Examples include leader sequences to direct protein trafficking, or short peptide sequences which facilitate cloning or purification (e.g. histidine tags i.e. Hisₙ where n=3, 4, 5, 6, 7, 8, 9, 10 or more). Other suitable N-terminal and C-terminal amino acid sequences will be apparent to those skilled in the art. In some embodiments, each X will be a S.pneumoniae sequence; in others, mixtures of S.pneumoniae, S.pyogenes and/or S.agalactiae sequences will be used [see even SEQ IDs, 2 to 10966 of PCT/GB01/04789 for suitable sequences].

[0032] In some embodiments of the invention, the proteins and nucleic acids of the invention share sequence identity with the 2043 ORF sequences from the avirulent R6 strain of S.pneumoniae disclosed by Hoskins et al. [J Bacteriol (2001) 183:5709-17]. In other embodiments, the invention does not encompass sequences consisting of one of the 2043 ORFs specifically disclosed by Hoskins et al.

[0033] According to further aspects, the invention provides various processes.

[0034] A process for producing proteins of the invention is provided, comprising the step of culturing a host cell of to the invention under conditions which induce protein expression.

[0035] A process for producing protein or nucleic acid of the invention is provided, wherein the protein or nucleic acid is synthesised in part or in whole using chemical means.

[0036] A process for detecting polynucleotides of the invention is provided, comprising the steps of: (a) contacting a nucleic probe according to the invention with a biological sample under hybridising conditions to form duplexes; and (b) detecting said duplexes.

[0037] A process for detecting Streptococcus in a biological sample is also provided, comprising the step of contacting nucleic according to the invention with the biological sample under hybridising conditions. The process may involve nucleic acid amplification (e.g. PCR, SDA, SSSR, LCR, NASBA, TMA etc.) or hybridisation (e.g. microarrays, blots, hybridisation with a probe in solution etc.). PCR detection of S.pneumoniae in clinical samples has previously been reported [see e.g. Cherian et al. (1998) J. Clin. Microbiol. 36:3605-3608; Kearns et al. (1999) J. Clin. Microbiol. 37:3434; Matsumura, abstract D-25, 38th Annual ICAAC].

[0038] A process for detecting proteins of the invention is provided, comprising the steps of: (a) contacting an antibody of the invention with a biological sample under conditions suitable for the formation of an antibody-antigen complexes; and (b) detecting said complexes.

[0039] A process for identifying an amino acid sequence is provided, comprising the step of searching for putative open reading frames or protein-coding regions within a genome sequence of S.pneumoniae. This will typically involve in silico searching the sequence for an initiation codon and for an in-frame termination codon in the downstream sequence. The region between these initiation and termination codons is a putative protein-coding sequence. Typically, all six possible reading frames will be searched. Suitable software for such analysis includes ORFFINDER (NCBI), GENEMARK [Borodovsky & McIninch (1993) Computers Chem. 17:122-133), GLIMMER [Salzberg et al. (1998) Nucleic Acids Res. 26:544-548; Salzberg et al. (1999) Genomics 59:24-31; Delcher et al. (1999)Nucleic Acids Res. 27:4636-4641], or other software which uses Markov models [e.g. Shmatkov et al. (1999) Bioinformatics 15:874-876 ]. The invention also provides a protein comprising the identified amino acid sequence. These proteins can then expressed using conventional techniques.

[0040] The invention also provides a process for determining whether a test compound binds to a protein of the invention. If a test compound binds to a protein of the invention and this binding inhibits the life cycle of the S.pneumoniae bacterium, then the test compound can be used as an antibiotic or as a lead compound for the design of antibiotics. The process will typically comprise the steps of contacting a test compound with a protein of the invention, and determining whether the test compound binds to said protein. Preferred proteins of the invention for use in these processes are enzymes (e.g. tRNA synthetases), membrane transporters and ribosomal proteins. Suitable test compounds include proteins, polypeptides, carbohydrates, lipids, nucleic acids (e.g. DNA, RNA, and modified forms thereof), as well as small organic compounds (e.g. MW between 200 and 2000 Da). The test compounds may be provided individually, but will typically be part of a library (e.g. a combinatorial library). Methods for detecting a binding interaction include NMR, filter-binding assays, gel-retardation assays, displacement assays, surface plasmon resonance, reverse two-hybrid etc. A compound which binds to a protein of the invention can be tested for antibiotic activity by contacting the compound with GBS bacteria and then monitoring for inhibition of growth. The invention also provides a compound identified using these methods.

[0041] The invention also provides a composition comprising a protein or the invention and one or more of the following antigens:
[0042] a protein antigen from Helicobacter pylori such as VacA, CagA, NAP, HopX, HopY [e.g. WO98/04702] and/or urease.
[0043] a protein antigen from N.meningitidis serogroup B, such as those in WO99/24578, WO99/36544, WO99/57280, WO00/22430, Tettelin et al. (2000) Science 287:1809-1815, Pizza et al. (2000) Science 287:1816-1820 and WO96/29412, with protein ‘287’ and derivatives being particularly preferred.
[0044] an outer-membrane vesicle (OMV) preparation from N.meningitidis serogroup B, such as those disclosed in WO01/52885; Bjune et al. (1991) Lancet 338(8775):1093-1096; Fukasawa et al. (1999) Vaccine 17:2951-2958; Rosenqvist et al. (1998) Dev. Biol. Stand. 92:323-333 etc.
[0045] a saccharide antigen from N.meningitidis serogroup A, C, W135 and/or Y, such as the oligosaccharide disclosed in Costantino et al. (1992) Vaccine 10:691-698from serogroup C [see also Costantino et al. (1999) Vaccine 17:1251-1263].
[0046] a saccharide antigen from Streptococcus pneumoniae [e.g. Watson (2000) Pediatr Infect Dis J 19:331-332; Rubin (2000) Pediatr Clin North Am 47:269-285, v; Jedrzejas (2001) Microbiol Mol Biol Rev 65:187-207].
[0047] an antigen from hepatitis A virus, such as inactivated virus [e.g. Bell (2000) Pediatr Infect Dis J 19:1187-1188; Iwarson (1995) APMIS 103:321-326].
[0048] an antigen from hepatitis B virus, such as the surface and/or core antigens [e.g. Gerlich et al. (1990) Vaccine 8 Suppl:S63-68 & 79-80].
[0049] an antigen from hepatitis C virus [e.g. Hsu et al. (1999) Clin Liver Dis 3:901-915].
[0050] an antigen from Bordetella pertussis, such as pertussis holotoxin (PI) and filamentous haemagglutinin (FHA) from B.pertussis, optionally also in combination with pertactin and/or agglutinogens 2 and 3 [e.g. Gustafsson et al. (1996) N. Engl. J. Med. 334:349-355; Rappuoli et al. (1991) TIBTECH 9:232-238].
[0051] a diphtheria antigen, such as a diphtheria toxoid [e.g. chapter 3 of Vaccines (1988) eds. Plotkin & Mortimer. ISBN 0-7216-1946-0] e.g. the CRM₁₉₇ mutant [e.g. Del Guidice et al. (1998) Molecular Aspects of Medicine 19:1-70].
[0052] a tetanus antigen, such as a tetanus toxoid [e.g. chapter 4 of Plotkin & Mortimer].
[0053] a saccharide antigen from Haemophilus influenzae B.
[0054] an antigen from N.gonorrhoeae [e.g. WO99/24578, WO99/36544, WO99/57280].
[0055] an antigen from Chlamydia pneumoniae [e.g. WO02/02606; Kalman et al. (1999) Nature Genetics 21:385-389; Read et al. (2000) Nucleic Acids Res 28:1397-406; Shirai et al. (2000) J. Infect. Dis. 181(Suppl 3):S524-S527; WO99/27105; WO00/27994; WO00/37494].
[0056] an antigen from S.agalactiae [e.g. PCT/GB01/04789]
[0057] an antigen from S.pyogenes [e.g. PCT/GB01/04789]
[0058] an antigen from Chlamydia trachomatis [e.g. WO99/28475].
[0059] an antigen from Porphyromonas gingivalis [e.g. Ross et al. (2001) Vaccine 19:41354142].
[0060] polio antigen(s) [e.g. Sutter et al. (2000) Pediatr Clin North Am 47:287-308; Zimmerman & Spann (1999) Am Fam Physician 59:113-118, 125-126] such as IPV or OPV.
[0061] rabies antigen(s) [e.g. Dreesen (1997) Vaccine 15 Suppl:S2-6] such as lyophilised inactivated virus [e.g. MMWR Morb Mortal Wkly Rep 1998 Jan. 16;47(1):12, 19; RabAvert™].
[0062] measles, mumps and/or rubella antigens [e.g. chapters 9, 10 & 11 of Plotkin & Mortimer].
[0063] influenza antigen(s) [e.g. chapter 19 of Plotkin & Mortimer], such as the haemagglutinin and/or neuraminidase surface proteins.
[0064] an antigen from Moraxella catarrhalis [e.g. McMichael (2000) Vaccine 19 Suppl 1:S101-107].
[0065] an antigen from Staphylococcus aureus [e.g. Kuroda et al. (2001) Lancet 357(9264):1225-1240; see also pages 1218-1219].

[0066] Where a saccharide or carbohydrate antigen is included, it is preferably conjugated to a carrier protein in order to enhance immunogenicity [e.g. Ramsay et al. (2001) Lancet 357(9251):195-196; Lindberg (1999) Vaccine 17 Suppl 2:S28-36; Conjugate Vaccines (eds. Cruse et al.) ISBN 3805549326, particularly vol. 10:48-114 etc.). Preferred carrier proteins are bacterial toxins or toxoids, such as diphtheria or tetanus toxoids. The CRM₁₉₇ diphtheria toxoid is particularly preferred. Other suitable carrier proteins include the N.menigitidis outer membrane protein [e.g. EP-0372501], synthetic peptides [e.g. EP-0378881, EP-0427347], heat shock proteins [e.g. WO93/17712], pertussis proteins [e.g. WO98/58668; EP-0471177], protein D from H.influenzae [e.g. WO00/56360], toxin A or B from C.difficile [e.g. WO00/61761], etc. Any suitable conjugation reaction can be used, with any suitable linker where necessary.

[0067] Toxic protein antigens may be detoxified where necessary (e.g. detoxification of pertussis toxin by chemical and/or genetic means).

[0068] Where a diphtheria antigen is included in the composition it is preferred also to include tetanus antigen and pertussis antigens. Similarly, where a tetanus antigen is included it is preferred also to include diphtheria and pertussis antigens. Similarly, where a pertussis antigen is included it is preferred also to include diphtheria and tetanus antigens.

[0069] Antigens are preferably adsorbed to an aluminium salt.

[0070] Antigens in the composition will typically be present at a concentration of at least 1 μg/ml each. In general, the concentration of any given antigen will be sufficient to elicit an immune response against that antigen.

[0071] The invention also provides compositions comprising two or more (e.g. 3, 4, 5) proteins of the invention.

[0072] A summary of standard techniques and procedures which may be employed to perform the invention (eg. to utilise the disclosed sequences for vaccination or diagnostic purposes) follows. This summary is not a limitation on the invention but, rather, gives examples that may be used, but are not required.

[0073] General

[0074] The practice of the present invention will employ, unless otherwise indicated, conventional techniques of molecular biology, microbiology, recombinant DNA, and immunology, which are within the skill of the art. Such techniques are explained fully in the literature eg. Sambrook Molecular Cloning; A Laboratory Manual, Second Edition (1989); DNA Cloning, Volumes I and II (D. N. Glover ed. 1985); Oligonucleotide Synthesis (M. J. Gait ed, 1984); Nucleic Acid Hybridization (B. D. Hames & S. J. Higgins eds. 1984); Transcription and Translation (B. D. Hames & S. J. Higgins eds. 1984); Animal Cell Culture (R. I. Freshney ed. 1986); Immobilized Cells and Enzymes (IRL Press, 1986); B. Perbal, A Practical Guide to Molecular Cloning (1984); the Methods in Enzymology series (Academic Press, Inc.), especially volumes 154 & 155; Gene Transfer Vectors for Mammalian Cells (J. H. Miller and M. P. Calos eds. 1987, Cold Spring Harbor Laboratory); Mayer and Walker, eds. (1987), Immunochemical Methods in Cell and Molecular Biology (Academic Press, London); Scopes, (1987) Protein Purification: Principles and Practice, Second Edition (Springer-Verlag, N.Y.), and Handbook of Experimental Immunology, Volumes I-IV (D. M. Weir and C. C. Blackwell eds 1986).

[0075] Standard abbreviations for nucleotides and amino acids are used in this specification.

[0076] Definitions

[0077] A composition containing X is “substantially free of” Y when at least 85% by weight of the total X+Y in the composition is X. Preferably, X comprises at least about 90% by weight of the total of X+Y in the composition, more preferably at least about 95% or even 99% by weight.

[0078] The term “comprising” means “including” as well as “consisting” e.g. a composition “comprising” X may consist exclusively of X or may include something additional e.g. X+Y.

[0079] The term “heterologous” refers to two biological components that are not found together in nature. The components may be host cells, genes, or regulatory regions, such as promoters. Although the heterologous components are not found together in nature, they can function together, as when a promoter heterologous to a gene is operably linked to the gene. Another example is where a streptococcus sequence is heterologous to a mouse host cell. A further examples would be two epitopes from the same or different proteins which have been assembled in a single protein in an arrangement not found in nature.

[0080] An “origin of replication” is a polynucleotide sequence that initiates and regulates replication of polynucleotides, such as an expression vector. The origin of replication behaves as an autonomous unit of polynucleotide replication within a cell, capable of replication under its own control. An origin of replication may be needed for a vector to replicate in a particular host cell. With certain origins of replication, an expression vector can be reproduced at a high copy number in the presence of the appropriate proteins within the cell. Examples of origins are the autonomously replicating sequences, which are effective in yeast; and the viral T-antigen, effective in COS-7 cells.

[0081] A “mutant” sequence is defined as DNA, RNA or amino acid sequence differing from but having sequence identity with the native or disclosed sequence. Depending on the particular sequence, the degree of sequence identity between the native or disclosed sequence and the mutant sequence is preferably greater than 50% (eg. 60%, 70%, 80%, 90%, 95%, 99% or more, calculated using the Smith-Waterman algorithm as described above). As used herein, an “allelic variant” of a nucleic acid molecule, or region, for which nucleic acid sequence is provided herein is a nucleic acid molecule, or region, that occurs essentially at the same locus in the genome of another or second isolate, and that, due to natural variation caused by, for example, mutation or recombination, has a similar but not identical nucleic acid sequence. A coding region allelic variant typically encodes a protein having similar activity to that of the protein encoded by the gene to which it is being compared. An allelic variant can also comprise an alteration in the 5′ or 3′ untranslated regions of the gene, such as in regulatory control regions (eg. see U.S. Pat. No. 5,753,235).

[0082] Expression Systems

[0083] The streptococcus nucleotide sequences can be expressed in a variety of different expression systems; for example those used with mammalian cells, baculoviruses, plants, bacteria, and yeast.

[0084] i. Mammalian Systems

[0085] Mammalian expression systems are known in the art. A mammalian promoter is any DNA sequence capable of binding mammalian RNA polymerase and initiating the downstream (3′) transcription of a coding sequence (eg. structural gene) into mRNA. A promoter will have a transcription initiating region, which is usually placed proximal to the 5′ end of the coding sequence, and a TATA box, usually located 25-30 base pairs (bp) upstream of the transcription initiation site. The TATA box is thought to direct RNA polymerase 11 to begin RNA synthesis at the correct site. A mammalian promoter will also contain an upstream promoter element, usually located within 100 to 200 bp upstream of the TATA box. An upstream promoter element determines the rate at which transcription is initiated and can act in either orientation [Sambrook et al..(1989) “Expression of Cloned Genes in Mammalian Cells.” In Molecular Cloning: A Laboratory Manual, 2nd ed.].

[0086] Mammalian viral genes are often highly expressed and have a broad host range: therefore sequences encoding mammalian viral genes provide particularly useful promoter sequences. Examples include the SV40 early promoter, mouse mammary tumor virus LTR promoter, adenovirus major late promoter (Ad MLP), and herpes simplex virus promoter. In addition, sequences derived from non-viral genes, such as the murine metallotheionein gene, also provide useful promoter sequences. Expression may be either constitutive or regulated (inducible), depending on the promoter can be induced with glucocorticoid in hormone-responsive cells.

[0087] The presence of an enhancer element (enhancer), combined with the promoter elements described above, will usually increase expression levels. An enhancer is a regulatory DNA sequence that can stimulate transcription up to 1000-fold when linked to homologous or heterologous promoters, with synthesis beginning at the normal RNA start site. Enhancers are also active when they are placed upstream or downstream from the transcription initiation site, in either normal or flipped orientation, or at a distance of more than 1000 nucleotides from the promoter [Maniatis et al. (1987) Science 236:1237; Alberts et al. (1989) Molecular Biology of the Cell, 2nd ed.]. Enhancer elements derived from viruses may be particularly useful, because they usually have a broader host range. Examples include the SV40 early gene enhancer [Dijkema et al (1985) EMBO J. 4:761] and the enhancer/promoters derived from the long terminal repeat (LTR) of the Rous Sarcoma Virus [Gorman et al, (1982b) Proc. Natl: Acad. Sci. 79:6777] and from human cytomegalovirus [Boshart et al. (1985) Cell 41:521]. Additionally some enhancers are regulatable and become active only in the presence of an inducer, such as a hormone or metal ion [Sassone-Corsi and Borelli (1986) Trends Genet. 2:215; Maniatis et al. (1987) Science 236:1237].

[0088] A DNA molecule may be expressed intracellularly in mammalian cells. A promoter sequence may be directly linked with the DNA molecule, in which case the first amino acid at the N-terminus of the recombinant protein will always be a methionine, which is encoded by the ATG start codon. If desired, the N-terminus may be cleaved from the protein by in vitro incubation with cyanogen bromide.

[0089] Alternatively, foreign proteins can also be secreted from the cell into the growth media by creating chimeric DNA molecules that encode a fusion protein comprised of a leader sequence fragment that provides for secretion of the foreign protein in mammalian cells. Preferably, there are processing sites encoded between the leader fragment and the foreign gene that can be cleaved either in vivo or in vitro. The leader sequence fragment usually encodes a signal peptide comprised of hydrophobic amino acids which direct the secretion of the protein from the cell. The adenovirus triparite leader is an example of a leader sequence that provides for secretion of a foreign protein in mammalian cells.

[0090] Usually, transcription termination and polyadenylation sequences recognized by mammalian cells are regulatory regions located 3′ to the translation stop codon and thus, together with the promoter elements, flank the coding sequence. The 3′ terminus of the mature mRNA is formed by site-specific post-transcriptional cleavage and polyadenylation [Birnstiel et al. (1985) Cell 41:349; Proudfoot and Whitelaw (1988) “Termination and 3′ end processing of eukaryotic RNA. In Transcription and splicing (ed. B. D. Hames and D. M. Glover); Proudfoot (1989) Trends Biochem. Sci. 14:105]. These sequences direct the transcription of an mRNA which can be translated into the polypeptide encoded by the DNA. Examples of transcription terminater/ipolyadenylation signals include those derived from SV40 [Sambrook et al (1989) “Expression of cloned genes in cultured mammalian cells.” In Molecular Cloning: A Laboratory Manual].

[0091] Usually, the above described components, comprising a promoter, polyadenylation signal, and transcription termination sequence are put together into expression constructs. Enhancers, introns with functional splice donor and acceptor sites, and leader sequences may also be included in an expression construct, if desired. Expression constructs are often maintained in a replicon, such as an extrachromosomal element (eg. plasmids) capable of stable maintenance in a host, such as mammalian cells or bacteria. Mammalian replication systems include those derived from animal viruses, which require trans-acting factors to replicate. For example, plasmids containing the replication systems of papovaviruses, such as SV40 [Gluzman (1981) Cell 23:175] or polyomavirus, replicate to extremely high copy number in the presence of the appropriate viral T antigen. Additional examples of mammalian replicons include those derived from bovine papillomavirus and Epstein-Barr virus. Additionally, the replicon may have two replicaton systems, thus allowing it to be maintained, for example, in mammalian cells for expression and in a prokaryotic host for cloning and amplification. Examples of such mammalian-bacteria shuttle vectors include pMT2 [Kaufman et al. (1989) Mol. Cell. Biol. 9:946] and pHEBO [Shimizu et al. (1986) Mol. Cell. Biol. 6:1074].

[0092] The transformation procedure used depends upon the host to be transformed. Methods for introduction of heterologous polynucleotides into mammalian cells are known in the art and include dextran-mediated transfection, calcium phosphate precipitation, polybrene mediated transfection, protoplast fusion, electroporation, encapsulation of the polynucleotide(s) in liposomes, and direct microinjection of the DNA into nuclei.

[0093] Mammalian cell lines available as hosts for expression are known in the art and include many immortalized cell lines available from the American Type Culture Collection (ATCC), including but not limited to, Chinese hamster ovary (CHO) cells, HeLa cells, baby hamster kidney (BHK) cells, monkey kidney cells (COS), human hepatocellular carcinoma cells (eg. Hep G2), and a number of other cell lines.

[0094] ii. Baculovirus Systems

[0095] The polynucleotide encoding the protein can also be inserted into a suitable insect expression vector, and is operably linked to the control elements within that vectcr. Vector construction employs techniques which are known in the art. Generally, the components of the expression system include a transfer vector, usually a bacterial plasmid, which contains both a fragment of the baculovirus genome, and a convenient restriction site for insertion of the heterologous gene or genes to be expressed; a wild type baculovirus with a sequence homologous to the baculovirus-specific fragment in the transfer vector (this allows for the homologous recombination of the heterologous gene in to the baculovirus genome); and appropriate insect host cells and growth media.

[0096] After inserting the DNA sequence encoding the protein into the transfer vector, the vector and the wild type viral genome are transfected into an insect host cell where the vector and viral genome are allowed to recombine. The packaged recombinant virus is expressed and recombinant plaques are identified and purified. Materials and methods for baculovirus/insect cell expression systems are commercially available in kit form from, inter alia, Invitrogen, San Diego Calif. (“MaxBac” kit). These techniques are generally known to those skilled in the art and fully described in Summers and Smith, Texas Agricultural Experiment Station Bulletin No. 1555 (1987) (hereinafter “Summers and Smith”).

[0097] Prior to inserting the DNA sequence encoding the protein into the baculovirus genome, the above described components, comprising a promoter, leader (if desired), coding sequence, and transcription termination sequence, are usually assembled into an intermediate transplacement construct (transfer vector). This may contain a single gene and operably linked regulatory elements; multiple genes, each with its owned set of operably linked regulatory elements; or multiple genes, regulated by the same set of regulatory elements. Intermediate transplacement constructs are often maintained in a replicon, such as an extra-chromosomal element (e.g. plasmids) capable of stable maintenance in a host, such as a bacterium. The replicon will have a replication system, thus allowing it to be maintained in a suitable host for cloning and amplification.

[0098] Currently, the most commonly used transfer vector for introducing foreign genes into AcNPV is pAc373. Many other vectors, known to those of skill in the art, have also been designed. These include, for example, pVL985 (which alters the polyhedrin start codon from ATG to ATT, and which introduces a BamHI cloning site 32 basepairs downstream from the ATT; see Luckow and Summers, Virology (1989) 17:31.

[0099] The plasmid usually also contains the polyhedrin polyadenylation signal (Miller et al. (1988) Ann. Rev. Microbiol., 42:177) and a prokaryotic ampicillin-resistance (amp) gene and origin of replication for selection and propagation in E. coli.

[0100] Baculovirus transfer vectors usually contain a baculovirus promoter. A baculovirus promoter is any DNA sequence capable of binding a baculovirus RNA polymerase and initiating the downstream (5′ to 3′) transcription of a coding sequence (eg. structural gene) into mRNA. A promoter will have a transcription initiation region which is usually placed proximal to the 5′ end of the coding sequence. This transcription initiation region usually includes an RNA polymerase binding site and a transcription initiation site. A baculovirus transfer vector may also have a second domain called an enhancer, which, if present, is usually distal to the structural gene. Expression may be either regulated or constitutive.

[0101] Structural genes, abundantly transcribed at late times in a viral infection cycle, provide particularly useful promoter sequences. Examples include sequences derived from the gene encoding the viral polyhedron protein, Friesen et al., (1986) “The Regulation of Baculovirus Gene Expression,” in: The Molecular Biology of Baculoviruses (ed. Walter Doerfler); EPO Publ. Nos. 127 839 and 155 476; and the gene encoding the p10 protein, Vlak et al., (1988), J. Gen. Virol. 69:765.

[0102] DNA encoding suitable signal sequences can be derived from genes for secreted insect or baculovirus proteins, such as the baculovirus polyhedrin gene (Carbonell et al. (1988) Gene, 73:409). Alternatively, since the signals for mammalian cell posttranslational modifications (such as signal peptide cleavage, proteolytic cleavage, and phosphorylation) appear to be recognized by insect cells, and the signals required for secretion and nuclear accumulation also appear to be conserved between the invertebrate cells and vertebrate cells, leaders of non-insect origin, such as those derived from genes encoding human α-interferon, Maeda et al., (1985), Nature 31S:592; human gastrin-releasing peptide, Lebacq-Verheyden et al., (1988), Molec. Cell. Biol. 8:3129; human IL-2, Smith et al., (1985) Proc. Nat'l Acad. Sci. USA, 82:8404; mouse IL-3, (Miyajima et al., (1987) Gene 58:273; and human glucocerebrosidase, Martin et al. (1988) DNA, 7:99, can also be used to provide for secretion in insects.

[0103] A recombinant polypeptide or polyprotein may be expressed intracellularly or, if it is expressed with the proper regulatory sequences, it can be secreted. Good intracellular expression of nonfused foreign proteins usually requires heterologous genes that ideally have a short leader sequence containing suitable translation initiation signals preceding an ATG start signal. If desired, methionine at the N-terminus may be cleaved from the mature protein by in vitro incubation with cyanogen bromide.

[0104] Alternatively, recombinant polyproteins or proteins which are not naturally secreted can be secreted from the insect cell by creating chimeric DNA molecules that encode a fusion protein comprised of a leader sequence fragment that provides for secretion of the foreign protein in insects. The leader sequence fragment usually encodes a signal peptide comprised of hydrophobic amino acids which direct the translocation of the protein into the endoplasmic reticulum.

[0105] After insertion of the DNA sequence and/or the gene encoding the expression product precursor of the protein, an insect cell host is co-transformed with the heterologous DNA of the transfer vector and the genomic DNA of wild type baculovirus—usually by co-transfection. The promoter and transcription termination sequence of the construct will usually comprise a 2-5kb section of the baculovirus genome. Methods for introducing heterologous DNA into the desired site in the baculovirus virus are known in the art. (See Summers and Smith supra; Ju et al. (1987); Smith et al., Mol. Cell. Biol. (1983) 3:2156; and Luckow and Summers (1989)). For example, the insertion can be into a gene such as the polyhedrin gene, by homologous double crossover recombination; insertion can also be into a restriction enzyme site engineered into the desired baculovirus gene. Miller et al., (1989), Bioessays 4:91.The DNA sequence, when cloned in place of the polyhedrin gene in the expression vector, is flanked both 5′ and 3′ by polyhedrin-specific sequences and is positioned downstream of the polybedrin promoter.

[0106] The newly formed baculovirus expression vector is subsequently packaged into an infectious recombinant baculovirus. Homologous recombination occurs at low frequency (between about 1% and about 5%); thus, the majority of the virus produced after cotransfection is still wild-type virus. Therefore, a method is necessary to identify recombinant viruses. An advantage of the expression system is a visual screen allowing recombinant viruses to be distinguished. The polyhedrin protein, which is produced by the native virus, is produced at very high levels in the nuclei of infected cells at late times after viral infection. Accumulated polyhedrin protein forms occlusion bodies that also contain embedded particles. These occlusion bodies, up to 15 μm in size, are highly refractile, giving them a bright shiny appearance that is readily visualized under the light microscope. Cells infected with recombinant viruses lack occlusion bodies. To distinguish recombinant virus from wild-type virus, the transfection supernatant is plaqued onto a monolayer of insect cells by techniques known to those skilled in the art. Namely, the plaques are screened under the light microscope for the presence (indicative of wild-type virus) or absence (indicative of recombinant virus) of occlusion bodies. “Current Protocols in Microbiology” Vol. 2 (Ausubel et al. eds) at 16.8 (Supp. 10, 1990); Summers and Smith, supra; Miller et al. (1989).

[0107] Recombinant baculovirus expression vectors have been developed for infection into several insect cells. For example, recombinant baculoviruses have been developed for, inter alia: Aedes aegypti , Autographa californica, Bombyx mori, Drosophila melanogaster, Spodopterafrugiperda, and Trichoplusiani (WO 89/1046699; Carbonell et al., (1985) J. Virol. 56:153; Wright (1986) Nature 321:718; Smith et al., (1983) Mol. Cell. Biol. 3:2156; and see generally, Fraser, et al. (1989) In Vitro Cell. Dev. Biol. 25:225).

[0108] Cells and cell culture media are commercially available for both direct and fusion expression of heterologous polypeptides in a baculovirus/expression system; cell culture technology is generally known to those skilled in the art. See, eg. Summers and Smith supra.

[0109] The modified insect cells may then be grown in an appropriate nutrient medium, which allows for stable maintenance of the plasmid(s) present in the modified insect host. Where the expression product gene is under inducible control, the host may be grown to high density, and expression induced. Alternatively, where expression is constitutive, the product will be continuously expressed into the medium and the nutrient medium must be continuously circulated, while removing the product of interest and augmenting depleted nutrients. The product may be purified by such techniques as chromatography, eg. HPLC, affinity chromatography, ion exchange chromatography, etc.; electrophoresis; density gradient centrifugation; solvent extraction, etc. As appropriate, the product may be further purified, as required, so as to remove substantially any insect proteins which are also present in the medium, so as to provide a product which is at least substantially free of host debris, eg. proteins, lipids and polysaccharides.

[0110] In order to obtain protein expression, recombinant host cells derived from the transformants are incubated under conditions which allow expression of the recombinant protein encoding sequence. These conditions will vary, dependent upon the host cell selected. However, the conditions are readily ascertainable to those of ordinary skill in the art, based upon what is known in the art.

[0111] iii. Plant Systems

[0112] There are many plant cell culture and whole plant genetic expression systems known in the art. Exemplary plant cellular genetic expression systems include those described in patents, such as: U.S. Pat. No. 5,693,506; U.S. Pat. No. 5,659,122; and U.S. Pat. No. 5,608,143. Additional examples of genetic expression in plant cell culture has been described by Zenk, Phytochemistry 30:3861-3863 (1991). Descriptions of plant protein signal peptides may be found in addition to the references described above in Vaulcombe et al., Mol. Gen. Genet. 209:33-40 (1987); Chandler et al., Plant Molecular Biology 3:407-418 (1984); Rogers, J. Biol. Chem. 260:3731-3738 (1985); Rothstein et al., Gene 55:353-356 (1987); Whittier et al., Nucleic Acids Research 15:2515-2535 (1987); Wirsel et al., Molecular Microbiology 3:3-14 (1989); Yu et al., Gene 122:247-253 (1992). A description of the regulation of plant gene expression by the phytohormone, gibberellic acid and secreted enzymes induced by gibberellic acid can be found in R. L. Jones and J. MacMillin, Gibberellins: in: Advanced Plant Physiology, Malcolm B. Wilkins, ed., 1984 Pitman Publishing Limited, London, pp.21-52. References that describe other metabolically-regulated genes: Sheen, Plant Cell, 2:1027-1038(1990); Maas et al., EMBO J. 9:3447-3452 (1990); Benkel and Hickey, Proc. Natl. Acad. Sci. 84:1337-1339 (1987).

[0113] Typically, using techniques known in the art, a desired polynucleotide sequence is inserted into an expression cassette comprising genetic regulatory elements designed for operation in plants. The expression cassette is inserted into a desired expression vector with companion sequences upstream and downstream from the expression cassette suitable for expression in a plant host. The companion-sequences will be of plasmid or viral origin and provide necessary characteristics to the vector to permit the vectors to move DNA from an original cloning host, such as bacteria, to the desired plant host. The basic bacterial/plant vector construct will preferably provide a broad host range prokaryote replication origin; a prokaryote selectable marker; and, for Agrobacterium transformations, T DNA sequences for Agrobacterium-mediated transfer to plant chromosomes. Where the heterologous gene is not readily amenable to detection, the construct will preferably also have a selectable marker gene suitable for determining if a plant cell has been transformed. A general review of suitable markers, for example for the members of the grass family, is found in Wilmink and Dons, 1993, Plant Mol. Biol. Reptr, 11(2):165-185.

[0114] Sequences suitable for permitting integration of the heterologous sequence into the plant genome are also recommended. These might include transposon sequences and the like for homologous recombination as well as Ti sequences which permit random insertion of a heterologous expression cassette into a plant genome. Suitable prokaryote selectable markers include resistance toward antibiotics such as ampicillin or tetracycline. Other DNA sequences encoding additional functions may also be present in the vector, as is known in the art.

[0115] The nucleic acid molecules of the subject invention may be included into an expression cassette for expression of the protein(s) of interest. Usually, there will be only one expression cassette, although two or more are feasible. The recombinant expression cassette will contain in addition to the heterologous protein encoding sequence the following elements, a promoter region, plant 5′ untranslated sequences, initiation codon depending upon whether or not the structural gene comes equipped with one, and a transcription and translation termination sequence. Unique restriction enzyme sites at the 5′ and 3′ ends of the cassette allow for easy insertion into a pre-existing vector.

[0116] A heterologous coding sequence may be for any protein relating to the present invention. The sequence encoding the protein of interest will encode a signal peptide which allows processing and translocation of the protein, as appropriate, and will usually lack any sequence which might result in the binding of the desired protein of the invention to a membrane. Since, for the most part, the transcriptional initiation region will be for a gene which is expressed and translocated during germination, by employing the signal peptide which provides for translocation, one may also provide for translocation of the protein of interest. In this way, the protein(s) of interest will be translocated from the cells in which they are expressed and may be efficiently harvested. Typically secretion in seeds are across the aleurone or scutellar epithelium layer into the endosperm of the seed. While it is not required that the protein be secreted from the cells in which the protein is produced, this facilitates the isolation and purification of the recombinant protein.

[0117] Since the ultimate expression of the desired gene product will be in a eucaryotic cell it is desirable to determine whether any portion of the cloned gene contains sequences which will be processed out as introns by the host's splicosome machinery. If so, site-directed mutagenesis of the “intron” region may be conducted to prevent losing a portion of the genetic message as a false intron code, Reed and Maniatis, Cell 41:95-105, 1985.

[0118] The vector can be microinjected directly into plant cells by use of micropipettes to mechanically transfer the recombinant DNA. Crossway, Mol. Gen. Genet, 202:179-185, 1985. The genetic material may also be transferred into the plant cell by using polyethylene glycol, Krens, et al., Nature, 296, 72-74, 1982. Another method of introduction of nucleic acid segments is high velocity ballistic penetration by small particles with the nucleic acid either within the matrix of small beads or particles, or on the surface, Klein, et al., Nature, 327, 70-73, 1987 and Knudsen and Muller, 1991, Planta, 185:330-336 teaching particle bombardment of barley endosperm to create transgenic barley. Yet another method of introduction would be fusion of protoplasts with other entities, either minicells, cells, lysosomes or other fusible lipid-surfaced bodies, Fraley, et al., Proc. Natl. Acad. Sci. USA, 79, 1859-1863, 1982.

[0119] The vector may also be introduced into the plant cells by electroporation. (Fromm et al., Proc. Natl Acad. Sci. USA 82:5824,1985). In this technique, plant protoplasts are electroporated in the presence of plasmids containing the gene construct. Electrical impulses of high field strength reversibly permeabilize biomembranes allowing the introduction of the plasmids. Electroporated plant protoplasts reform the cell wall, divide, and form plant callus.

[0120] All plants from which protoplasts can be isolated and cultured to give whole regenerated plants can be transformed by the present invention so that whole plants are recovered which contain the transferred gene. It is known that practically all plants can be regenerated from cultured cells or tissues, including but not limited to all major species of sugarcane, sugar beet, cotton, fruit and other trees, legumes and vegetables. Some suitable plants include, for example, species from the genera Fragaria, Lotus, Medicago, Onobrychis, Trifolium, Trigonella, Vigna, Citrus, Linum, Geranium, Manihot, Daucus, Arabidopsis, Brassica, Raphanus, Sinapis, Atropa, Capsicum, Datura, Hyoscyamus, Lycopersion, Nicotiana, Solanum, Petunia, Digitalis, Majorana, Cichorium, Helianthus, Lactuca, Bromus, Asparagus, Antirrhinuni, Hererocallis, Nemesia, Pelargonium, Panicum, Pennisetum, Ranunculus, Senecio, Salpiglossis, Cucumis, Browaalia, Glycine, Lolium, Zea, Triticum, Sorghum, and Datura.

[0121] Means for regeneration vary from species to species of plants, but generally a suspension of transformed protoplasts containing copies of the heterologous gene is first provided. Callus tissue is formed and shoots may be induced from callus and subsequently rooted. Alternatively, embryo formation can be induced from the protoplast suspension. These embryos germinate as natural embryos to form plants. The culture media will generally contain various amino acids and hormones, such as auxin and cytokinins. It is also advantageous to add glutamic acid and proline to the medium, especially for such species as corn and alfalfa. Shoots and roots normally develop simultaneously. Efficient regeneration will depend on the medium, on the genotype, and on the history of the culture. If these three variables are controlled, then regeneration is fully reproducible and repeatable.

[0122] In some plant cell culture systems, the desired protein of the invention may be excreted or alternatively, the protein may be extracted from the whole plant. Where the desired protein of the invention is secreted into the medium, it may be collected. Alternatively, the embryos and embryoless-half seeds or other plant tissue may be mechanically disrupted to release any secreted protein between cells and tissues. The mixture may be suspended in a buffer solution to retrieve soluble proteins. Conventional protein isolation and purification methods will be then used to purify the recombinant protein. Parameters of time, temperature pH, oxygen, and volumes will be adjusted through routine methods to optimize expression and recovery of heterologous protein.

[0123] iv. Bacterial Systems

[0124] Bacterial expression techniques are known in the art. A bacterial promoter is any DNA sequence capable of binding bacterial RNA polymerase and initiating the downstream (3′) transcription of a coding sequence (eg. structural gene) into mRNA. A promoter will have a transcription initiation region which is usually placed proximal to the 5′ end of the coding sequence. This transcription initiation region usually includes an RNA polymerase binding site and a transcription initiation site. A bacterial promoter may also have a second domain called an operator, that may overlap an adjacent RNA polymerase binding site at which RNA synthesis begins. The operator permits negative regulated (inducible) transcription, as a gene repressor protein may bind the operator and thereby inhibit transcription of a specific gene. Constitutive expression may occur in the absence of negative regulatory elements, such as the operator. In addition, positive regulation may be achieved by a gene activator protein binding sequence, which, if present is usually proximal (5′) to the RNA polymerase binding sequence. An example of a gene activator protein is the catabolite activator protein (CAP), which helps initiate transcription of the lac operon in Escherichia coli (E. coli) [Raibaud et al. (1984) Annu. Rev. Genet. 18:173]. Regulated expression may therefore be either positive or negative, thereby either enhancing or reducing transcription.

[0125] Sequences encoding metabolic pathway enzymes provide particularly useful promoter sequences. Examples include promoter sequences derived from sugar metabolizing enzymes, such as galactose, lactose (lac) [Chang et al. (1977) Nature 198:1056], and maltose. Additional examples include promoter sequences derived from biosynthetic enzymes such as tryptophan (trp) [Goeddel et al. (1980) Nuc. Acids Res. 8:4057; Yelverton et al. (1981) Nucl. Acids Res. 9:731; U.S. Pat. No. 4,738,921; EP-A-0036776 and EP-A-0121775]. The g-laotamase (bla) promoter system [Weissmann (1981) “The cloning of interferon and other mistakes.” In Interferon 3 (ed. I. Gresser)], bacteriophage lambda PL [Shimatake et al. (1981) Nature 292:128] and T5 [U.S. Pat. No. 4,689,406] promoter systems also provide useful promoter sequences.

[0126] In addition, synthetic promoters which do not occur in nature also function as bacterial promoters. For example, transcription activation sequences of one bacterial or bacteriophage promoter may be joined with the operon sequences of another bacterial or bacteriophage promoter, creating a synthetic hybrid promoter [U.S. Pat. No. 4,551,433]. For example, the tac promoter is a hybrid trp-lac promoter comprised of both trp promoter and lac operon sequences that is regulated by the lac repressor [Amann et al, (1983) Gene 25:167; de Boer et al. (1983) Proc. Natl. Acad. Sci. 80:21]. Furthermore, a bacterial promoter can include naturally occurring promoters of non-bacterial origin that have the ability to bind bacterial RNA polymerase and initiate transcription. A naturally occurring promoter of non-bacterial origin can also be coupled with a compatible RNA polymerase to produce high levels of expression of some genes in prokaryotes. The bacteriophage T7 RNA polymerase/promoter system is an example of a coupled promoter system [Studier et al. (1986) J. Mol. Biol. 189:113; Tabor et al. (1985) Proc Natl. Acad. Sci. 82:1074]. In addition, a hybrid promoter can also be comprised of a bacteriophage promoter and an E. coli operator region (EPO-A-0 267 851).

[0127] In addition to a functioning promoter sequence, an efficient ribosome binding site is also useful for the expression of foreign genes in prokaryotes. In E. coli, the ribosome binding site is called the Shine-Dalgarno (SD) sequence and includes an initiation codon (ATG) and a sequence 3-9 nucleotides in length located 3-11 nucleotides upstream of the initiation codon [Shine et al. (1975) Nature 254:34]. The SD sequence is thought to promote binding of mRNA to the ribosome by the pairing of bases between the SD sequence and the 3′ and of E. coli 16S rRNA [Steitz et al. (1979) “Genetic signals and nucleotide sequences in messenger RNA.” In Biological Regulation and Development: Gene Expression (ed. R. F. Goldberger)]. To express eukaryotic genes and prokaryotic genes with weak ribosome-binding site [Sambrook et al. (1989) “Expression of cloned genes in Escherichia coli.” In Molecular Cloning: A Laboratory Manual].

[0128] A DNA molecule may be expressed intracellularly. A promoter sequence may be directly linked with the DNA molecule, in which case the first amino acid at the N-terminus will always be a methionine, which is encoded by the ATG start codon. If desired, methionine at the N-terminus may be cleaved from the protein by in vitro incubation with cyanogen bromide or by either in vivo on in vitro incubation with a bacterial methionine N-terminal peptidase (EPO-A-0 219 237).

[0129] Fusion proteins provide an alternative to direct expression. Usually, a DNA sequence encoding the N-terminal portion of an endogenous bacterial protein, or other stable protein, is fused to the 5′ end of heterologous coding sequences. Upon expression, this construct will provide a fusion of the two amino acid sequences. For example, the bacteriophage lambda cell gene can be linked at the 5′ terminus of a foreign gene and expressed in bacteria. The resulting fusion protein preferably retains a site for a processing enzyme (factor Xa) to cleave the bacteriophage protein from the foreign gene [Nagai et al. (1984) Nature 309:810]. Fusion proteins can also be made with sequences from the lacZ [Jia et al. (1987) Gene 60:197], trpE [Allen et al. (1987) J. Biotechnol. 5:93; Makoff et al. (1989) J. Gen. Microbiol. 135:11], and Chey [EP-A-0 324 647] genes. The DNA sequence at the junction of the two amino acid sequences may or may not encode a cleavable site. Another example is a ubiquitin fusion protein. Such a fusion protein is made with the ubiquitin region that preferably retains a site for a processing enzyme (eg. ubiquitin specific processing-protease) to cleave the ubiquitin from the foreign protein. Through this method, native foreign protein can be isolated [Miller et al. (1989) Bio/Technology 7:698].

[0130] Alternatively, foreign proteins can also be secreted from the cell by creating chimeric DNA molecules that encode a fusion protein comprised of a signal peptide sequence fragment that provides for secretion of the foreign protein in bacteria [U.S. Pat. No. 4,336,336]. The signal sequence fragment usually encodes a signal peptide comprised of hydrophobic amino acids which direct the secretion of the protein from the cell. The protein is either secreted into the growth media (gram-positive bacteria) or into the periplasmic space, located between the inner and outer membrane of the cell (gram-negative bacteria). Preferably there are processing sites, which can be cleaved either in vivo or in vitro encoded between the signal peptide fragment and the foreign gene.

[0131] DNA encoding suitable signal sequences can be derived from genes for secreted bacterial proteins, such as the E. coli outer membrane protein gene (ompA) [Masui et al. (1983), in: Experimental Manipulation of Gene Expression; Ghrayeb et al. (1984) EMBO J. 3:2437] and the E. coli alkaline phosphatase signal sequence (phoA) [Oka et al. (1985) Proc. Natl. Acad. Sci. 82:7212]. As an additional example, the signal sequence of the alpha-amylase gene from various Bacillus strains can be used to secrete heterologous proteins from B. subtilis [Palva et al. (1982) Proc. Natl. Acad. Sci. USA 79:5582; EP-A-0 244 042].

[0132] Usually, transcription termination sequences recognized by bacteria are regulatory regions located 3′ to the translation stop codon, and thus together with the promoter flank the coding sequence. These sequences direct the transcription of an mRNA which can be translated into the polypeptide encoded by the DNA. Transcription termination sequences frequently include DNA sequences of about 50 nucleotides capable of forming stem loop structures that aid in terminating transcription.. Examples include transcription termination sequences derived from genes with strong promoters, such as the trp gene in E. coli as well as other biosynthetic genes.

[0133] Usually, the above described components, comprising a promoter, signal sequence (if desired), coding sequence of interest, and transcription termination sequence, are put together into expression constructs. Expression constructs are often maintained in a replicon, such as an extrachromosomal element (eg. plasmids) capable of stable maintenance in a host, such as bacteria. The replicon will have a replication system, thus allowing it to be maintained in a prokaryotic host either for expression or for cloning and amplification. In addition, a replicon may be either a high or low copy number plasmid. A high copy number plasmid will generally have a copy number ranging from about 5 to about 200, and usually about 10 to about 150. A host containing a high copy number plasmid will preferably contain at least about 10, and more preferably at least about 20 plasmids. Either a high or low copy number vector may be selected, depending upon the effect of the vector and the foreign protein on the host.

[0134] Alternatively, the expression constructs can be integrated into the bacterial genome with an integrating vector. Integrating vectors usually contain at least one sequence homologous to the bacterial chromosome that allows the vector to integrate. Integrations appear to result from recombinations between homologous DNA in the vector and the bacterial chromosome. For example, integrating vectors constructed with DNA from various Bacillus strains integrate into the Bacillus chromosome (EP-A-0 127 328). Integrating vectors may also be comprised of bacteriophage or transposon sequences.

[0135] Usually, extrachromosomal and integrating expression constructs may contain selectable markers to allow for the selection of bacterial strains that have been transformed. Selectable markers can be expressed in the bacterial host and may include genes which render bacteria resistant to drugs such as ampicillin, chloramphenicol, erythromycin, kanamycin (neomycin), and tetracycline [Davies et al. (1978) Annu. Rev. Microbiol. 32:4691. Selectable markers may also include biosynthetic genes, such as those in the histidine, tryptophan, and leucine biosynthetic pathways.

[0136] Alternatively, some of the above described components can be put together in transformation vectors. Transformation vectors are usually comprised of a selectable market that is either maintained in a replicon or developed into an integrating vector, as described above.

[0137] Expression and transformation vectors, either extra-chromosomal replicons or integrating vectors, have been developed for transformation into many bacteria. For example, expression vectors have been developed for, inter alia, the following bacteria: Bacillus subtilis [Palva et al. (1982) Proc. Natl. Acad. Sci. USA 79:5582; EP-A-0 036 259 and EP-A-0 063 953; WO 84/04541], Escherichia coli [Shimatake et al. (1981) Nature 292:128; Amann et al. (1985) Gene 40:183; Studier et al. (1986) J. Mol. Biol. 189:113; EP-A-0 036 776,EP-A-0 136 829 and EP-A-0 136 907], Streptococcus cremoris [Powell et al. (1988) Appl. Environ. Microbiol. 54:655]; Streptococcus lividans [Powell et al. (1988) Appl. Environ. Microbiol. 54:655], Streptomyces lividans [U.S. Pat. No. 4,745,056].

[0138] Methods of introducing exogenous DNA into bacterial hosts are well-known in the art, and usually include either the transformation of bacteria treated with CaCl₂ or other agents, such as divalent cations and DMSO. DNA can also be introduced into bacterial cells by electroporation. Transformation procedures usually vary with the bacterial species to be transformed. See eg. [Masson et al. (1989) FEMS Microbiol. Lett. 60:273; Palva et al. (1982) Proc. Natl. Acad. Sci. USA 79:5582; EP-A-0 036 259 and EP-A-0 063 953; WO 84/04541, Bacillus], [Miller et al. (1988) Proc. Natl. Acad. Sci. 85:856; Wang et al. (1990) J. Bacteriol. 172:949, Campylobacter], [Cohen et al. (1973) Proc. Natl. Acad. Sci. 69:2110; Dower et al. (1988) Nucleic Acids Res. 16:6127; Kushner (1978) “An improved method for transformation of Escherichia coli with Co1E1-derived plasmids. In Genetic Engineering: Proceedings of the International Symposium on Genetic Engineering (eds. H. W. Boyer and S. Nicosia); Mandel et al. (1970) J. Mol. Biol. 53:159; Taketo (1988) Biochim. Biophys. Acta 949:318; Escherichia], [Chassy et al. (1987) FEMS Microbiol. Lett. 44:173 Lactobacillus]; [Fiedler et al. (1988) Anal. Biochem 170:38, Pseudomonas]; [Augustin et al. (1990) FEMS Microbiol. Lett. 66:203, Staphylococcus], [Barany et al. (1980) J. Bacteriol. 144:698; Harlander (1987) “Transformation of Streptococcus lactis by electroporation, in: Streptococcal Genetics (ed. J. Ferretti and R. Curtiss III); Perry et al. (1981) Infect. Immun. 32:1295; Powell et al. (1988) Appl. Environ. Microbiol. 54:655; Somkuti et al. (1987) Proc. 4th Evr. Cong. Biotechnology 1:412, Streptococcus].

[0139] v. Yeast Expression

[0140] Yeast expression systems are also known to one of ordinary skill in the art. A yeast promoter is any DNA sequence capable of binding yeast RNA polymerase and initiating the downstream (3′) transcription of a coding sequence (eg. structural gene) into mRNA. A promoter will have a transcription initiation region which is usually placed proximal to the 5′ end of the coding sequence. This transcription initiation region usually includes an RNA polymerase binding site (the “TATA Box”) and a transcription initiation site. A yeast promoter may also have a second domain called an upstream activator sequence (UAS), which, if present, is usually distal to the structural gene. The UAS permits regulated (inducible) expression. Constitutive expression occurs in the absence of a UAS. Regulated expression may be either positive or negative, thereby either enhancing or reducing transcription.

[0141] Yeast is a fermenting organism with an active metabolic pathway, therefore sequences encoding enzymes in the metabolic pathway provide particularly useful promoter sequences. Examples include alcohol dehydrogenase (ADH) (EP-A-0 284 044), enolase, glucokinase, glucose-6-phosphate isomerase, glyceraldehyde-3-phosphate-dehydrogenase (GAP or GAPDH), hexokinase, phosphofructokinase, 3-phosphoglycerate mutase, and pyruvate kinase (PyK) (EPO-A-0 329 203). The yeast PH05 gene, encoding acid phosphatase, also provides useful promoter sequences [Myanohara etal. (1983) Proc. Natl. Acad. Sci. USA 80:1].

[0142] In addition, synthetic promoters which do not occur in nature also function as yeast promoters. For example, UAS sequences of one yeast promoter may be joined with the transcription activation region of another yeast promoter, creating a synthetic hybrid promoter. Examples of such hybrid promoters include the ADH regulatory sequence linked to the GAP transcription activation region (U.S. Pat. Nos. 4,876,197 and 4,880,734). Other examples of hybrid promoters include promoters which consist of the regulatory sequences of either the ADH2, GAL4, GAL10, OR PH05 genes, combined with the transcriptional activation region of a glycolytic enzyme gene such as GAP or PyK (EP-A-0 164 556). Furthermore, a yeast promoter can include naturally occurring promoters of non-yeast origin that have the ability to bind yeast RNA polymerase and initiate transcription. Examples of such promoters include, inter alia, [Cohen et al. (1980) Proc. Natl. Acad. Sci. USA 77:1078; Henikoff et al. (1981) Nature 283:835; Hollenberg et al. (1981) Curr. Topics Microbiol. Immunol. 96:119; Hollenberg et al. (1979) “The Expression of Bacterial Antibiotic Resistance Genes in the Yeast Saccharomyces cerevisiae,” in: Plasmids of Medical, Environmental and Commercial Importance (eds. K. N. Timmis and A. Puhler); Mercerau-Puigalon et al. (1980) Gene 11:163; Panthier et al. (1980) Curr. Genet. 2:109;].

[0143] A DNA molecule may be expressed intracellularly in yeast. A promoter sequence may be directly linked with the DNA molecule, in which case the first amino acid at the N-terminus of the recombinant protein will always be a methionine, which is encoded by the ATG start codon. If desired, methionine at the N-terminus may be cleaved from the protein by in vitro incubation with cyanogen bromide.

[0144] Fusion proteins provide an alternative for yeast expression systems, as well as in mammalian, baculovirus, and bacterial expression systems. Usually, a DNA sequence encoding the N-terminal portion of an endogenous yeast protein, or other stable protein, is fused to the 5′ end of heterologous coding sequences. Upon expression, this construct will provide a fusion of the two amino acid sequences. For example, the yeast or human superoxide dismutase (SOD) gene, can be linked at the 5′ terminus of a foreign gene and expressed in yeast. The DNA sequence at the junction of the two amino acid sequences may or may not encode a cleavable site. See eg. EP-A-0 196 056. Another example is a ubiquitin fusion protein. Such a fusion protein is made with the ubiquitin region that preferably retains a site for a processing enzyme (eg. ubiquitin-specific processing protease) to cleave the ubiquitin from the foreign protein. Through this method, therefore, native foreign protein can be isolated (eg. WO88/024066).

[0145] Alternatively, foreign proteins can also be secreted from the cell into the growth media by creating chimeric DNA molecules that encode a fusion protein comprised of a leader sequence fragment that provide for secretion in yeast of the foreign protein. Preferably, there are processing sites encoded between the leader fragment and the foreign gene that can be cleaved either in vivo or in vitro. The leader sequence fragment usually encodes a signal peptide comprised of hydrophobic amino acids which direct the secretion of the protein from the cell.

[0146] DNA encoding suitable signal sequences can be derived from genes for secreted yeast proteins, such as the yeast invertase gene (EP-A-0 012 873; JPO. 62,096,086) and the A-factor gene (U.S. Pat. No. 4,588,684). Alternatively, leaders of non-yeast origin, such as an interferon leader, exist that also provide for secretion in yeast (EP-A-0 060 057).

[0147] A preferred class of secretion leaders are those that employ a fragment of the yeast alpha-factor gene, which contains both a “pre” signal sequence, and a “pro” region. The types of alpha-factor fragments that can be employed include the full-length pre-pro alpha factor leader (about 83 amino acid residues) as well as truncated alpha-factor leaders (usually about 25 to about 50 amino acid residues) (U.S. Pat. Nos. 4,546,083 and 4,870,008; EP-A-0 324 274). Additional leaders employing an alpha-factor leader fragment that provides for secretion include hybrid alpha-factor leaders made with a presequence of a first yeast, but a pro-region from a second yeast alphafactor. (eg. see WO 89/02463.)

[0148] Usually, transcription termination sequences recognized by yeast are regulatory regions located 3′ to the translation stop codon, and thus together with the promoter flank the coding sequence. These sequences direct the transcription of an mRNA which can be translated into the polypeptide encoded by the DNA. Examples of transcription terminator sequence and other yeast-recognized termination sequences, such as those coding for glycolytic enzymes.

[0149] Usually, the above described components, comprising a promoter, leader (if desired), coding sequence of interest, and transcription termination sequence, are put together into expression constructs. Expression constructs are often maintained in a replicon, such as an extrachromosomal element (eg. plasmids) capable of stable maintenance in a host, such as yeast or bacteria. The replicon may have two replication systems, thus allowing it to be maintained, for example, in yeast for expression and in a prokaryotic host for cloning and amplification. Examples of such yeast-bacteria shuttle vectors include YEp24 [Botstein et al. (1979) Gene 8:17-24], pC1/1[Brake et al. (1984) Proc. Natl. Acad. Sci USA 81:4642-4646], and YRp17 [Stinchcomb et al. (1982) J. Mol. Biol. 158:157]. In addition, a replicon may be either a high or low copy number plasmid. A high copy number plasmid will generally have a copy number ranging from about 5 to about 200, and usually about 10 to about 150. A host containing a high copy number plasmid will preferably have at least about 10, and more preferably at least about 20. Enter a high or low copy number vector may be selected, depending upon the effect of the vector and the foreign protein on the host. See eg. Brake et al., supra.

[0150] Alternatively, the expression constructs can be integrated into the yeast genome with an integrating vector. Integrating vectors usually contain at least one sequence homologous to a yeast chromosome that allows the vector to integrate, and preferably contain two homologous sequences flanking the expression construct. Integrations appear to result from recombinations between homologous DNA in the vector and the yeast chromosome [Orr-Weaver et al. (1983) Methods in Enzymol. 101:228-245]. An integrating vector may be directed to a specific locus in yeast by selecting the appropriate homologous sequence for inclusion in the vector. See Orr-Weaver et al., supra. One or more expression construct may integrate, possibly affecting levels of recombinant protein produced [Rine et al. (1983) Proc. Natl. Acad. Sci. USA 80:6750]. The chromosomal sequences included in the vector can occur either as a single segment in the vector, which results in the integration of the entire vector, or two segments homologous to adjacent segments in the chromosome and flanking the expression construct in the vector, which can result in the stable integration of only the expression construct.

[0151] Usually, extrachromosomal and integrating expression constructs may contain selectable markers to allow for the selection of yeast strains that have been transformed. Selectable markers may include biosynthetic genes that can be expressed in the yeast host, such as ADE2, HIS4, LEU2, TRP1, and ALG7, and the G418 resistance gene, which confer resistance in yeast cells to tunicamycin and G418, respectively. In addition, a suitable selectable marker may also provide yeast with the ability to grow in the presence of toxic compounds, such as metal. For example, the presence of CUP1 allows yeast to grow in the presence of copper ions [Butt et at. (1987) Microbiol, Rev. 51:351].

[0152] Alternatively, some of the above described components can be put together into transformation vectors. Transformation vectors are usually comprised of a selectable marker that is either maintained in a replicon or developed into an integrating vector, as described above.

[0153] Expression and transformation vectors, either extrachromosomal replicons or integrating vectors, have been developed for transformation into many yeasts. For example, expression vectors have been developed for, inter alia, the following yeasts:Candida albicans [Kurtz, et al. (1986) Mol. Cell. Biol. 6:142], Candida maltosa [Kunze, et al, (1985) J. Basic Microbiol. 25:141]. Hansenula polymorpha [Gleeson, et al. (1986) J. Gen. Microbiol. 132:3459; Roggenkamp et al. (1986) Mol. Gen. Genet. 202:302], Kluyveromyces fragilis [Das, et al. (1984) J. Bacteriol. 158:1165], Kluyveromyces lactis [De Louvencourt et al. (1983) J. Bacteriol. 154:737; Van den Berg et al. (1990) Bio/Technology 8:135], Pichia guillerimondii [Kunze et al. (1985) J. Basic Microbiol. 25:141], Pichia pastoris [Cregg, et al. (1985) Mol. Cell. Biol. 5:3376; U.S. Pat. Nos. 4,837,148 and 4,929,555], Saccharomyces cerevisiae [Hinnen et al. (1978) Proc. Natl. Acad. Sci. USA 75:1929; Ito et al. (1983) J. Bacteriol. 153:163], Schizosaccharomyces pombe [Beach and Nurse (1981) Nature 300:706], and Yarrowia lipolytica [Davidow, et al. (1985) Curr. Genet. 10:380471 Gaillardin, et al. (1985) Curr. Genet. 10:49].

[0154] Methods of introducing exogenous DNA into yeast hosts are well-known in the art, and usually include either the transformation of spheroplasts or of intact yeast cells treated with alkali cations. Transformation procedures usually vary with the yeast species to be transformed. See eg. [Kurtz et al. (1986) Mol. Cell. Biol. 6:142; Kunze et al. (1985) J. Basic Microbiol. 25:141; Candida]; [Gleeson et al. (1986) J. Gen. Microbiol. 132:3459; Roggenkamp et al. (1986) Mol. Gen. Genet. 202:302; Hansenula]; [Das et al. (1984) J. Bacteriol. 158:1165; De Louvencourt et al. (1983) J. Bacteriol. 154:1165; Van den Berg et al. (1990) Bio/Technology 8:135; Kluyveromyces]; [Cregg et al. (1985) Mol. Cell. Biol. 5:3376; Kunze et al. (1985) J. Basic Microbiol. 25:141; U.S. Pat. Nos. 4,837,148 and 4,929,555; Pichi [Hinnen et al. (1978) Proc. Natl. Acad. Sci. USA 75;1929; Ito et al. (1983) J. Bacteriol 153:163 Saccharomyces]; [Beach and Nurse (1981) Nature 300:706; Schizosaccharomyces]; [Davidow et al. (1985) Curr. Genet. 10:39; Gaillardin et al. (1985) Curr. Genet. 10:49; Yarrowia].

[0155] Antibodies

[0156] As used herein, the term “antibody” refers to a polypeptide or group of polypeptides composed of at least one antibody combining site. An “antibody combining site” is the three-dimensional binding space with an internal surface shape and charge distribution complementary to the features of an epitope of an antigen, which allows a binding of the antibody with the antigen. “Antibody” includes, for example, vertebrate antibodies, hybrid antibodies, chimeric antibodies, humanised antibodies, altered antibodies, univalent antibodies, Fab proteins, and single domain antibodies.

[0157] Antibodies against the proteins of the invention are useful for affinity chromatography, immunoassays, and distinguishing/identifying streptococcus proteins.

[0158] Antibodies to the proteins of the invention, both polyclonal and monoclonal, may be prepared by conventional methods. In general, the protein is first used to immunize a suitable animal, preferably a mouse, rat, rabbit or goat. Rabbits and goats are preferred for the preparation of polyclonal sera due to the volume of serum obtainable, and the availability of labeled anti-rabbit and anti-goat antibodies. Immunization is generally performed by mixing or emulsifying the protein in saline, preferably in an adjuvant such as Freund's complete adjuvant, and injecting the mixture or emulsion parenterally (generally subcutaneously or intramuscularly). A dose of 50-200 μg/injection is typically sufficient. Immunization is generally boosted 2-6 weeks later with one or more injections of the protein in saline, preferably using Freund's incomplete adjuvant. One may alternatively generate antibodies by in vitro immunization using methods known in the art, which for the purposes of this invention is considered equivalent to in vivo immunization. Polyclonal antisera is obtained by bleeding the immunized animal into a glass or plastic container, incubating the blood at 25° C. for one hour, followed by incubating at 4° C. for 2-18 hours. The serum is rec centrifugation (eg. 1,000 g for 10 minutes). About 20-50 ml per bleed may be obtained from rabbits.

[0159] Monoclonal antibodies are prepared using the standard method of Kohler & Milstein [Nature (1975) 256:495-96], or a modification thereof. Typically, a mouse or rat is immunized as described above. However, rather than bleeding the animal to extract serum, the spleen (and optionally several large lymph nodes) is removed and dissociated into single cells. If desired, the spleen cells may be screened (after removal of nonspecifically adherent cells) by applying a cell suspension to a plate or well coated with the protein antigen. B-cells expressing membrane-bound immunoglobulin specific for the antigen bind to the plate, and are not rinsed away with the rest of the suspension. Resulting B-cells, or all dissociated spleen cells, are then induced to fuse with myeloma cells to form hybridomas, and are cultured in a selective medium (eg. hypoxanthine, aminopterin, thymidine medium, “HAT”). The resulting hybridomas are plated by limiting dilution, and are assayed for production of antibodies which bind specifically to the immunizing antigen (and which do not bind to unrelated antigens). The selected MAb-secreting hybridomas are then cultured either in vitro (eg. in tissue culture bottles or hollow fiber reactors), or in vivo (as ascites in mice).

[0160] If desired, the antibodies (whether polyclonal or monoclonal) may be labeled using conventional techniques. Suitable labels include fluorophores, chromophores, radioactive atoms (particularly ³²P and ¹²⁵I), electron-dense reagents, enzymes, and ligands having specific binding partners. Enzymes are typically detected by their activity. For example, horseradish peroxidase is usually detected by its ability to convert 3,3′,5,5′-tetramethylbenzidine (TMB) to a blue pigment, quantifiable with a spectrophotometer. “Specific binding partner” refers to a protein capable of binding a ligand molecule with high specificity, as for example in the case of an antigen and a monoclonal antibody specific therefor. Other specific binding partners include biotin and avidin or streptavidin, IgG and protein A, and the numerous receptor-ligand couples known in the art. It should be understood that the above description is not meant to categorize the various labels into distinct classes, as the same label may serve in several different modes. For example, ¹²⁵I may serve as a radioactive label or as an electron-dense reagent. HRP may serve as enzyme or as antigen for a MAb. Further, one may combine various labels for desired effect. For example, MAbs and avidin also require labels in the practice of this invention: thus, one might label a MAb with biotin, and detect its presence with avidin labeled with ¹²⁵I, or with an anti-biotin MAb labeled with HRP. Other permutations and possibilities will be readily apparent to those of ordinary skill in the art, and are considered as equivalents within the scope of the instant invention.

[0161] Pharmaceutical Compositions

[0162] Pharmaceutical compositions can comprise either polypeptides, antibodies, or nucleic acid of the invention. The pharmaceutical compositions will comprise a therapeutically effective amount of either polypeptides, antibodies, or polynucleotides of the claimed invention.

[0163] The term “therapeutically effective amount” as used herein refers to an amount of a therapeutic agent to treat, ameliorate, or prevent a desired disease or condition, or to exhibit a detectable therapeutic or preventative effect. The effect can be detected by, for example, chemical markers or antigen levels. Therapeutic effects also include reduction in physical symptoms, such as decreased body temperature. The precise effective amount for a subject will depend upon the subject's size and health, the nature and extent of the condition, and the therapeutics or combination of therapeutics selected for administration. Thus, it is not useful to specify an exact effective amount in advance. However, the effective amount for a given situation can be determined by routine experimentation and is within the judgement of the clinician.

[0164] For purposes of the present invention, an effective dose will be from about 0.01 mg/kg to 50 mg/kg or 0.05 mg/kg to about 10 mg/kg of the DNA constructs in the individual to which it is administered.

[0165] A pharmaceutical composition can also contain a pharmaceutically acceptable carrier. The term “pharmaceutically acceptable carrier” refers to a carrier for administration of a therapeutic agent, such as antibodies or a polypeptide, genes, and other therapeutic agents. The term refers to any pharmaceutical carrier that does not itself induce the production of antibodies harmful to the individual receiving the composition, and which may be administered without undue toxicity. Suitable carriers may be large, slowly metabolized macromolecules such as proteins, polysaccharides, polylactic acids, polyglycolic acids, polymeric amino acids, amino acid copolymers, and inactive virus particles. Such carriers are well known to those of ordinary skill in the art.

[0166] Pharmaceutically acceptable salts can be used therein, for example, mineral acid salts such as hydrochlorides, hydrobromides, phosphates, sulfates, and the like; and the salts of organic acids such as acetates, proplonates, malonates, benzoates, and the like. A thorough discussion of pharmaceutically acceptable excipients is available in Remington's Pharmaceutical Sciences (Mack Pub. Co., N.J. 1991).

[0167] Pharmaceutically acceptable carriers in therapeutic compositions may contain liquids such as water, saline, glycerol and ethanol. Additionally, auxiliary substances, such as wetting or emulsifying agents, pH buffering substances, and the like, may be present in such vehicles. Typically, the therapeutic compositions are prepared as injectables, either as liquid solutions or suspensions; solid forms suitable for solution in, or suspension in, liquid vehicles prior to injection may also be prepared. Liposomes are included within the definition of a pharmaceutically acceptable carrier.

[0168] Delivery Methods

[0169] Once formulated, the compositions of the invention can be administered directly to the subject. The subjects to be treated can be animals; in particular, human subjects can be treated.

[0170] Direct delivery of the compositions will generally be accomplished by injection, either subcutaneously, intraperitoneally, intravenously or intramuscularly or delivered to the interstitial space of a tissue. The compositions can also be administered into a lesion. Other modes of administration include oral and pulmonary administration, suppositories, and transdermal or transcutaneous applications (eg. see WO98/20734), needles, and gene guns or hyposprays. Dosage treatment may be a single dose schedule or a multiple dose schedule.

[0171] Vaccines

[0172] Vaccines according to the invention may either be prophylactic (ie. to prevent infection) or therapeutic (ie. to treat disease after infection).

[0173] Such vaccines comprise immunising antigen(s), immunogen(s), polypeptide(s), protein(s) or nucleic acid, usually in combination with “pharmaceutically acceptable carriers,” which include any carrier that does not itself induce the production of antibodies harmful to the individual receiving the composition. Suitable carriers are typically large, slowly metabolized macromolecules such as proteins, polysaccharides, polylactic acids, polyglycolic acids, polymeric amino acids, amino acid copolymers, lipid aggregates (such as oil droplets or liposomes), and inactive virus particles. Such carriers are well known to those of ordinary skill in the art. Additionally, these carriers may function as immunostimulating agents (“adjuvants”). Furthermore, the antigen or immunogen may be conjugated to a bacterial toxoid, such as a toxoid from diphtheria, tetanus, cholera, H. pylori, etc. pathogens.

[0174] Preferred adjuvants to enhance effectiveness of the composition include, but are not limited to: (1) aluminum salts (alum), such as aluminum hydroxide, aluminum phosphate, aluminum sulfate, etc; (2) oil-in-water emulsion formulations (with or without other specific immunostimulating agents such as muramyl peptides (see below) or bacterial cell wall components), such as for example (a) MF59™ (WO 90/14837; Chapter 10 in Vaccine design: the subunit and adjuvant approach, eds. Powell & Newman, Plenum Press 1995),.containing 5% Squalene, 0.5% Tween 80, and 0.5% Span 85 (optionally containing various amounts of MTP-PE (see below), although not required) formulated into submicron particles using a microfluidizer such as Model 110Y microfluidizer (Microfluidics, Newton, Mass.), (b) SAF, containing 10% Squalane, 0.4% Tween 80, 5% pluronic-blocked polymer L121, and thr-MDP (see below) either microfluidized into a submicron emulsion or vortexed to generate a larger particle size emrulsion, and (c) Ribi™ adjuvant system (RAS), (Ribi Immunochem, Hamilton, Mont.) containing 2% Squalene, 0.2% Tween 80, and one or more bacterial cell wall components from the group consisting of monophosphorylipid A (MPL), trehalose dimycolate (TDM), and cell wall skeleton (CWS), preferably MPL+CWS (Detox™); (3) saponin adjuvants, such as Stimulon™ (Cambridge Bioscience, Worcester, Mass.) may be used or particles generated therefrom such as ISCOMs (immunostimulating complexes); (4) Complete Freund's Adjuvant (CFA) and Incomplete Freund's Adjuvant (IFA); (5) cytokines, such as interleukins (eg. IL-1,-IL-2, IL-4, IL-5, IL-6, IL-7, IL-12, etc. interferons (eg. gamma interferon), macrophage colony stimulating factor (M-CSF), tumor necrosis factor (TNF), etc; and (6) other substances that act as immunostimulaling agents to enhance the effectiveness of the composition. Alum and MF59™ are preferred.

[0175] As mentioned above, muramyl peptides include, but are not limited to, N-acetyl-muramyl-L-threonyl-D-isoglutamine (thr-MDP), N-acetyl-norm uram yl-L-alanyl-D-isoglutam ine (nor-MDP), N-acetylm uram yl-L-alanyl-D-isoglutam inyl-L-alanine-2-(1′-2′-dipalmitoyl-sn-glycero-3-hydroxyphosphoryloxy)-ethylamine (MTP-PE), etc.

[0176] The immunogenic compositions (eg. the immunising antigen/immunogen/polypeptide/protein/nucleic acid, pharmaceutically acceptable carrier, and adjuvant) typically will contain diluents, such as water, saline, glycerol, ethanol, etc. Additionally, auxiliary substances, such as wetting or emulsifying agents, pH buffering substances, and the like, may be present in such vehicles.

[0177] Typically, the immunogenic compositions are prepared as injectables, either as liquid solutions or suspensions; solid forms suitable for solution in, or suspension in, liquid vehicles prior to injection may also be prepared. The preparation also may be emulsified or encapsulated in liposomes for enhanced adjuvant effect, as discussed above under pharmaceutically acceptable carriers.

[0178] Immunogenic compositions used as vaccines comprise an immunologically effective amount of the antigenic or immunogenic polypeptides, as well as any other of the above-mentioned components, as needed. By “immunologically effective amount”, it is meant that the administration of that amount to an individual, either in a single-dose or as part of a series, is effective for treatment or prevention. This amount varies depending upon the health and physical condition of the individual to be treated, the taxonomic group of individual to be treated (eg. nonhuman primate, primate, etc.), the capacity of the individual's immune system to synthesize antibodies, the degree of protection desired, the formulation of the vaccine, the treating doctor's assessment of the medical situation, and other relevant factors. It is expected that the amount will fall in a relatively broad range that can be determined through routine trials.

[0179] The immunogenic compositions are conventionally administered parenterally, eg. by injection, either subcutaneously, intramuscularly, or transdermally/transcutaneously (eg. WO98120734), Additional formulations suitable for other modes of administration include oral and -pulmonary formulations, suppositories, and transdermal applications. Dosage treatment may be a single dose schedule or a multiple dose schedule. The vaccine may be administered in conjunction with other immunoregulatory agents.

[0180] As an alternative to protein-based vaccines, DNA vaccination may be used [eg. Robinson & Torres (1997) Seminars in Immunol 9:271-283; Donnelly et al. (1997) Annu Rev Immunol 15:617-648; later herein].

[0181] Gene Delivery Vehicles

[0182] Gene therapy vehicles for delivery of constructs including a coding sequence of a therapeutic of the invention, to be delivered to the mammal for expression in the mammal, can be administered either locally or systemically. These constructs can utilize viral or non-viral vector approaches in in vivo or ex vivo modality. Expression of such coding sequence can be induced using endogenous mammalian or heterologous promoters. Expression of the coding sequence in vivo can be either constitutive or regulated.

[0183] The invention includes gene delivery vehicles capable of expressing the contemplated nucleic acid sequences. The gene delivery vehicle is preferably a viral vector and, more preferably, a retroviral, adenoviral, adeno-associated viral (AAV), herpes viral, or alphavirus vector. The viral vector can also be an astrovirus, coronavirus, orthomyxovirus, papovavirus, paramyxovirus, parvovirus, picornavirus, poxvirus, or togavirus viral vector. See generally, Jolly (1994) Cancer Gene Therapy 1:51-64; Kimura (1994) Human Gene Therapy 5:845-852; Connelly (1995) Human Gene Therapy 6:185-193; and Kaplitt (1994) Nature Genetics 6:148-153.

[0184] Retroviral vectors are well known in the art and we contemplate that any retroviral gene therapy vector is employable in the invention, including B, C and D type retroviruses, xenotropic retroviruses (for example, NZB-X1, NZB-X2 and NZB9-1 (see O'Neill (1985) J. Virol. 53:160) polytropic retroviruses eg. MCF and MCF-MLV (see Kelly (1983) J. Virol. 45:291), spumaviruses and lentiviruses. See RNA Tumor Viruses, Second Edition, Cold Spring Harbor Laboratory, 1985.

[0185] Portions of the retroviral gene therapy vector may be derived from different retroviruses. For example, retrovector LTRs may be derived from a Murine Sarcoma Virus, a tRNA binding site from a Rous Sarcoma Virus, a packaging signal from a Murine Leukemia Virus, and an origin of second strand synthesis from an Avian Leukosis Virus.

[0186] These recombinant retroviral vectors may be used to generate transduction competent retroviral vector particles by introducing them into appropriate packaging cell lines (see U.S. Pat. No. 5,591,624). Retrovirus vectors can be constructed for site-specific integration into host cell DNA by incorporation of a chimeric integrase enzyme into the retroviral particle (see WO96/37626). It is preferable that the recombinant viral vector is a replication defective recombinant virus.

[0187] Packaging cell lines suitable for use with the above-described retrovirus vectors are well known in the art, are readily prepared (see W095/30763 and W092/05266), and can be used to create producer cell lines (also termed vector cell lines or “VCLs”) for the production of recombinant vector particles. Preferably, the packaging cell lines are made from human parent cells (eg. HT1080 cells) or mink parent cell lines, which eliminates inactivation in human serum.

[0188] Preferred retroviruses for the construction of retroviral gene therapy vectors include Avian Leukosis Virus, Bovine Leukemia, Virus, Murine Leukemia Virus, Mink-Cell Focus-Inducing Virus, Murine Sarcoma Virus, Reticuloendotheliosis Virus and Rous Sarcoma Virus. Particularly preferred Murine Leukemia Viruses include 4070A and 1504A (Hartley and Rowe (1976) J Virol 19:19-25), Abelson (ATCC No. VR-999), Friend (ATCC No. VR-245), Graffi, Gross (ATCC Nol VR-590), Kirsten, Harvey Sarcoma Virus and Rauscher (ATCC No. VR-998) and Moloney Murine Leukemia Virus (ATCC No. VR-190). Such retroviruses may be obtained from depositories or collections such as the American Type Culture Collection (“ATCC”) in Rockville, Md. or isolated from known sources using commonly available techniques.

[0189] Exemplary known retroviral gene therapy vectors employable in this invention include those described in patent applications GB2200651, EP0415731, EP0345242, EP0334301, WO89/02468; WO89/05349, WO89/09271, WO90/02806, WO90/07936, WO94/03622, WO93/25698, WO93/25234, WO93/11230, WO93/10218, WO91/02805, WO91/02825, WO95/07994, U.S. Pat. No. 5,219,740, U.S. Pat. No. 4,405,712, U.S. Pat. No. 4,861,719, U.S. 4,980,289, U.S. Pat. No. 4,777,127, U.S. Pat. No. 5,591,624. See also Vile (1993) Cancer Res 53:3860-3864; Vile (1993) Cancer Res 53:962-967; Ram (1993) Cancer Res 53 (1993) 83-88; Takamiya (1992) J Neurosci Res 33:493-503; Baba (1993) J Neurosurg 79:735; Mann (1983) Cell 33:153; Cane (1984) Proc Natl Acad Sci 81:6349; and Miller (1990) Human Gene Therapy 1.

[0190] Human adenoviral gene therapy vectors are also known in the art and employable in this invention. See, for example, Berkner (1988) Biotechniques 6:616 and Rosenfeld (1991) Science 252:431, and WO93/07283, WO93/06223, and WO93/07282. Exemplary known adenoviral gene therapy vectors employable in this invention include those described in the above referenced documents and in WO94112649, WO93/03769, WO93119191, WO94/28938, WO95/11984, WO95/00655, WO95/27071, WO95/29993, WO95/34671, WO96/05320, WO94/08026, WO94/11506, WO93/06223, WO94/24299, WO95/14102, WO95/24297, WO95/02697, WO94/28152, WO94/24299, WO95/09241, WO95/25807, WO95/05835, WO94/18922 and WO95/09654. Alternatively, administration of DNA linked to killed adenovirus as described in Curiel (1992) Hum. Gene Ther. 3:147-154 may be employed. The gene delivery vehicles of the invention also include adenovirus associated virus (AAV) vectors. Leading and preferred examples of such vectors for use in this invention are the AAV-2 based vectors disclosed in Srivastava, WO93/09239. Most preferred AAV vectors comprise the two AAV inverted terminal repeats in which the native D-sequences are modified by substitution of nucleotides, such that at least 5 native nucleotides and up to 18 native nucleotides, preferably at least 10 native nucleotides up to 18 native nucleotides, most preferably 10 native nucleotides are retained and the remaining nucleotides of the D-sequence are deleted or replaced with non-native nucleotides. The native D-sequences of the AAV inverted terminal repeats are sequences of 20 consecutive nucleotides in each AAV inverted terminal repeat (ie. there is one sequence at each end) which are not involved in HP formation. The non-native replacement nucleotide may be any nucleotide other than the nucleotide found in the native D-sequence in the same position. Other employable exemplary AAV vectors are pWP-19, pWN-1, both of which are disclosed in Nahreini (1993) Gene 124:257-262. Another example of such an AAV vector is psub2ol (see Samulski (1987) J. Virol. 61:3096). Another exemplary AAV vector is the Double-D ITR vector. Construction of the Double-D ITR vector is disclosed in U.S. Pat. No. 5,478,745. Still other vectors are those disclosed in Carter U.S. Pat. No. 4,797,368 and Muzyczka U.S. Pat. No. 5,139,941, Chartejee U.S. Pat. No. 5,474,935, and Kotin WO94/288157. Yet a further example of an AAV vector employable in this invention is SSV9AFABTKneo, which contains the AFP enhancer and albumin promoter and directs expression predominantly in the liver. Its structure and construction are disclosed in Su (1996) Human Gene Therapy 7:463-470. Additional AAV gene therapy vectors are described in U.S. Pat. No. 5,354,678, U.S. Pat. No. 5,173,414, U.S. Pat. No. 5,139,941, and U.S. Pat. No. 5,252,479.

[0191] The gene therapy vectors of the invention also include herpes vectors. Leading and preferred examples are herpes simplex virus vectors containing a sequence encoding a thymidine kinase polypeptide such as those disclosed in U.S. Pat. No. 5,288,641 and EP0176170 (Roizman). Additional exemplary herpes simplex virus vectors include HFEM/ICP6-LacZ disclosed in WO95/04139 (Wistar Institute), pHSVlac described in Geller (1988) Science 241:1667-1669 and in WO90/09441 and WO92/07945, HSV Us3::pgC-lacZ described in Fink (1992) Human Gene Therapy 3;11-19 and HSV 7134, 2 RH 105 and GAL4 described in EP 0453242 (Breakefield), and those deposited with the ATCC with accession numbers VR-977 and VR-260.

[0192] Also contemplated are alpha virus gene therapy vectors that can be employed in this invention. Preferred alpha virus vectors are Sindbis viruses vectors. Togaviruses, Semliki Forest virus (ATCC VR-67; ATCC VR-1247), Middleberg virus (ATCC VR-370), Ross River virus (ATCC VR-373; ATCC VR-1246), Venezuelan equine encephalitis virus (ATCC VR923; ATCC VR-1250; ATCC VR-1249; ATCC VR-532), and those described in U.S. Pat. Nos. 5,091,309, 5,217,879, and WO92/10578. More particularly, those alpha virus vectors described in U.S. Ser. No. 08/405,627, filed Mar. 15, 1995,WO94/21792, WO92/10578, WO95/07994, US 5,091,309 and U.S. Pat. No. 5,217,879 are employable. Such alpha viruses may be obtained from depositories or collections such as the ATCC in Rockville, Md. or isolated from known sources using commonly available techniques. Preferably, alphavirus vectors with reduced cytotoxicity are used (see U.S. Ser. No. 08/679640).

[0193] DNA vector systems such as eukaryotic layered expression systems are also useful for expressing the nucleic acids of the invention. See WO95/07994 for a detailed description of eukaryotic layered expression systems. Preferably, the eukaryotic layered expression systems of the invention are derived from alphavirus vectors and most preferably from Sindbis viral vectors.

[0194] Other viral vectors suitable for-use in the present invention include those derived from poliovirus, for example ATCC VR-58 and those described in Evans, Nature 339 (1989) 385 and Sabin (1973) J. Biol. Standardization 1:115; rhinovirus, for example ATCC VR-1110 and those described in Arnold (1990) J Cell Biochem L401; pox viruses such as canary pox virus or vaccinia virus, for example ATCC VR-111 and ATCC VR-2010 and those described in Fisher-Hoch (1989) Proc Natl Acad Sci 86:317; Flexner (1989) Ann NY Acad Sci 569:86, Flexner (1990) Vaccine 8:17; in U.S. Pat. No. 4,603,112 and U.S. Pat. No. 4,769,330 and WO89101973; SV40 virus, for example ATCC VR-305 and those described in Mulligan (1979) Nature 277:108 and Madzak (1992) J Gen Virol 73:1533; influenza virus, for example ATCC VR-797 and recombinant influenza viruses made employing reverse genetics techniques as described in U.S. Pat. No. 5,166,057 and in Enami (1990) Proc Natl Acad Sci 87:3802-3805; Enami & Palese (1991) J Virol 65:2711-2713 and Luytjes (1989) Cell 59:110, (see also McMichael (1983) NEJ Med 309:13, and Yap (1978) Nature 273:238 and Nature (1979) 277:108); human immunodeficiency virus as described in EP-0386882 and in Buchschacher (1992) J. Virol. 66:2731; measles virus, for example ATCC VR-67 and VR-1247 and those described in EP-0440219; Aura virus, for example ATCC VR-368; Bebaru virus, for example ATCC VR-600 and ATCC VR-1240; Cabassou virus, for example ATCC VR-922; Chikungunya virus, for example ATCC VR-64 and ATCC VR-1241; Fort Morgan Virus, for example ATCC VR-924; Getah virus, for example ATCC VR-369 and ATCC VR-1243; Kyzylagach virus, for example ATCC VR-927; Mayaro virus, for example ATCC VR-66; Mucambo virus, for example ATCC VR-580 and ATCC VR-1244; Ndumu virus, for example ATCC VR-371; Pixuna virus, for example ATCC VR-372 and ATCC VR-1245; Tonate virus, for example ATCC VR-925; Triniti virus, for example ATCC VR-469; Una virus, for example ATCC VR-374; Whataroa virus, for example ATCC VR-926; Y-62-33 virus, for example ATCC VR-375; O'Nyong virus, Eastern encephalitis virus, for example ATCC VR-65 and ATCC VR-1242; Western encephalitis virus, for example ATCC VR-70, ATCC VR-1251, ATCC VR-622 and ATCC VR-1252; and coronavirus, for example ATCC VR-740 and those described in Hamre (1966) Proc Soc Exp Biol Med 121:190.

[0195] Delivery of the compositions of this invention into cells is not limited to the above mentioned viral vectors. Other delivery methods and media may be employed such as, for example, nucleic acid expression vectors, polycationic condensed DNA linked or unlinked to killed adenovirus alone, for example see U.S. Ser. No. 08/366,787, filed Dec. 30, 1994 and Curiel (1992) Hum Gene Ther 3:147-154 ligand linked DNA, for example see Wu (1989) J Biol Chem 264:16985-16987, eucaryotic cell delivery vehicles cells, for example see U.S. Ser. No.08/240,030, filed May 9, 1994, and U.S. Ser. No. 08/404,796, deposition of photopolymerized hydrogel materials, hand-held gene transfer particle gun, as described in U.S. Pat. No. 5,149,655, ionizing radiation as described in US5,206,152 and in WO92/11033, nucleic charge neutralization or fusion with cell membranes. Additional approaches are described in Philip (1994) Mol Cell Biol 14:2411-2418 and in Woffendin (1994) Proc Natl Acad Sci 91:1581-1585.

[0196] Particle mediated gene transfer may be employed, for example see U.S. Ser. No. 60/023,867. Briefly, the sequence can be inserted into conventional vectors that contain conventional control sequences for high level expression, and then incubated with synthetic gene transfer molecules such as polymeric DNA-binding cations like polylysine, protamine, and albumin, linked to cell targeting ligands such as asialoorosomucoid, as described in Wu & Wu (1987) J. Biol. Chem. 262:4429-4432, insulin as described in Hucked (1990) Biochem Pharmacol 40:253-263, galactose as described in Plank (1992) Bioconjugate Chem 3:533-539, lactose or transferrin.

[0197] Naked DNA may also be employed. Exemplary naked DNA introduction methods are described in WO 90/11092 and U.S. Pat. No. 5,580,859. Uptake efficiency may be improved using biodegradable latex beads. DNA coated latex beads are efficiently transported into cells after endocytosis initiation by the beads. The method may be improved further by treatment of the beads to increase hydrophobicity and thereby facilitate disruption of the endosome and release of the DNA into the cytoplasm.

[0198] Liposomes that can act as gene delivery vehicles are described in U.S. Pat. No. 5,422,120, WO95/13796, WO94/23697, WO91/14445 and EP-524,968. As described in U.S. Ser. No. 60/023,867, on non-viral delivery, the nucleic acid sequences encoding a polypeptide can be inserted into conventional vectors that contain conventional control sequences for high level expression, and then be incubated with synthetic gene transfer molecules such as polymeric DNA-binding cations like polylysine, protamine, and albumin, linked to cell targeting ligands such as asialoorosomucoid, insulin, galactose, lactose, or transferrin. Other delivery systems include the use of liposomes to encapsulate DNA comprising the gene under the control of a variety of tissue-specific or ubiquitously-active promoters. Further non-viral delivery suitable for use includes mechanical delivery systems such as the approach described in Woffendin et al (1994) Proc. Natl. Acad. Sci. USA 91(24):11581-11585. Moreover, the coding sequence and the product of expression of such can be delivered through deposition of photopolymerized hydrogel materials. Other conventional methods for gene delivery that can be used for delivery of the coding sequence include, for example, use of hand-held gene transfer particle gun, as described in U.S. Pat. No. 5,149,655; use of ionizing radiation for activating transferred gene, as described in U.S. Pat. No. 5,206,152 and WO92/11033

[0199] Exemplary liposome and polycationic gene delivery vehicles are those described in U.S. Pat. Nos. 5,422,120 and 4,762,915; in WO 95/13796; WO94/23697; and WO91/14445; in EP-0524968; and in Stryer, Biochemistry, pages 236-240 (1975) W. H. Freeman, San Francisco; Szoka (1980) Biochem Biophys Acta 600:1; Bayer (1979) Biochem Biophys Acta 550:464; Rivnay (1987) Meth Enzymol 149:119; Wang (1987) Proc Natl Acad Sci 84:7851; Plant (1989) Anal Biochem 176:420.

[0200] A polynucleotide composition can comprises therapeutically effective amount of a gene therapy vehicle, as the term is defined above. For purposes of the present invention, an effective dose will be from about 0.01 mg/kg to 50 mg/kg or 0.05 mg/kg to about 10 mg/kg of the DNA constructs in the individual to which it is administered.

[0201] Delivery Methods

[0202] Once formulated, the polynucleotide compositions of the invention can be administered (1) directly to the subject; (2) delivered ex vivo, to cells derived from the subject; or (3) in vitro for expression of recombinant proteins. The subjects to be treated can be mammals or birds. Also, human subjects can be treated.

[0203] Direct delivery of the compositions will generally be accomplished by injection, either subcutaneously, intraperitoneally, intravenously or intramuscularly or delivered to the interstitial space of a tissue. The compositions can also be administered into a lesion. Other modes of administration include oral and pulmonary administration, suppositories, and transdermal or transcutaneous applications (eg. see WO98/20734), needles, and gene guns or hyposprays. Dosage treatment may be a single dose schedule or a multiple dose schedule.

[0204] Methods for the ex vivo delivery and reimplantation of transformed cells into a subject are known in the art and described in eg. WO93/14778. Examples of cells useful in ex vivo applications include, for example, stem cells, particularly hematopoetic, lymph cells, macrophages, dendritic cells, or tumor cells.

[0205] Generally, delivery of nucleic acids for both ex vivo and in vitro applications can be accomplished by the following procedures, for example, dextran-mediated transfection, calcium phosphate precipitation, polybrene mediated transfection, protoplast fusion, electroporation, encapsulation of the polynucleotide(s) in liposomes, and direct microinjection of the DNA into nuclei, all well known in the art.

[0206] Polynucleotide and Polypeptide Pharmaceutical Compositions

[0207] In addition to the pharmaceutically acceptable carriers and salts described above, the following additional agents can be used with polynucleotide and/or polypeptide compositions.

[0208] A.Polypeptides

[0209] One example are polypeptides which include, without limitation: asioloorosomucoid (ASOR); transferrin; asialoglycoproteins; antibodies; antibody fragments; ferritin; interleukins; interferons, granulocyte, macrophage colony stimulating factor (GM-CSF), granulocyte colony stimulating factor (G-CSF), macrophage colony stimulating factor (M-CSF), stem cell factor and erythropoietin. Viral antigens, such as envelope proteins, can also be used. Also, proteins from other invasive organisms, such as the 17 amino acid peptide from the circumsporozoite protein of plasmodium falciparum known as RII.

[0210] B.Hormones, Vitamins, etc,

[0211] Other groups that can be included are, for example: hormones, steroids, androgens, estrogens, thyroid hormone, or vitamins, folic acid.

[0212] C.Polyalkylenes, Polysaccharides, etc.

[0213] Also, polyalkylene glycol can be included with the desired polynucleotides/polypeptides. In a preferred embodiment, the polyalkylene glycol is polyethlylene glycol. In addition, mono-, di-, or polysaccharides can be included. In a preferred embodiment of this aspect, the polysaccharide is dextran or DEAE-dextran. Also, chitosan and poly(lactide-co-glycolide)

[0214] D.Lipids, and Liposomes

[0215] The desired polynucleotide/polypeptide can also be encapsulated in lipids or packaged in liposomes prior to delivery to the subject or to cells derived therefrom.

[0216] Lipid encapsulation is generally accomplished using liposomes which are able to stably bind or entrap and retain nucleic acid. The ratio of condensed polynucleotide to lipid preparation can vary but will generally be around 1:1 (mg DNA:micromoles lipid), or more of lipid. For a review of the use of liposomes as carriers for delivery of nucleic acids, see, Hug and Sleight (1991) Biochim. Biophys. Acta. 1097:1-17; Straubinger (1983) Meth. Enzymol. 101:512-527.

[0217] Liposomal preparations for use in the present invention include cationic (positively charged), anionic (negatively charged) and neutral preparations. Cationic liposomes have been shown to mediate intracellular delivery of plasmid DNA (Felgner (1987) Proc. Natl. Acad. Sci. USA 84:7413-7416); mRNA (Malone (1989) Proc. Natl. Acad. Sci. USA 86:6077-6081); and purified transcription factors (Debs (1990) J. Biol. Chem. 265:10189-10192), in functional for

[0218] Cationic liposomes are readily available. For example, N[1-2,3-dioleyloxy)propyl]-N,N,N-triethylammonium (DOTMA) liposomes are available under the trademark Lipofectin, from GIBCO BRL, Grand Island, N.Y. (See, also, Felgner supra). Other commercially available liposomes include transfectace (DDAB/DOPE) and DOTAP/DOPE (Boerhinger). Other cationic liposomes can be prepared from readily available materials using techniques well known in the art. See, eg. Szoka (1978) Proc. Natl. Acad. Sci. USA 75:4194-4198; WO90/11092 for a description of the synthesis of DOTAP (1,2-bis(oleoyloxy)-3-(trimethylammonio)propane) liposomes.

[0219] Similarly, anionic and neutral liposomes are readily available, such as from Avanti Polar Lipids (Birmingham, Ala.), or can be easily prepared using readily available materials. Such materials include phosphatidyl choline, cholesterol, phosphatidyl ethanolamine, dioleoylphosphatidyl choline (DOPC), dioleoylphosphatidyl glycerol (DOPG), dioleoylphoshatidyl ethanolamine (DOPE), among others. These materials can also be mixed with the DOTMA and DOTAP starting materials in appropriate ratios. Methods for making liposomes using these materials are well known in the art.

[0220] The liposomes can comprise multilammelar vesicles (MLVs), small unilamellar vesicles (SUVs), or large unilamellar vesicles (LUVs). The various liposome-nucleic acid complexes are prepared using methods known in the art. See eg. Straubinger (1983) Meth. Immunol. 101:512-527; Szoka (1978) Proc. Natl. Acad. Sci. USA 75:4194-4198; Papahadjopoulos (1975) Biochim. Biophys. Acta 394:483; Wilson (1979) Cell 17:77); Deamer & Bangham (1976) Biochim. Biophys. Acta 443:629; Ostro (1977) Biochem. Biophys. Res. Commun. 76:836; Fraley (1979) Proc. Natl. Acad. Sci. USA 76:3348); Enoch & Strittmatter (1979) Proc. Natl. Acad. Sci. USA 76:145; Fraley (1980) J. Biol. Chem. (1980) 255:10431; Szoka & Papahadjopoulos (1978) Proc. Natl. Acad. Sci. USA 75:145; and Schaefer-Ridder (1982) Science 215:166.

[0221] E.Lipoproteins

[0222] In addition, lipoproteins can be included with the polynucleotide/polypeptide to be delivered. Examples of lipoproteins to be utilized include: chylomicrons, HDL, IDL, LDL, and VLDL. Mutants, fragments, or fusions of these proteins can also be used. Also, modifications of naturally occurring lipoproteins can be used, such as acetylated LDL. These lipoproteins can target the delivery of polynucleotides to cells expressing lipoprotein receptors. Preferably, if lipoproteins are including with the polynucleotide to be delivered, no other targeting ligand is included in the composition.

[0223] Naturally occurring lipoproteins comprise a lipid and a protein portion. The protein portion are known as apoproteins. At the present, apoproteins A, B, C, D, and E have been isolated and identified. At least two of these contain several proteins, designated by Roman numerals, AI, AII, AIV; CI, CII, CIII.

[0224] A lipoprotein can comprise more than one apoprotein. For example, naturally occurring chylomicrons comprises of A, B, C & E, over time these lipoproteins lose A and acquire C & E. VLDL comprises A, B, C & E apoproteins, LDL comprises apoprotein B; and HDL comprises apoproteins A, C, & E.

[0225] The amino acid of these apoproteins are known and are described in, for example, Breslow (1985) Annu Rev. Biochem 54:699; Law (1986) Adv. Exp Med. Biol. 151:162; Chen (1986) J Biol Chem 261:12918; Kane (1980) Proc Natl Acad Sci USA 77:2465; and Utermann (1984) Hum Genet 65:232.

[0226] Lipoproteins contain a variety of lipids including, triglycerides, cholesterol (free and esters), and phospholipids. The composition of the lipids varies in naturally occurring lipoproteins. For example, chylomicrons comprise mainly triglycerides. A more detailed description of the lipid content of naturally occurring lipoproteins can be found, for example, in Meth. Enzymol. 128 (1986). The composition of the lipids are chosen to aid in conformation of the apoprotein for receptor binding activity. The composition of lipids can also be chosen to facilitate hydrophobic interaction and association with the polynucleotide binding molecule.

[0227] Naturally occurring lipoproteins can be isolated from serum by ultracentrifugation, for instance. Such methods are described in Meth. Enzymol. (supra); Pitas (1980) J. Biochem. 255:5454-5460 and Mahey (1979) J Clin. Invest 64:743-750. Lipoproteins can also be produced by in vitro or recombinant methods by expression of the apoprotein genes in a desired host cell. See, for example, Atkinson (1986) Annu Rev Biophys Chem 15:403 and Radding (1958) Biochim Biophys Acta 30: 443. Lipoproteins can also be purchased from commercial suppliers, such as Biomedical Techniologies, Inc., Stoughton, Mass., USA. Further description of lipoproteins can be found in WO98/06437.

[0228] F.Polycationic Agents

[0229] Polycationic agents can be included, with or without lipoprotein, in a composition with the desired polynucleotide/polypeptide to be delivered.

[0230] Polycationic agents, typically, exhibit a net positive charge at physiological relevant pH and are capable of neutralizing the electrical charge of nucleic acids to facilitate delivery to a desired location. These agents have both in vitro, ex vivo, and in vivo applications. Polycationic agents can be used to deliver nucleic acids to a living subject either intramuscularly, subcutaneously, etc.

[0231] The following are examples of useful polypeptides as polycationic agents: polylysine, polyarginine, polyornithine, and protamine. Other examples include histones, protamines, human serum albumin, DNA binding proteins, non-histone chromosomal proteins, coat proteins from DNA viruses, such as (X174, transcriptional factors also contain domains that bind DNA and therefore may be useful as nucleic aid condensing agents. Briefly, transcriptional factors such as C/CEBP, c-jun, c-fos, AP-1, AP-2, AP-3, CPF, Prot-1, Sp-1, Oct-1, Oct-2, CREP, and TFIID contain basic domains that bind DNA sequences.

[0232] Organic polycationic agents include: spermine, spermidine, and purtrescine.

[0233] The dimensions and of the physical properties of a polycationic agent can be extrapolated from the list above, to construct other polypeptide polycationic agents or to produce synthetic polycationic agents.

[0234] Synthetic polycationic agents which are useful include, for example, DEAE-dextran, polybrene. Lipofectin™, and lipofectAMINE™ are monomers that form polycationic complexes when combined with polynucleotides/polypeptides.

[0235] Immunodiagnostic Assays

[0236] Streptococcus antigens of the invention can be used in immunoassays to detect antibody levels (or, conversely, anti-streptococcus antibodies can be used to detect antigen levels). Immunoassays based on well defined, recombinant antigens can be developed to replace invasive diagnostics methods. Antibodies to streptococcus proteins within biological samples, including for example, blood or serum samples, can be detected. Design of the immunoassays is subject to a great deal of variation, and a variety of these are known in the art. Protocols for the immunoassay may be based, for example, upon competition, or direct reaction, or sandwich type assays. Protocols may also, for example, use solid supports, or may be by immunoprecipitation. Most assays involve the use of labeled antibody or polypeptide; the labels may be, for example, fluorescent, chemiluminescent, radioactive, or dye molecules. Assays which amplify the signals from the probe are also known; examples of which are assays which utilize biotin and avidin, and enzyme-labeled and mediated immunoassays, such as ELISA assays.

[0237] Kits suitable for immunodiagnosis and containing the appropriate labeled reagents are constructed by packaging the appropriate materials, including the compositions of the invention, in suitable containers, along with the remaining reagents and materials (for example, suitable buffers, salt solutions, etc.) required for the conduct of the assay, as well as suitable set of assay instructions.

[0238] Nucleic Acid Hybridisation

[0239] “Hybridization” refers to the association of two nucleic acid sequences to one another by hydrogen bonding. Typically, one sequence will be fixed to a solid support and the other will be free in solution. Then, the two sequences will be placed in contact with one another under conditions that favor hydrogen bonding. Factors that affect this bonding include: the type and volume of solvent; reaction temperature; time of hybridization; agitation; agents to block the non-specific attachment of the liquid phase sequence to the solid support (Denhardt's reagent or BLOTTO); concentration of the sequences; use of compounds to increase the rate of association of sequences (dextran sulfate or polyethylene glycol); and the stringency of the washing conditions following hybridization. See Sambrook et al. [supra] Volume 2, chapter 9, pages 9.47 to 9.57.

[0240] “Stringency” refers to conditions in a hybridization reaction that favor association of very similar sequences over sequences that differ. For example, the combination of temperature and salt concentration should be chosen that is approximately 120 to 200° C. below the calculated Tm of the hybrid under study. The temperature and salt conditions can often be determined empirically in preliminary experiments in which samples of genomic DNA immobilized on filters are hybridized to the sequence of interest and then washed under conditions of different stringencies. See Sambrook et al. at page 9.50.

[0241] Variables to consider when performing, for example, a Southern blot are (1) the complexity of the DNA being blotted and (2) the homology between the probe and the sequences being detected. The total amount of the fragment(s) to be studied can vary a magnitude of 10, from 0.1 to 1 μg for a plasmid or phage digest to 10⁻⁹ to 10⁻⁸ g for a single copy gene in a highly complex eukaryotic genome. For lower complexity polynucleotides, substantially shorter blotting, hybridization, and exposure times, a smaller amount of starting polynucleotides, and lower specific activity of probes can be used. For example, a single-copy yeast gene can be detected with an exposure time of only I hour starting with 1 μg of yeast DNA, blotting for two hours, and hybridizing for 4-8 hours with a probe of 108 cpm/μg. For a single-copy mammalian gene a conservative approach would start with 10 μg of DNA, blot overnight, and hybridize overnight in the presence of 10% dextran sulfate using a probe of greater than 108 cpm/μg, resulting in an exposure time of ˜24 hours.

[0242] Several factors can affect the melting temperature (Tm) of a DNA-DNA hybrid between the probe and the fragment of interest, and consequently, the appropriate conditions for hybridization and washing. In many cases the probe is not 100% homologous to the fragment. Other commonly encountered variables include the length and total G+C content of the hybridizing sequences and the ionic strength and formamide content of the hybridization buffer. The effects of all of these factors can be approximated by a single equation:
Tm=81+16.6(log₁₀Ci)+0.4[%(G+C)]−0.6(% formamide)−600/n−1.5(% mismatch).
where Ci is the salt concentration (monovalent ions) and n is the length of the hybrid in base pairs (slightly modified from Meinkoth & Wahl (1984) Anal. Biochem. 138: 267-284).

[0244] In designing a hybridization experiment, s6me factors affecting nucleic acid hybridization can be conveniently altered. The temperature of the hybridization and washes and the salt concentration during the washes are the simplest to adjust. As the temperature of the hybridization increases (ie. stringency), it becomes less likely for hybridization to occur between strands that are nonhomologous, and as a result, background decreases. If the radiolabeled probe is not completely homologous with the immobilized fragment (as is frequently the case in gene family and interspecies hybridization experiments), the hybridization temperature must be reduced, and background will increase. The temperature of the washes affects the intensity of the hybridizing band and the degree of background in a similar manner. The stringency of the washes is also increased with decreasing salt concentrations.

[0245] In general, convenient hybridization temperatures in the presence of 50% formamide are 42° C. for a probe with is 95% to 100% homologous to the target fragment, 37° C. for 90% to 95% homology, and 32° C. for 85% to 90% homology. For lower homologies, formamide. content should be lowered and temperature adjusted accordingly, using the equation above. If the homology between the probe and the target fragment are not known, the simplest approach is to start with both hybridization and wash conditions which are nonstringent. If non-specific bands or high background are observed after autoradiography, the filter can be washed at high stringency and reexposed: If the time required for exposure makes this approach impractical, several hybridization and/or washing stringencies should be tested in parallel.

[0246] Nucleic Acid Probe Assays

[0247] Methods such as PCR, branched DNA probe assays, or blotting techniques utilizing nucleic acid probes according to the invention can determine the presence of cDNA or mRNA. A probe is said to “hybridize” with a sequence of the invention if it can form a duplex or double stranded complex, which is stable enough to be detected. The nucleic acid probes will hybridize to the streptococcus nucleotide sequences of the invention (including both sense and antisense strands). Though many different nucleotide sequences will encode the amino acid sequence, the native streptococcus sequence is preferred because it is the actual sequence present in cells. mRNA represents a coding sequence and so a probe should be complementary to the coding sequence; single-stranded cDNA is complementary to mRNA, and so a cDNA probe should be complementary to the non-coding sequence.

[0248] The probe sequence need not be identical to the streptococcus sequence (or its complement)—some variation in the sequence and length can lead to increased assay sensitivity if the nucleic acid probe can form a duplex with target nucleotides, which can be detected. Also, the nucleic acid probe can include additional nucleotides to stabilize the formed duplex. Additional streptococcus sequence may also be helpful as a label to detect the formed duplex. For example, a non-complementary nucleotide sequence may be attached to the 5′ end of the probe, with the remainder of the probe sequence being complementary to a streptococcus sequence. Alternatively, non-complementary bases or longer sequences can be interspersed into the probe, provided that the probe sequence has sufficient complementarity with the a streptococcus sequence in order to hybridize therewith and thereby form a duplex which can be detected.

[0249] The exact length and sequence of the probe will depend on the hybridization conditions (e.g. temperature, salt condition etc.). For example, for diagnostic applications, depending on the complexity of the analyte sequence, the nucleic acid probe typically contains at least 10-20 nucleotides, preferably 15-25, and more preferably at least 30 nucleotides, although it may be shorter than this. Short primers generally require cooler temperatures to form sufficiently stable hybrid complexes with the template.

[0250] Probes may be produced by synthetic procedures, such as the triester method of Matteucci et al. [J. Am. Chem. Soc. (1981) 103:31851, or according to Urdea et al. [Proc. Natl. Acad. Sci. USA (1983) 80: 7461], or using commercially available automated oligonucleotide synthesizers.

[0251] The chemical nature of the probe can be selected according to preference. For certain applications, DNA or RNA are appropriate. For other applications, modifications may be incorporated eg. backbone modifications, such as phosphorothioates or methylphosphonates, can be used to increase in vivo half-life, alter RNA affinity, increase nuclease resistance etc. [eg. see Agrawal & Iyer (1995) Curr Opin Biotechnol 6:12-19; Agrawal (1996) TIBTECH 14:376-387]; analogues such as peptide nucleic acids may also be used [eg. see Corey (1997) TIBTECH 15:224-229; Buchardt et al. (1993) TIBTECH 11:384-386].

[0252] Alternatively, the polymerase chain reaction (PCR) is another well-known means for detecting small amounts of target nucleic acid. The assay is described in Mullis et al. [Meth. Enzymol. (1987) 155:335-350] & U.S. Pat. Nos. 4,683,195 & 4,683,202. Two “primer” nucleotides hybridize with the target nucleic acids and are used to prime the reaction. The primers can comprise sequence that does not hybridize to the sequence of the amplification target (or its complement) to aid with duplex stability or, for example, to incorporate a convenient restriction site. Typically, such sequence will flank the desired streptococcus sequence.

[0253] A thermostable polymerase creates copies of target nucleic acids from the primers using the original target nucleic acids as a template. After a threshold amount of target nucleic acids are generated by the polymerase, they can be detected by more traditional methods, such as Southern blots. When using the Southern blot method, the labelled probe will hybridize to the streptococcus sequence (or its complement).

[0254] Also, mRNA or cDNA can be detected by traditional blotting techniques described in Sambrook et al [supra]. mRNA, or cDNA generated from mRNA using a polymerase enzyme, can be purified and separated using gel electrophoresis. The nucleic acids on the gel are then blotted onto a solid support, such as nitrocellulose. The solid support is exposed to a labelled probe and then washed to remove any unhybridized probe. Next, the duplexes containing the labeled probe are detected. Typically, the probe is labelled with a radioactive moiety.

### MODES FOR CARRYING OUT THE INVENTION

[0255] The genome sequence (2,162,598 base pairs) of a S.pneumoniae type 4 strain [Aaberge et al. (1995) Microbial Pathogenesis 18: 141-152) isolate previously referred to as: JNR.7/87 [Bricker et al. (1999) FEMS Microbiol. Lett. 172:131],; KNR.7/87 [de Saizieu et al. (2000) J. Bacteriol. 182:4696; Hakenbeck et al. (2001) Infect. Immun. 69:2477]; and N4 [Wizemann et al. (2001) Infect. Immun. 69:1593] is set out in the sequence listing as SEQ D 4979 [see also Tettelin et al. (2001) Science 293:498).

[0256] 2489 coding regions were identified within this sequence using GLM ER2 [Delcher et al. (1999) Nucleic Acids Research 27:4636-4641]. The nucleic acid sequences are given in the sequence listing with odd numbers (SEQ IDs 1, 3, 5, . . . , 4975, 4977). For 2469 of the 2489 regions, amino acid sequences were inferred and, for these, the nucleic acid sequence is followed by its inferred translation product (SEQ IDs 2, 4, 6, . . ., 4976, 4978). Inferred functions are given in field <223> of the sequence listing, together with an indication of cellular localisation, any sequence motifs of note, and an indication of similarity to any corresponding ORF in the Hoskins et al. R6 sequence.

[0257] Various tests can be used to assess the in vivo immunogenicity of the proteins identified in the examples. For example, the proteins can be expressed recombinantly and used to screen patient sera by immunoblot. A positive reaction between the protein and patient serum indicates that the patient has previously mounted an immune response to the protein in question ie. the protein is an immunogen. This method can also be used to identify immunodominant proteins.

[0258] The recombinant proteins can also be conveniently used to prepare antibodies e.g. in a mouse. These can be used for direct confirmation that a protein is located on the cell-surface. Labelled antibody (e.g. fluorescent labelling for FACS) can be incubated with intact bacteria and the presence of label on the bacterial surface confirms the location of the protein.

[0259] Of the 2489 coding regions, 1910 have homologs in S.pneumoniae strain R6 (Hoskins et al.). These 1910 regions can be used for multi-strain diagnosis and/or immunisation. Conversely, the remaining regions can be used to distinguish bacteria in strain R6.

[0260] Of the 2489 coding regions, 432 show homology to the ‘GBSsnnn’ antigens listed in Table IV of PCT/GB01/04789 and are thus inferred to be useful antigens for immunisation and/or diagnosis:

| SEQ ID | GBSnnn |
|---|---|
| 4 | GBS240 |
| 8 | GBS151 |
| 10 | GBS15 |
| 22 | GBS154 |
| 24 | GBS494 |
| 42 | GBS295 |
| 54 | GBS69 |
| 68 | GBS258 |
| 70 | GBS457 |
| 72 | GBS267 |
| 88 | GBS443 |
| 90 | GBS443 |
| 92 | GBS591 |
| 96 | GBS568 |
| 100 | GBS71 |
| 102 | GBS96 |
| 106 | GBS83 |
| 108 | GBS529 |
| 114 | GBS47 |
| 136 | GBS236 |
| 144 | GBS591 |
| 178 | GBS485 |
| 180 | GBS257 |
| 188 | GBS232 |
| 212 | GBS277 |
| 214 | GBS633 |
| 276 | GBS571 |
| 278 | GBS114 |
| 296 | GBS44 |
| 300 | GBS606 |
| 306 | GBS607 |
| 310 | GBS263 |
| 322 | GBS180 |
| 324 | GBS634 |
| 330 | GBS123 |
| 352 | GBS563 |
| 354 | GBS564 |
| 364 | GBS5 |
| 386 | GBS526 |
| 396 | GBS449 |
| 406 | GBS478 |
| 408 | GBS543 |
| 452 | GBS634 |
| 460 | GBS89 |
| 470 | GBS251 |
| 478 | GBS467 |
| 502 | GBS82 |
| 506 | GBS472 |
| 510 | GBS26 |
| 516 | GBS5 |
| 524 | GBS54 |
| 532 | GBS463 |
| 544 | GBS487 |
| 572 | GBS200 |
| 574 | GBS146 |
| 582 | GBS255 |
| 606 | GBS66 |
| 608 | GBS31 |
| 646 | GBS268 |
| 652 | GBS228 |
| 662 | GBS562 |
| 686 | GBS251 |
| 722 | GBS173 |
| 756 | GBS154 |
| 766 | GBS537 |
| 776 | GBS104 |
| 778 | GBS59 |
| 780 | GBS150 |
| 784 | GBS212 |
| 788 | GBS210 |
| 790 | GBS210 |
| 806 | GBS634 |
| 814 | GBS634 |
| 816 | GBS550 |
| 822 | GBS626 |
| 828 | GBS247 |
| 836 | GBS488 |
| 838 | GBS489 |
| 862 | GBS511 |
| 912 | GBS479 |
| 1038 | GBS597 |
| 1088 | GBS262 |
| 1092 | GBS72 |
| 1102 | GBS592 |
| 1104 | GBS559 |
| 1106 | GBS558 |
| 1108 | GBS136 |
| 1116 | GBS295 |
| 1122 | GBS198 |
| 1124 | GBS220 |
| 1130 | GBS71 |
| 1142 | GBS458 |
| 1148 | GBS458 |
| 1152 | GBS18 |
| 1168 | GBS83 |
| 1170 | GBS497 |
| 1172 | GBS125 |
| 1194 | GBS503 |
| 1206 | GBS546 |
| 1216 | GBS461 |
| 1218 | GBS461 |
| 1220 | GBS578 |
| 1232 | GBS248 |
| 1236 | GBS76 |
| 1242 | GBS122 |
| 1254 | GBS177 |
| 1260 | GBS251 |
| 1266 | GBS13 |
| 1284 | GBS83 |
| 1286 | GBS305 |
| 1288 | GBS306 |
| 1290 | GBS85 |
| 1326 | GBS154 |
| 1332 | GBS559 |
| 1334 | GBS558 |
| 1350 | GBS576 |
| 1358 | GBS575 |
| 1370 | GBS480 |
| 1398 | GBS196 |
| 1400 | GBS113 |
| 1420 | GBS460 |
| 1422 | GBS459 |
| 1436 | GBS435 |
| 1442 | GBS307 |
| 1462 | GBS205 |
| 1474 | GBS121 |
| 1488 | GBS162 |
| 1496 | GBS253 |
| 1510 | GBS251 |
| 1532 | GBS532 |
| 1536 | GBS240 |
| 1540 | GBS199 |
| 1566 | GBS26 |
| 1572 | GBS124 |
| 1578 | GBS271 |
| 1618 | GBS211 |
| 1622 | GBS506 |
| 1624 | GBS507 |
| 1634 | GBS625 |
| 1664 | GBS282 |
| 1670 | GBS540 |
| 1686 | GBS466 |
| 1694 | GBS615 |
| 1698 | GBS272 |
| 1700 | GBS241 |
| 1738 | GBS313 |
| 1760 | GBS235 |
| 1762 | GBS554 |
| 1782 | GBS622 |
| 1784 | GBS599 |
| 1806 | GBS443 |
| 1812 | GBS624 |
| 1816 | GBS596 |
| 1880 | GBS596 |
| 1882 | GBS596 |
| 1886 | GBS83 |
| 1904 | GBS81 |
| 1914 | GBS245 |
| 1918 | GBS515 |
| 1926 | GBS95 |
| 1944 | GBS314 |
| 1950 | GBS206 |
| 1982 | GBS477 |
| 1984 | GBS189 |
| 1986 | GBS94 |
| 1988 | GBS94 |
| 1990 | GBS84 |
| 2002 | GBS283 |
| 2004 | GBS579 |
| 2034 | GBS244 |
| 2036 | GBS156 |
| 2046 | GBS181 |
| 2048 | GBS491 |
| 2052 | GBS490 |
| 2116 | GBS639 |
| 2120 | GBS254 |
| 2122 | GBS465 |
| 2140 | GBS177 |
| 2182 | GBS308 |
| 2198 | GBS252 |
| 2212 | GBS573 |
| 2214 | GBS113 |
| 2218 | GBS83 |
| 2222 | GBS591 |
| 2226 | GBS5 |
| 2228 | GBS127 |
| 2232 | GBS5 |
| 2236 | GBS296 |
| 2250 | GBS311 |
| 2312 | GBS605 |
| 2330 | GBS570 |
| 2346 | GBS94 |
| 2348 | GBS94 |
| 2370 | GBS634 |
| 2412 | GBS199 |
| 2416 | GBS310 |
| 2434 | GBS304 |
| 2438 | GBS618 |
| 2444 | GBS266 |
| 2450 | GBS312 |
| 2452 | GBS88 |
| 2462 | GBS41 |
| 2470 | GBS131 |
| 2474 | GBS236 |
| 2476 | GBS565 |
| 2478 | GBS635 |
| 2488 | GBS307 |
| 2492 | GBS500 |
| 2494 | GBS154 |
| 2506 | GBS199 |
| 2554 | GBS296 |
| 2564 | GBS487 |
| 2586 | GBS179 |
| 2588 | GBS42 |
| 2592 | GBS525 |
| 2616 | GBS10 |
| 2638 | GBS540 |
| 2692 | GBS320 |
| 2694 | GBS543 |
| 2698 | GBS232 |
| 2714 | GBS267 |
| 2724 | GBS543 |
| 2728 | GBS232 |
| 2748 | GBS107 |
| 2750 | GBS611 |
| 2778 | GBS152 |
| 2786 | GBS192 |
| 2798 | GBS474 |
| 2810 | GBS135 |
| 2812 | GBS606 |
| 2814 | GBS607 |
| 2816 | GBS83 |
| 2828 | GBS154 |
| 2836 | GBS452 |
| 2838 | GBS453 |
| 2840 | GBS24 |
| 2852 | GBS232 |
| 2854 | GBS167 |
| 2862 | GBS164 |
| 2864 | GBS234 |
| 2916 | GBS540 |
| 2918 | GBS611 |
| 2922 | GBS247 |
| 2946 | GBS531 |
| 2956 | GBS289 |
| 2958 | GBS289 |
| 2960 | GBS289 |
| 2968 | GBS178 |
| 2974 | GBS471 |
| 2976 | GBS232 |
| 2984 | GBS556 |
| 2990 | GBS475 |
| 3010 | GBS281 |
| 3018 | GBS307 |
| 3040 | GBS516 |
| 3060 | GBS225 |
| 3064 | GBS124 |
| 3070 | GBS466 |
| 3086 | GBS169 |
| 3088 | GBS588 |
| 3112 | GBS157 |
| 3122 | GBS540 |
| 3124 | GBS611 |
| 3132 | GBS555 |
| 3150 | GBS205 |
| 3176 | GBS528 |
| 3188 | GBS113 |
| 3194 | GBS99 |
| 3196 | GBS238 |
| 3200 | GBS178 |
| 3204 | GBS269 |
| 3212 | GBS26 |
| 3248 | GBS307 |
| 3250 | GBS623 |
| 3252 | GBS623 |
| 3256 | GBS157 |
| 3280 | GBS468 |
| 3300 | GBS290 |
| 3320 | GBS615 |
| 3322 | GBS615 |
| 3324 | GBS615 |
| 3332 | GBS480 |
| 3334 | GBS171 |
| 3336 | GBS174 |
| 3386 | GBS193 |
| 3390 | GBS547 |
| 3404 | GBS110 |
| 3426 | GBS163 |
| 3428 | GBS73 |
| 3436 | GBS305 |
| 3442 | GBS292 |
| 3444 | GBS320 |
| 3452 | GBS440 |
| 3462 | GBS441 |
| 3464 | GBS442 |
| 3466 | GBS16 |
| 3468 | GBS483 |
| 3476 | GBS441 |
| 3478 | GBS520 |
| 3480 | GBS16 |
| 3488 | GBS200 |
| 3500 | GBS307 |
| 3514 | GBS83 |
| 3548 | GBS260 |
| 3552 | GBS483 |
| 3554 | GBS483 |
| 3570 | GBS446 |
| 3572 | GBS446 |
| 3574 | GBS297 |
| 3588 | GBS86 |
| 3596 | GBS95 |
| 3614 | GBS101 |
| 3640 | GBS628 |
| 3642 | GBS457 |
| 3676 | GBS476 |
| 3702 | GBS26 |
| 3718 | GBS519 |
| 3720 | GBS520 |
| 3726 | GBS526 |
| 3728 | GBS51 |
| 3730 | GBS14 |
| 3738 | GBS542 |
| 3774 | GBS606 |
| 3776 | GBS83 |
| 3802 | GBS463 |
| 3804 | GBS540 |
| 3806 | GBS539 |
| 3830 | GBS619 |
| 3854 | GBS557 |
| 3860 | GBS494 |
| 3874 | GBS303 |
| 3878 | GBS581 |
| 3880 | GBS580 |
| 3884 | GBS181 |
| 3888 | GBS233 |
| 3912 | GBS435 |
| 3926 | GBS522 |
| 3928 | GBS523 |
| 3940 | GBS441 |
| 3942 | GBS442 |
| 3944 | GBS16 |
| 3970 | GBS251 |
| 3976 | GBS214 |
| 3988 | GBS518 |
| 3992 | GBS107 |
| 3994 | GBS611 |
| 4038 | GBS570 |
| 4044 | GBS54 |
| 4070 | GBS107 |
| 4072 | GBS92 |
| 4090 | GBS70 |
| 4092 | GBS285 |
| 4094 | GBS168 |
| 4098 | GBS39 |
| 4108 | GBS636 |
| 4114 | GBS190 |
| 4126 | GBS88 |
| 4142 | GBS319 |
| 4164 | GBS203 |
| 4168 | GBS145 |
| 4170 | GBS470 |
| 4190 | GBS253 |
| 4214 | GBS634 |
| 4216 | GBS180 |
| 4224 | GBS139 |
| 4246 | GBS504 |
| 4252 | GBS187 |
| 4268 | GBS6 |
| 4276 | GBS49 |
| 4278 | GBS63 |
| 4292 | GBS482 |
| 4304 | GBS240 |
| 4306 | GBS570 |
| 4322 | GBS107 |
| 4326 | GBS611 |
| 4344 | GBS77 |
| 4348 | GBS24 |
| 4352 | GBS455 |
| 4354 | GBS456 |
| 4362 | GBS319 |
| 4364 | GBS291 |
| 4366 | GBS296 |
| 4372 | GBS621 |
| 4380 | GBS531 |
| 4382 | GBS64 |
| 4386 | GBS603 |
| 4404 | GBS16 |
| 4406 | GBS520 |
| 4408 | GBS519 |
| 4412 | GBS203 |
| 4416 | GBS572 |
| 4426 | GBS543 |
| 4428 | GBS631 |
| 4460 | GBS593 |
| 4474 | GBS97 |
| 4510 | GBS492 |
| 4520 | GBS92 |
| 4526 | GBS231 |
| 4536 | GBS450 |
| 4538 | GBS449 |
| 4554 | GBS438 |
| 4560 | GBS33 |
| 4564 | GBS533 |
| 4572 | GBS591 |
| 4586 | GBS476 |
| 4588 | GBS93 |
| 4600 | GBS148 |
| 4608 | GBS26 |
| 4616 | GBS590 |
| 4622 | GBS91 |
| 4630 | GBS10 |
| 4652 | GBS65 |
| 4658 | GBS584 |
| 4664 | GBS237 |
| 4680 | GBS267 |
| 4682 | GBS613 |
| 4698 | GBS120 |
| 4708 | GBS177 |
| 4720 | GBS116 |
| 4726 | GBS115 |
| 4776 | GBS610 |
| 4794 | GBS539 |
| 4826 | GBS92 |
| 4836 | GBS449 |
| 4870 | GBS627 |
| 4872 | GBS57 |
| 4884 | GBS1 |
| 4888 | GBS28 |
| 4898 | GBS520 |
| 4900 | GBS441 |
| 4928 | GBS240 |
| 4934 | GBS591 |

[0261] Isogenic deletion mutants of clinical isolate strain D39 of S.pneumoniae (serotype 2) were prepared for several coding regions using Overlap Extension [Amberg et al. (1995) Yeast 11:1275-1280] to assess the effect of deletion on viability. Precise gene disruptions were achieved by gene splicing following a “double fusion” PCR strategy. Each process was accomplished with a total of five PCR reactions: three standard PCR amplifications and two fusion PCR reactions. The first step was performed by amplifying an upstream (fragment U, primers: F1+R2) and a downstream region (fragment D, primers: F5+R6) for each gene to disrupt, plus a selectable marker sequence (fragment K, primers: F3+R4) to replace the gene's reading frame in between. The aphA-3 gene (kanamycin resistance) was chosen as universal K fragment for all mutant constructs. It was amplified in order to contain 24 bp 5′ and 3′ tails showing complementary sequence to U-3′ and D-5′ ends, respectively. A first fusion PCR was performed to link D to K. Each KD amplified fragment was then gel purified and a second fusion PCR reaction was realized in order to fuse it to the corresponding U fragment. Final chimera products constitute for gene disruption cassettes (UKD). During the final fusion PCR in the presence of primers F1 and R6, they were amplified by AmpliTaq polymerase (Applera) able to add a single deoxyadenosine to the 3′ ends of both DNA strands. Each construct was ligated into a pGEM-T Easy vector (Promega) endowed of single 3′-T overhangs at the insertion site and then introduced by electroporation into E.coli DH10B bacteria (Invitrogen). Plasmid minipreps were retrieved from true recombinant colonies and the rightness of chimeric inserts was confirmed by PCR. Plamid DNAs were used to transform Sp using synthetic CSP-1 to induce natural competence [Havarstein et al. (1995) 92:1114044]. Briefly, early log phase D39 cultures (OD₆₀₀=0.05-0.1) were diluted 1:10 with brain heart infusion broth (BHIB) supplemented with 100 ng/ml CSP-1, 10 mM glucose and 10% inactivated horse serum (Sigma) and incubated for 15 min at 37° C. and 5% CO₂ without aeration. Plasmid DNA (1,ug) was added and samples were incubated for 1 h before being spread on selective blood agar plates (tryptic soy agar, TSA-Difco, supplemented with 3% defibrinated sheep blood and 500 μg/ml of kanamycin). Growth was allowed for 1-2 days at 37° C. in an atmosphere of 5% CO₂. Five to ten KanR CFUs were screened for each sample either by PCR (primer F1+R6) or by direct sequencing of chromosomal DNA to choose the correct isogenic mutant colony.

[0262] Knockout of the genes having the following SEQ IDs resulted in no growth, indicating essential genes i.e. genes which are particularly preferred antibiotic targets: 504 (ABCtr83), 690 (accB), 694 (accC), 924 (blpB), 1288 (murG), 1328, 1432 (ftsE), 1434 (ftsX), 2116 (ftsW), 2250 (eno), 2460 (vicX), 2554 (licC), 2564, 3042, 3480, 3904 (murl), 4820 (purK), 4902, and 4922. In addition, SEQ ID 3392 (psaA) knockouts grew as small colonies. Of these SEQ IDs, the following are particularly preferred as they have no sequence similarity to humans or other eukaryotes: 504, 690, 1288, 1432, 3904, 4820, 4922 i.e. the potential for anti-patient activity in addition to antibiotic activity is reduced.

[0263] Primers used to create these non-viable mutants were:

| Target | Primer | Sequence (5′ to 3′) |
|---|---|---|
| KanSP | F3 | GTCATGATGGCCTAAGTGGCCAACCTGCAGGAACAGTGAATTGGAGTT |
| | R4 | CGATGCAAATTTAAATGCCGGCTAGCTGCAGCGTTGCGGATGTACTTCA |
| SEQ ID 4902 | F1 | AATTGTCGACATGCTTTTGCATCTGCTAGTGTAG |
| | R2 | GTTGGCCACTTAGGCCATCATGACGGGTAGTCAAAGTTATCAGATGGG |
| | F5 | CTAGCCGGCATTTAAATTTGCATCGATTCTATGAAGCTGGCTACATTCC |
| | R6 | TTTAGCGGCCGCAGCTGTATCAAATTGTTGCATTGT |
| SEQ ID 4922 | F1 | AATTGTCGACAAGTAAGGTTTCTGGCTTTCAAGA |
| | R2 | GTTGGCCACTTAGGCCATCATGACCATTTTCCTTTTCCTTCGACAATC |
| | F5 | CTAGCCGGCATTTAAATTTGCATCG AAAATATGTTTGGCAGTAGCATTG |
| | R6 | TTTAGCGGCCGCAATTAAACCTACAATCGTCCCAAG |
| SEQ ID 504 | F1 | AATTGTCGAC AACAGATTTAGCGAAGGAAGCTAA |
| | R2 | GTTGGCCACTTAGGCCATCATGAC ATATTACCCAGACGATCCTTTTCA |
| | F5 | CTAGCCGGCATTTAAATTTGCATCGACAAAAGAAGGCATTACAGAGGAC |
| | R6 | TTTAGCGGCCGCCATTTGGATCATAAATGGCACTAA |
| SEQ ID 690 | F1 | AATTGTCGACTTACGGAAATACTTGTGATGCCTA |
| | R2 | GTTGGCCACTTAGGCCATCATGACCTTCTTCTGCTACAGTCTCTGCTG |
| | F5 | CTAGCCGGCATTTAAATTTGCATCGGAGGGAAATCTTGTAGAGAGTCCA |
| | R6 | TTTAGCGGCCGCTTGAACTTAACCTTGTCCATACCA |
| SEQ ID 694 | F1 | AATTGTCGACTAAGGAAGCTCTTCATACGCTTTT |
| | R2 | GTTGGCCACTTAGGCCATCATGACGAGCTGGATAGATAACCCGTTCTA |
| | F5 | CTAGCCGGCATTTAATTTGCATCGCTCTTCAAAGGAATAACCAAAAGG |
| | R6 | TTTAGCGGCCGCAATCTCTAATTCATAGAGGGCACG |
| SEQ ID 924 | F1 | AATTGTCGACTAATTACCTACCCCAACAAGCCTA |
| | R2 | GTTGGCCCTTAGGCCATCATGACTGTCGCATAGTTATGGTAACGTCT |
| | F5 | CTAGCCGGCATTTAAATTTGCATCGTTTTACAAACAGCTTCTCAGCAAC |
| | R6 | TTTAGCGGCCGCTTTGGTTGAGTTCGGTAGTTGTTA |
| SEQ ID 1288 | F1 | AATTGTCGACAAACCATCAAGGAAACTCTTTCAG |
| | R2 | GTTGGCCACTTAGGCCATCATGACGATATAGTGGACTTCCCAACCATC |
| | F5 | CTAGCCGGCATTTAAATTTGCATCGGACCTTGGATAGTTTGGAAGAGAA |
| | R6 | TTTAGCGGCCGCAAAGCAGACTTGGAAATAAAATCG |
| SEQ ID 1432 | F1 | AATTGTCGACAAGATGTTGCAGGCTAAGCTCTAT |
| | R2 | GTTGGCCACTTAGGCCATCATGACTCCATAGCGTAAGCAATATTTTCA |
| | F5 | CTAGCCGGCATTTAAATTTGCATCGGATTGAAGCATAAGGTTCGTTCTT |
| | R6 | TTTAGCGGCCGCCATCTCCTTCAAAGATTTTCCAGT |
| SEQ ID 2116 | F1 | AATTGTCGACCATCTTGATTCCCTACTTGCTTTT |
| | R2 | GTTGGCCACTTAGGCCATCATGACCGATAAGCGATTCCACTAACTGTA |
| | F5 | CTAGCCGGCATTTAAATTTGCATCGTTTGTCTTGACCACTATCAGCCTA |
| | R6 | TTTAGCGGCCGCATTTAAGACAAAGGCTACTGCCAC |
| SEQ ID 2250 | F1 | AATTGTCGACCGCTCGCGAAGTCCTAGACTCACG |
| | F5 | CTAGCCGGCATTTAAATTTGCATCGCGAAGGAACTGAAGATGGTGTTGA |
| | R6 | TTTAGCGGCCGCCAATCCACGATATTCAGCTACTTC |
| SEQ ID 2554 | F1 | AATTGTCGACGGGAAGTGAGAGTGTTCTTAGCTC |
| | R2 | GTTGGCCACTTAGGCCATCATGACTGTCATTGATTCCTTTTTCTTTGA |
| | F5 | CTAGCCGGCATTTAAATTTGCATCGGCATCCTTAGTGGTGTATCCTTCT |
| | R6 | TTTAGCGGCCGCGAAAATAACGTTCCATAAAACGG |
| SEQ ID 2564 | F1 | AATTGTCGACACCACTGCTGTCTATATCCTAGCC |
| | R2 | GTTGGCCACTTAGGCCTCATGACTAGTAACTGAGACGAGGCACACTC |
| | F5 | CTAGCCGGCATTTAAATTTGCATCGTTTATCATTCCACTGAGTTTTGGA |
| | R6 | TTTAGCGGCCGCCTGATAGCAAGACAATCAAACCAG |
| SEQ ID 3042 | F1 | AATTGTCGACGGGAATATTGTAAGCGAAGGTAGA |
| | R2 | GTTGGCCACTTAGGCCATCATGACTACCAGATATAACCTCGTCCCAGT |
| | F5 | CTAGCCGGCATTTAAATTTGCATCGAACCCAGAACTACCAAATCAAGAG |
| | R6 | TTTAGCGGCCGCCAAAAATTCAGTGGCATACTTCAG |
| SEQ ID 3480 | F1 | AATTGTCGACTATCTGGTGAGATTACAATGTGGC |
| | R2 | GTTGGCCACTTAGGCCATCATGACGTGTTGCCATTAAGTCATTTGTTC |
| | F5 | CTAGCCGGCATTTAAATTTGCATCGAGCATTTGACTTTAACTCTGGCTT |
| | R6 | TTTAGCGGCCGCAATTGTTTTTCTGCTTCTTTTGCT |
| SEQ ID 3904 | F1 | AATTGTCGACTTTAGGGATGAGACTTTTTCCTTG |
| | R2 | GTTGGCCACTTAGGCCATCATGACATATGTCTGATTGTACCGTCATGG |
| | F5 | CTAGCCGGCATTTAAATTTGCATCGTGTTACCAAGAAGGTGGTCTATGA |
| | R6 | TTTAGCGGCCGCCTTGGTTTTACCTTCGTTACGAGT |
| SEQ ID 1434 | F1 | AATTGTCGACGATTGAAGCATAAGGTTCGTTCTT |
| | R2 | GTTGGCCACTTAGGCCATCATGACCATCTCCTTCAAAGATTTTCCAGT |
| | F5 | CTAGCCGGCATTTAAATTTGCATCGGTATTACCATTATTTCCCGCAGTC |
| | R6 | TTTAGCGGCCGCTTCGAAAGACAAGACATTTTTGAA |
| SEQ ID 1328 | F1 | AATTGTCGACCAAGAAAGAAGTAACGGAAGAAGC |
| | R2 | GTTGGCCACTTAGGCCATCATGACACAAGCAGTGATAAAGATAAGGGC |
| | F5 | CTAGCCGGCATTTAAATTTGCATCGGAACTAGGGAACCAACTAGCTCAA |
| | R6 | TTTAGCGGCCGCTTGATGAAGTCTAGCAATTCTTGG |

[0264] It will be understood that the invention has been described by way of example only and modifications may be made whilst remaining within the scope and spirit of the invention.

The application's sequence listing, which the Patent Office published only in electronic form, follows.

SEQUENCE LISTING (4979 sequences)

SEQ ID NO: 1 - DNA, 300 bp, Streptococcus pneumoniae
atgaaaatcaaagagcaaactaggaaactagctgcgggcagctcaaaacactgttttaaggttgtagatggaactgacgaagtcagctcaaaacactgttttaaggttgtggatggaactgacgaagtcagctcaaaacactgttttgaggttgtggatagaactgacgaagtcagctcaaaacactgttttgaggttgtggatagaactgacgaagtcagctcaaaacactgttttgaggttgtggatagaactgacgaagtcagtaaccatatacggcaaggcgacgttgacgtggtt

SEQ ID NO: 2 - protein, 100 aa, Streptococcus pneumoniae
  box element
MKIKEQTRKLAAGSSKHCFKVVDGTDEVSSKHCFKVVDGTDEVSSKHCFEVVDRTDEVSSKHCFEVVDRTDEVSSKHCFEVVDRTDEVSNHIRQGDVDVV

SEQ ID NO: 3 - DNA, 630 bp, Streptococcus pneumoniae
atgacctctatcacagcgatttttttcgatttggatggaaccctcgttgatagttctatcgggattcacaatgcctttacctatacctttaaagagctgggggtgcctagccctgatgccaaaactattcgtggttttatgggaccacctctcgaaagtagttttgcgacctgcctgtccaaagaccaaatttctgaagccgtgcagatatatcgttcttactataaggcaaaaggcatctatgaagctcaactctttcctcagattatagacttgcttgaggagttatcgagcagttatccactctacatcaccacgacaaaggatacatctactgctcaagacatggcaaaaaacttggaaatccatcatttctttgatggcatttatggttctagccctgaagcaccccataaggcagatgtcattcaccaagccttgcagacacatcaactagcaccagaacaagccatcatcatcggagataccaagtttgatatgctgggagctcgagaaacaggtattcagaaattggccatcacttggggatttggagagcaagcagatctactaaactatcaacctgattatatcgctcacaaacccttagaagttttggcgtattttcaa

SEQ ID NO: 4 - protein, 210 aa, Streptococcus pneumoniae
  hydrolase, haloacid dehalogenase-like family; Cellular location: cytoplasm; Similar to strain R6 sequence 15902137 (e-119)
MTSITAIFFDLDGTLVDSSIGIHNAFTYTFKELGVPSPDAKTIRGFMGPPLESSFATCLSKDQISEAVQIYRSYYKAKGIYEAQLFPQIIDLLEELSSSYPLYITTTKDTSTAQDMAKNLEIHHFFDGIYGSSPEAPHKADVIHQALQTHQLAPEQAIIIGDTKFDMLGARETGIQKLAITWGFGEQADLLNYQPDYIAHKPLEVLAYFQ

SEQ ID NO: 5 - DNA, 870 bp, Streptococcus pneumoniae
atgttttattctatcaaagaattggtcgagcaagcagatctggactttcaaggaaatgtcgcagaactcatgattacaacagagtttgaattgaccggtcgcgaacgtgaagaagtcttccttctcatggaacgcaatctggaagttatgaaagcctctgtccaacttggcctcaatgaaaataaatctcgtagtggcctgacaggtggagatgctgccaaattggatcactacatcgaaaacggaaaaactctgtcagattatacgattctctcggctgcccgaaatgccatcgcagtcaatgaacacaatgccaaaatgggcttggtctgtgccactccaaccgctggaagtgctggctgtctgccatccgttctcactgctgctattgaaaaattagacctcagccacgagcaacaattggatttcctctttgctgctggtgcctttggactagtcatcgcaaacaatgcctccatctcaggtgctgagggtgggtgtcaagctgaagttggttcagcctctgctatgagtgctgccgccttgactctggctgcaggtggaacaccttatcaggccagtcaagctattgcctttgtcattaaaaatatgctaggcctcatctgtgaccctgttgcaggtttggtcgaagttccctgtgtcaaacgtaatgccatgggagctagctttgctttcatcgcagcagacatggccttggcaggtatcgaatctaaaatccctgtggatgaagtgatcgatgccatgtaccaagtaggagcaagcatgccaactgcctttcgtgaaacagctgaaggtggactcgctaccacccctactggtcgtcgcctccaaaaagaaattttcggagaa

SEQ ID NO: 6 - protein, 290 aa, Streptococcus pneumoniae
  L-serine dehydratase, iron-sulfur-dependent, alpha subunit (sdhA); Cellular location: cytoplasm; Similar to strain R6 sequence 15902138 (e-161)
MFYSIKELVEQADLDFQGNVAELMITTEFELTGREREEVFLLMERNLEVMKASVQLGLNENKSRSGLTGGDAAKLDHYIENGKTLSDYTILSAARNAIAVNEHNAKMGLVCATPTAGSAGCLPSVLTAAIEKLDLSHEQQLDFLFAAGAFGLVIANNASISGAEGGCQAEVGSASAMSAAALTLAAGGTPYQASQAIAFVIKNMLGLICDPVAGLVEVPCVKRNAMGASFAFIAADMALAGIESKIPVDEVIDAMYQVGASMPTAFRETAEGGLATTPTGRRLQKEIFGE

SEQ ID NO: 7 - DNA, 669 bp, Streptococcus pneumoniae
atgaaatcacttcgttttcaatctgtctttgatatcatcggaccagttatgattggcccatctagtagccataccgctggtgctgttcgtattgggaagattgtctcttccatttttgatgatactccgacagaagttgaattccaactttttaactcatttgccaagacctatcgtggtcacggaacagacctagcccttgttgcaggtattttaggaatggatacagatgatcctgaaattccaaatagtctggaaattgcccacaagcgtggtatcaagattgtctggaccattcagaaagacagcaatgcccctcaccctaacaccactaaaattactgttaaaaatgcccacaagaccatcagcgtgactggtatttctatcggtggaggaaatattcaggtaaccgaactcaatggttttgccgtctctctcaatatgaatacaccgactatcatcatcgttcatcaagatattccaggtatgattgcccttgttacagaggcgctttcccgctatggtatcaatatcgcccagatgaatgtcactcgtgaaaaagctggtgaaaaagccattatgattatcgaagttgacagtcgcaactgtgatgaggctatcgaagaaattcgaaaaatccctcatctccacaatgtcaatttctttaaa

SEQ ID NO: 8 - protein, 223 aa, Streptococcus pneumoniae
  L-serine dehydratase, iron-sulfur-dependent, beta subunit (sdhB); Cellular location: outside; Similar to strain R6 sequence 15902139 (e-126)
MKSLRFQSVFDIIGPVMIGPSSSHTAGAVRIGKIVSSIFDDTPTEVEFQLFNSFAKTYRGHGTDLALVAGILGMDTDDPEIPNSLEIAHKRGIKIVWTIQKDSNAPHPNTTKITVKNAHKTISVTGISIGGGNIQVTELNGFAVSLNMNTPTIIIVHQDIPGMIALVTEALSRYGINIAQMNVTREKAGEKAIMIIEVDSRNCDEAIEEIRKIPHLHNVNFFK

SEQ ID NO: 9 - DNA, 585 bp, Streptococcus pneumoniae
atgaaatcaataactaaaaagattaaagcaactcttgcaggagtagctgccttgtttgcagtatttgctccatcatttgtatctgctcaagaatcatcaacttacactgttaaagaaggtgatacactttcagaaatcgctgaaactcacaacacaacagttgaaaaattggcagaaaacaaccacattgataacattcatttgatttatgttgatcaagagttggttatcgatggccctgtagcgcctgttgcaacaccagcgccagctacttatgcggcaccagccgctcaagatgaaactgtttcagctccagtagcagaaactccagtagtaagtgaaacagttgtttcaactgtaagcggatctgaagcagaagccaaagaatggatcgctcaaaaagaatcaggtggtagctatacagctacaaatggacgttatatcggacgttaccaattaacagattcatacctgaacggtgactactcagctgaaaaccaagaacgtgtagcagatgcctacgttgcaggacgttacggttcatggactgctgctaaaaacttctggcttaacaatggctggtat

SEQ ID NO: 10 - protein, 195 aa, Streptococcus pneumoniae
  LysM domain protein; Cellular location: outside; Similar to strain R6 sequence 15902140 (1.E-88)
MKSITKKIKATLAGVAALFAVFAPSFVSAQESSTYTVKEGDTLSEIAETHNTTVEKLAENNHIDNIHLIYVDQELVIDGPVAPVATPAPATYAAPAAQDETVSAPVAETPVVSETVVSTVSGSEAEAKEWIAQKESGGSYTATNGRYIGRYQLTDSYLNGDYSAENQERVADAYVAGRYGSWTAAKNFWLNNGWY

SEQ ID NO: 11 - DNA, 318 bp, Streptococcus pneumoniae
ttgcaacgcttagaagtctataaaaactatcaacgtttatatgacttgcgaatagcaatcctgctcaacctttccacactctatctatacaatcaagataaaaacatgtgtaagcaaatctgctatactttactggaggacgccaagaataagaaaagttacgataggctggctatctgctatgtccctattgggatttgtacagacgattctaaacttatccaaaaagggttctcccttctggagctaaccgaggaaacttctatgctgtctcatctcaaaaaagaagtagagatctattaccaagcgaaggaaaga

SEQ ID NO: 12 - protein, 106 aa, Streptococcus pneumoniae
  hypothetical protein; Cellular location: cytoplasm; Similar to strain R6 sequence 15902148 (3.E-55)
MQRLEVYKNYQRLYDLRIAILLNLSTLYLYNQDKNMCKQICYTLLEDAKNKKSYDRLAICYVPIGICTDDSKLIQKGFSLLELTEETSMLSHLKKEVEIYYQAKER

SEQ ID NO: 13 - DNA, 285 bp, Streptococcus pneumoniae
atgagaaaattagttaaaattggtgttgcatctttaatggtatgtggtatacttgctactacaaatgctttagcagtatgggttgagggtggtcaatggaactatggagtaggttggacaggaacttttggatattctgattacttacattctactcgatatcatacagcaactgttagacatgggggtagaacctctaaggattatgcaaaacctgaggcatgggctagagcttccctcaccaagattccgccaacaggaatggaatatttctatggatttgag

SEQ ID NO: 14 - protein, 95 aa, Streptococcus pneumoniae
  bacteriocin, putative; Cellular location: outside; Similar to strain R6 sequence 15902142 (2.E-36)
MRKLVKIGVASLMVCGILATTNALAVWVEGGQWNYGVGWTGTFGYSDYLHSTRYHTATVRHGGRTSKDYAKPEAWARASLTKIPPTGMEYFYGFE

SEQ ID NO: 15 - DNA, 213 bp, Streptococcus pneumoniae
ttggatattctgattacttacattctactcgatatcatacagcaactgttagacatgggggtagaacctctaaggattatgcaaaacctgaggcatgggctagagcttccctcaccaagattccgccaacaggaatggaatatttctatggatttgagtaaaattcttccctctcctatttggagagggaaaactgtagtggaggcactttta

SEQ ID NO: 16 - protein, 71 aa, Streptococcus pneumoniae
  hypothetical protein
MDILITYILLDIIQQLLDMGVEPLRIMQNLRHGLELPSPRFRQQEWNISMDLSKILPSPIWRGKTVVEALL

SEQ ID NO: 17 - DNA, 2082 bp, Streptococcus pneumoniae
atgttactcctgcttctgtgtaccactttttttgtttttaatgtaaactatacacgagaagtggttcggattcaagaaatgggaaagactgtagattctttggatttgtatttgaaagatattaacgaacctgcagcgtctgttcttcgattttttgaggatgtatcaaaggagtataaagtctccatcatcaaaacagacagtggtgatgaggtggtcaagtctggtgtttttgataaagataccttcccctaccaagagtttgggatttcttctcttgattttaccacagatggtgaaggagtctatagtaataaagaaatttccaataaacttggtacgattccgacctttctaaaagccaaacctattcagcttatgacttttcaaacctatatcaaggatacatctcgtagtttaaatggtcgctatacgataacttctacacaagagatggacaaggataggattgtacagaaatggagcgattttttcaagatagaccaggctaccttgctagagccgacctacaaaagtgcagtggaagtcataaatcgagatttgcttttatctgccattgtttttgtcttggctattttgcttcttgtgttagtgacagtgtatcaaccgatgatggagatgaaaagagttggggtacaaaaattacttggttttcaagatagggctgttttagctgatgttgtaaaaggcaacctttacctcctcctaggtggggctcttgtgatcaatctaggcgtgtttttcttgcttgattataagccaaaagatttgtttcctatgctgtggttgtctcattttttgctgttgcagctttatctctttatcagttggttgacttacctcttaatccaaaaaatgacaatcagctctctgctgaaaggtttttcatctttcaaatttggtcttatcttcaattatgtgatgaaaatagggacaactattttactgacggccttactgattggggtgggcagaagtttagaacaagaaaacaaagaacttgcttatcagcaacagtgggtaagtcaaggtaattacctgaccttagaaaccttcaaactcaatgataatctgtggcaagaagagctagcagggtcagggaaatctacagattatttctatcgattttatcaggatttggtagaaaaaacgcaggcgggctatgtgcagagtagcagtcttcctgtaaaaaattttgtccaatcagaacagattcagcaatatcagttaacagatacggtggatgtttactatgccaatcgcaattttctaaagagcaagggattcaagctaccaaataccggtattaaaaaagttattttgatgccagcaagtacgaaaggtgaagaagataaaaatcagctcttggggaagttaattgcctttcattcgatgaagtatgaagagcagcaaaaacgaacgatagaggagatggatgtcgagattgcctattatgaaggagattggtcatttttcccatatagtgataagcgaaaggaaaatctctccaatccaattattagcttggtcaatgattctgatatgatgtgggatgagaaagcctccctgtcaacaactggcttaaataatccgattaaaattgaaaatacggttcaacatcaaaaagagattacagagttagttgagaaattgtcagatggaaattatttaaaattttcatctattcaagccattcaacaagagaaagtggattcttatcgagatgctgttcggaattttaacctactctttgctttgtttggtctccttagcatgatgatttcctacttcttactagtaacaactttcttattgaagcgcagggatatcattaccaagaagtttatggggtggaaactggtcgatcgctaccgtcctctcctcgttctgctcttgctgggctatagtttccctcttctagtcttgattttctttgcccatgcgttcttaccacttctactgtttgcaggttttacatgtctggatatactatttgtgctaggcttagcttctaggatggagaaaagaagtctagtagagttattgaaagggggcatctta

SEQ ID NO: 18 - protein, 694 aa, Streptococcus pneumoniae
  hypothetical protein (ABC transporter); Cellular location: membrane; Similar to strain R6 sequence 15902143 (0.E+01)
MLLLLLCTTFFVFNVNYTREVVRIQEMGKTVDSLDLYLKDINEPAASVLRFFEDVSKEYKVSIIKTDSGDEVVKSGVFDKDTFPYQEFGISSLDFTTDGEGVYSNKEISNKLGTIPTFLKAKPIQLMTFQTYIKDTSRSLNGRYTITSTQEMDKDRIVQKWSDFFKIDQATLLEPTYKSAVEVINRDLLLSAIVFVLAILLLVLVTVYQPMMEMKRVGVQKLLGFQDRAVLADVVKGNLYLLLGGALVINLGVFFLLDYKPKDLFPMLWLSHFLLLQLYLFISWLTYLLIQKMTISSLLKGFSSFKFGLIFNYVMKIGTTILLTALLIGVGRSLEQENKELAYQQQWVSQGNYLTLETFKLNDNLWQEELAGSGKSTDYFYRFYQDLVEKTQAGYVQSSSLPVKNFVQSEQIQQYQLTDTVDVYYANRNFLKSKGFKLPNTGIKKVILMPASTKGEEDKNQLLGKLIAFHSMKYEEQQKRTIEEMDVEIAYYEGDWSFFPYSDKRKENLSNPIISLVNDSDMMWDEKASLSTTGLNNPIKIENTVQHQKEITELVEKLSDGNYLKFSSIQAIQQEKVDSYRDAVRNFNLLFALFGLLSMMISYFLLVTTFLLKRRDIITKKFMGWKLVDRYRPLLVLLLLGYSFPLLVLIFFAHAFLPLLLFAGFTCLDILFVLGLASRMEKRSLVELLKGGIL

SEQ ID NO: 19 - DNA, 639 bp, Streptococcus pneumoniae
atgattgagttgaaaaatattaccaaaaccattgggggaaaagtgattttggataacttatctctcaggattgatcagggggatttggtagctattgttggtaagagtggtagtgggaagtcgaccttgttaaatttattgggtttgatagatggtgattatagcggacggtatgagatttttggtcagacaaatctagcggttaattctgctaagtcgcaaacaataatccgtgaacatatctcttatctgtttcaaaattttgccctgattgatgatgaaacggtcgagtacaatctcatgctggcgctgaaatatgtgaaattgcctaagaaagacaagctcaaaaaggtggaagagattttagagagagtaggtttatcagctactttgcatcaaagggtctccgagttgtctgggggcgaacaacaacgaattgcagttgctagagccatcttaaaacccagccagctgattttagccgatgaaccgacaggttctctggatcctgaaaatagagatttggtcttgaagtttctcttagagatgaatcgagaggggaaaacagtcattatcgtgacccacgatgcttatgtagcccaacaatgtcatcgaatcattgaattaggcgagggaaaa

SEQ ID NO: 20 - protein, 213 aa, Streptococcus pneumoniae
  amino acid ABC transporter, ATP-binding protein, putative; Cellular location: cytoplasm; Similar to strain R6 sequence 15902144 (e-116)
MIELKNITKTIGGKVILDNLSLRIDQGDLVAIVGKSGSGKSTLLNLLGLIDGDYSGRYEIFGQTNLAVNSAKSQTIIREHISYLFQNFALIDDETVEYNLMLALKYVKLPKKDKLKKVEEILERVGLSATLHQRVSELSGGEQQRIAVARAILKPSQLILADEPTGSLDPENRDLVLKFLLEMNREGKTVIIVTHDAYVAQQCHRIIELGEGK

SEQ ID NO: 21 - DNA, 873 bp, Streptococcus pneumoniae
ttgacaaaggatgcatatagatgtattgtttatacaaataaaaggaataaacataaagtaggctttattatgaataagatgaagaaggtgttgatgacgatgtttggtttagtgatgctccccctactatttgcttgtagcaacaatcaatcggctggaattgaagccatcaagtccaaaggaaaattggttgtagccctcaatccggattttgctccatttgaataccaaaaagtggttgatgggaaaaatcagattgtgggttcagatatcgaattagccaaggctatcgcaacaaaactaggtgtcgaattggaactatctcccatgagttttgataatgtactggctagtgttcaatcaggaaaagccgaccttgccatatcaggtgtttctaagacagatgaacggagcaaggtgtttgacttttccattccctactatactgcaaaaaataaactcattgtcaaaaaatctgacttgactacttatcagtctgtaaacgacttggcgcagaaaaaggttggagcgcagaaaggttcgattcaagagacgatggcgaaagatttgctacaaaattcttccctcgtatctctgcctaaaaatgggaatttaatcacagatttaaaatcaggacaagtggatgccgttatctttgaagaacctgtttccaagggatttgtggaaaataatcctgatttagcaatcgcagacctcaattttgaaaaagagcaagatgattcctacgcggtagccatgaaaaaagatagcaagaaattgaaagaggcagtcgataaaaccattcaaaagttgaaggagtctggggaattagacaaactcattgaggatgcctttaaagcatccattgaaaaa

SEQ ID NO: 22 - protein, 291 aa, Streptococcus pneumoniae
  amino acid ABC transporter, periplasmic amino acid-binding protein, put; Cellular location: lipoprotein; Similar to strain R6 sequence 15902145 (e-142)
MTKDAYRCIVYTNKRNKHKVGFIMNKMKKVLMTMFGLVMLPLLFACSNNQSAGIEAIKSKGKLVVALNPDFAPFEYQKVVDGKNQIVGSDIELAKAIATKLGVELELSPMSFDNVLASVQSGKADLAISGVSKTDERSKVFDFSIPYYTAKNKLIVKKSDLTTYQSVNDLAQKKVGAQKGSIQETMAKDLLQNSSLVSLPKNGNLITDLKSGQVDAVIFEEPVSKGFVENNPDLAIADLNFEKEQDDSYAVAMKKDSKKLKEAVDKTIQKLKESGELDKLIEDAFKASIEK

SEQ ID NO: 23 - DNA, 417 bp, Streptococcus pneumoniae
atgagtaaagaaaaagtaattttggcctattctggcggtttggacacatcagttgctattacctggttaaagaaagactatgatgttgtttcagtttgtatggatgtgggtgaagggaaagacttagatttcatccatgataaggctcttaaggtttgggcagtagaatcttatgtcattgatgttaaggacgaatttgctacagattatgtgctagtggctcatcagtcacatgcctattatgaacaaaagtatctcttggtatctgccttgagccgccctctgatttctaaaaaattggttgaaatagcgcatcagataggagcgactacaattgctcatggttgtaccggtaaggggaatgaccaagtcgaataccagattgcagtcgctaagaaagcgaatgaagctaaaaag

SEQ ID NO: 24 - protein, 139 aa, Streptococcus pneumoniae
  argininosuccinate synthase, truncation (argG); Cellular location: cytoplasm; Similar to strain R6 sequence 15902146 (1.E-67)
MSKEKVILAYSGGLDTSVAITWLKKDYDVVSVCMDVGEGKDLDFIHDKALKVWAVESYVIDVKDEFATDYVLVAHQSHAYYEQKYLLVSALSRPLISKKLVEIAHQIGATTIAHGCTGKGNDQVEYQIAVAKKANEAKK

SEQ ID NO: 25 - DNA, 318 bp, Streptococcus pneumoniae
ttgcaacgcttagaagtctataaaaactatcaacatttatatgacttgcgaatagcaatcctgctaaacctttccacactctatctatacaatcaagataaaaacatgtgtaagcaaatctgctacactttactggaggacgccaagaataagaaaagctacgataggcttgctatctgctatgtccgtattgggatttgtacagacgattctaaacttatccaaaaagggttctcccttctggagctgaccgaggaaacttctatgctgtctcatctcaaaaaagaagtagagacccattatcaaccaaagaaatta

SEQ ID NO: 26 - protein, 106 aa, Streptococcus pneumoniae
  hypothetical protein; Cellular location: cytoplasm; Similar to strain R6 sequence 15902148 (4.E-54)
MQRLEVYKNYQHLYDLRIAILLNLSTLYLYNQDKNMCKQICYTLLEDAKNKKSYDRLAICYVRIGICTDDSKLIQKGFSLLELTEETSMLSHLKKEVETHYQPKKL

SEQ ID NO: 27 - DNA, 378 bp, Streptococcus pneumoniae
atggaactcgtattaccaaataattatgttgctcttgagcaagaagagatgatgtatcttgatgggggtggtgttggtcgtaactggtggaatagtagaggtagttttgcaacagttctggatgtagatttggccatctatagtggtggtgcaacaatttattctgcttatgcgataaaaaaagctatctcagctaatagaggggctattacgagaacattacgtagtttaataattaaacatgtaggtagtgcagctggccatttagtcaatactgcactaaacgttgcactaactgttactggattttcactaggtggagcaatcgcatatggggctgattgggctgacggtagcttagatggttatatttttgct

SEQ ID NO: 28 - protein, 126 aa, Streptococcus pneumoniae
  hypothetical protein; Cellular location: cytoplasm; Similar to strain R6 sequence 15902153 (1.E-67)
MELVLPNNYVALEQEEMMYLDGGGVGRNWWNSRGSFATVLDVDLAIYSGGATIYSAYAIKKAISANRGAITRTLRSLIIKHVGSAAGHLVNTALNVALTVTGFSLGGAIAYGADWADGSLDGYIFA

SEQ ID NO: 29 - DNA, 243 bp, Streptococcus pneumoniae
ttgtcgttgaaattacttgattgtattttggattatcaagaaagattcaatggaaaaacatgtcaagtatcaacgaattataagtatttagagattttcaaagtgaatttttgcttgactgatttacatcatttatttgacttacacaaaatcacacgagattatgctagtcaaacaaaacctgctattcaagatggtgtttttattttagaagattttagaaatatcctatgtacaatgatg

SEQ ID NO: 30 - protein, 81 aa, Streptococcus pneumoniae
  hypothetical protein; Cellular location: cytoplasm; Similar to strain R6 sequence 15902164 (2.E-42)
MSLKLLDCILDYQERFNGKTCQVSTNYKYLEIFKVNFCLTDLHHLFDLHKITRDYASQTKPAIQDGVFILEDFRNILCTMM

SEQ ID NO: 31 - DNA, 2232 bp, Streptococcus pneumoniae
atgaataagaaaaaaatgattttaacaagtctagccagcgtcgctatcttaggggctggttttgttacgtctcagcctacttttgtaagagcagaagaatctccacaagttgtcgaaaaatcttcattagagaagaaatatgaggaagcaaaagcaaaagctgatactgccaagaaagattacgaaacggctaaaaagaaagcagaagacgctcagaaaaagtatgaagatgatcagaagagaactgaggagaaagctcgaaaagaagcagaagcatctcaaaaattgaatgatgtggcgcttgttgttcaaaatgcatataaagagtaccgagaagttcaaaatcaacgtagtaaatataaatctgacgctgaatatcagaaaaaattaacagaggtcgactctaaaatagagaaggctaggaaagagcaacaggacttgcaaaataaatttaatgaagtaagagcagttgtagttcctgaaccaaatgcgttggctgagactaagaaaaaagcagaagaagctaaagcagaagaaaaagtagctaagagaaaatatgattatgcaactctaaaggtagcactagcgaagaaagaagtagaggctaaggaacttgaaattgaaaaacttcaatatgaaatttctactttggaacaagaagttgctactgctcaacatcaagtagataatttgaaaaaacttcttgctggtgcggatcctgatgatggcacagaagttatagaagctaaattaaaaaaaggagaagctgagctaaacgctaaacaagctgagttagcaaaaaaacaaacagaacttgaaaaacttcttgacagccttgatcctgaaggtaagactcaggatgaattagataaagaagcagaagaagctgagttggataaaaaagctgatgaacttcaaaataaagttgctgatttagaaaaagaaattagtaaccttgaaatattacttggaggggctgatcctgaagatgatactgctgctcttcaaaataaattagctgctaaaaaagctgagttagcaaaaaaacaaacagaacttgaaaaacttcttgacagccttgatcctgaaggtaagactcaggatgaattagataaagaagcagaagaagctgagttggataaaaaagctgatgaacttcaaaataaagttgctgatttagaaaaagaaattagtaaccttgaaatattacttggaggggctgattctgaagatgatactgctgctcttcaaaataaattagctactaaaaaagctgaattggaaaaaactcaaaaagaattagatgcagctcttaatgagttaggccctgatggagatgaagaagaaactccagcgccggctcctcaaccagagcaaccagctcctgcaccaaaaccagagcaaccagctccagctccaaaaccagagcaaccagctcctgcaccaaaaccagagcaaccagctccagctccaaaaccagagcaaccagctccagctccaaaaccagagcaaccagctaagccggagaaaccagctgaagagcctactcaaccagaaaaaccagccactccaaaaacaggctggaaacaagaaaacggtatgtggtatttctacaatactgatggttcaatggcaataggttggctccaaaacaacggttcatggtactacctaaacgctaacggcgctatggcaacaggttgggtgaaagatggagatacctggtactatcttgaagcatcaggtgctatgaaagcaagccaatggttcaaagtatcagataaatggtactatgtcaacagcaatggcgctatggcgacaggctggctccaatacaatggctcatggtactacctcaacgctaatggtgatatggcgacaggatggctccaatacaacggttcatggtattacctcaacgctaatggtgatatggcgacaggatgggctaaagtcaacggttcatggtactacctaaacgctaacggtgctatggctacaggttgggctaaagtcaacggttcatggtactacctaaacgctaacggttcaatggcaacaggttgggtgaaagatggagatacctggtactatcttgaagcatcaggtgctatgaaagcaagccaatggttcaaagtatcagataaatggtactatgtcaatggcttaggtgcccttgcagtcaacacaactgtagatggctataaagtcaatgccaatggtgaatgggtt

SEQ ID NO: 32 - protein, 744 aa, Streptococcus pneumoniae
  pneumococcal surface protein A (pspA); Cellular location: outside; Feature of note: WYY motif; Similar to strain R6 sequence 15902165 (e-179)
MNKKKMILTSLASVAILGAGFVTSQPTFVRAEESPQVVEKSSLEKKYEEAKAKADTAKKDYETAKKKAEDAQKKYEDDQKRTEEKARKEAEASQKLNDVALVVQNAYKEYREVQNQRSKYKSDAEYQKKLTEVDSKIEKARKEQQDLQNKFNEVRAVVVPEPNALAETKKKAEEAKAEEKVAKRKYDYATLKVALAKKEVEAKELEIEKLQYEISTLEQEVATAQHQVDNLKKLLAGADPDDGTEVIEAKLKKGEAELNAKQAELAKKQTELEKLLDSLDPEGKTQDELDKEAEEAELDKKADELQNKVADLEKEISNLEILLGGADPEDDTAALQNKLAAKKAELAKKQTELEKLLDSLDPEGKTQDELDKEAEEAELDKKADELQNKVADLEKEISNLEILLGGADSEDDTAALQNKLATKKAELEKTQKELDAALNELGPDGDEEETPAPAPQPEQPAPAPKPEQPAPAPKPEQPAPAPKPEQPAPAPKPEQPAPAPKPEQPAKPEKPAEEPTQPEKPATPKTGWKQENGMWYFYNTDGSMAIGWLQNNGSWYYLNANGAMATGWVKDGDTWYYLEASGAMKASQWFKVSDKWYYVNSNGAMATGWLQYNGSWYYLNANGDMATGWLQYNGSWYYLNANGDMATGWAKVNGSWYYLNANGAMATGWAKVNGSWYYLNANGSMATGWVKDGDTWYYLEASGAMKASQWFKVSDKWYYVNGLGALAVNTTVDGYKVNANGEWV

SEQ ID NO: 33 - DNA, 1119 bp, Streptococcus pneumoniae
atgagtgataactctaaaacacgtgttgtcgtggggatgagtggtggtgttgattcgtcggtgacggctcttttgctcaaggagcagggctacgatgtgatcggtatcttcatgaagaactgggatgacacagatgaaaacggcgtctgtacggcgaccgaagattacaaggatgtggttgcggtggcagaccagattggcattccctactactctgtcaattttgaaaaagagtactgggaccgcgtttttgagtatttcctagcggaataccgtgcagggcgcacgccaaatccggacgttatgtgcaacaaggaaatcaagttcaaggcctttttggactatgccataaccttgggggcagactatgtagcgactgggcattatgctcgagtggcgcgtgatgaggatggtaccgttcacatgcttcgtggcgtggacaatggcaaggatcagacctatttcctcagccaactttcgcaagaacaacttcaaaaaaccatgttcccactaggacatttggaaaagcctgaagtacgcagactagcagaagaagcaggcctttcgactgctaagaagaaagactcgacagggatttgctttatcggagaaaagaactttaaaaactttctcagcaactacctgccagctcagcctggtcgcatgatgactgtggatggtcgcgatatgggcgagcatgcaggtcttatgtactatacaatcggtcagcgtggcggactcggtatcggtgggcaacacggcggtgacaatgccccttggttcgttgtcggaaaagatctaagcaagaatattctctatgtaggacaaggattctaccatgattcgctcatgtcaactagcctagaagccagtcaagtccactttactcgtgaaatgccagaagagtttacgctagaatgtacggctaaattccgttaccgtcagcctgactctaaggtgaccgttcatgtcaaaggagaaaagacagaggtcatctttgcggaaccacaacgcgcgattacaccaggacaggcagttgtcttttacgatggcgaagagtgtctaggtggcggtttgattgacaatgcttaccgcgatggacaagtttgtcagtacatt

SEQ ID NO: 34 - protein, 373 aa, Streptococcus pneumoniae
  tRNA (5-methylaminomethyl-2-thiouridylate)-methyltransferase (trmU); Cellular location: cytoplasm; Similar to strain R6 sequence 15902166 (0.E+01)
MSDNSKTRVVVGMSGGVDSSVTALLLKEQGYDVIGIFMKNWDDTDENGVCTATEDYKDVVAVADQIGIPYYSVNFEKEYWDRVFEYFLAEYRAGRTPNPDVMCNKEIKFKAFLDYAITLGADYVATGHYARVARDEDGTVHMLRGVDNGKDQTYFLSQLSQEQLQKTMFPLGHLEKPEVRRLAEEAGLSTAKKKDSTGICFIGEKNFKNFLSNYLPAQPGRMMTVDGRDMGEHAGLMYYTIGQRGGLGIGGQHGGDNAPWFVVGKDLSKNILYVGQGFYHDSLMSTSLEASQVHFTREMPEEFTLECTAKFRYRQPDSKVTVHVKGEKTEVIFAEPQRAITPGQAVVFYDGEECLGGGLIDNAYRDGQVCQYI

SEQ ID NO: 35 - DNA, 480 bp, Streptococcus pneumoniae
ttgtgtcgtttaagggaaaggacaagaatgactcaacaagactttcggacaaaagtagacaatacggtttttggtgttcgggctacagccttgattgtccaaaatcacaagcttctagttaccaaagacaagggcaagtattacactattggaggtgcgattcaagtcaatgaaagcacggaagacgcggtagtccgtgaagtgaaggaagaactgggtgtcaaagctcaagctgggcagctagcttttgtggttgaaaatcgttttgaagtggacggcgtttcctatcacaatatcgagtttcattatctggtggatttgcttgaagatgccccgttgaccatgcaggaagatgagaaaaggcagccctgtgagtggattgacttggataagctccagaatatccagctagttccagtctttttaaaaacagccctaccagattgggaaggccaactaagacacattcatcttgaggaa

SEQ ID NO: 36 - protein, 160 aa, Streptococcus pneumoniae
  MutT/nudix family protein; Cellular location: cytoplasm; Similar to strain R6 sequence 15902167 (4.E-82)
MCRLRERTRMTQQDFRTKVDNTVFGVRATALIVQNHKLLVTKDKGKYYTIGGAIQVNESTEDAVVREVKEELGVKAQAGQLAFVVENRFEVDGVSYHNIEFHYLVDLLEDAPLTMQEDEKRQPCEWIDLDKLQNIQLVPVFLKTALPDWEGQLRHIHLEE

SEQ ID NO: 37 - DNA, 1911 bp, Streptococcus pneumoniae
atgacttatcattttactgaagaatacgatattattgtaattggtgcgggacacgctggggttgaggcttccttggccgctagccgtatgggctgtaaggtcctgcttgcgaccatcaatattgaaatgctggctttcatgccttgtaatccctctatcggtggttctgccaaggggattgtcgtgcgtgaagtcgatgccctcggtggcgagatggccaaaaccattgacaagacttacatccagatgaagatgctaaacacagggaaggggccagctgtccgtgcccttcgtgcgcaggctgacaaggaactttactctaaggagatgcgcaagacggttgaaaaccaagaaaatctgacccttcgtcaaaccatgattgatgagattttggtggaagatggcaaggttgtcggtgtgcgtacagccacccatcaagaatatgctgctaaggctgttattgtgacgacagggactgctctccgtggggaaattatcatcggagacctcaagtactcatcaggtcctaaccacagcttggcttctattaacctagctgacaatctcaaggaactgggtctcgaaatcggtcgtttcaagacaggaacccctccacgtgtcaaggcttcttctatcaattacgatgtgacagaaattcagccaggagacgaagtgcctaatcatttctcatacacttcacgtgatgaggattatgtcaaggaccaagtaccatgctggttgacctataccaatggtaccagtcatgagattatccaaaacaacctccaccgtgcgcctatgtttacaggtgtggtcaagggagtggggcctcgttactgtccgtcgattgaagacaagattgtgcgctttgcggacaaggaacgtcaccaactcttccttgagccagaagggcgcaatactgaggaagtctatgtgcaaggactttcaaccagtctgcctgaggatgtccagcgtgacttggtgcattccatcaaaggtttggaaaatgcagagatgatgcggacaggttatgctattgagtatgatatggtcttgcctcatcagttgcgtgcgactttggaaaccaagaaaatctcaggtctcttcactgctggtcagacaaatggaacatcaggttacgaagaggcagcaggccaagggattatcgcgggtatcaatgcggctctgaaaatccaaggcaagcctgaattgattttgaagcgcagtgatggttatatcggggtgatgatcgacgacttggtgaccaagggaaccattgaaccctaccgtctcttgaccagtcgtgctgaataccgtctcattcttcgtcatgacaatgctgatatgcgcttgactgagatgggacgcgagattggccttgtggacgatgaacgctgggctcgttttgaaatcaagaaaaatcaatttgataatgagatgaagcgcctagacagtatcaaactcaagccagtcaaggaaaccaatgccaaggttgaggagatgggcttcaaacccttgaccgatgcagtgacagccaaggaattccttcgccgtccagaagtttcttaccaagatgtggtggccttcatcggaccagctgcagaagacttggatgacaagattatcgaattgattgaaacagaaatcaagtatgaaggctatatttccaaagccatggaccaggttgccaagatgaaacgcatggaagaaaaacgcattccggccaatatcgactgggatgacattgattctatcgcaaccgaagcccgtcagaagttcaaactcatcaatccagaaaccatcggccaagccagccgtatttcgggagtaaacccagcagatatttctattttgatggtgtatctggaaggtaaaaatcgtagtatttctaaaactcttcaaaaatcaaaa

SEQ ID NO: 38 - protein, 637 aa, Streptococcus pneumoniae
  glucose-inhibited division protein A (gidA); Cellular location: cytoplasm; Similar to strain R6 sequence 15902168 (0.E+01)
MTYHFTEEYDIIVIGAGHAGVEASLAASRMGCKVLLATINIEMLAFMPCNPSIGGSAKGIVVREVDALGGEMAKTIDKTYIQMKMLNTGKGPAVRALRAQADKELYSKEMRKTVENQENLTLRQTMIDEILVEDGKVVGVRTATHQEYAAKAVIVTTGTALRGEIIIGDLKYSSGPNHSLASINLADNLKELGLEIGRFKTGTPPRVKASSINYDVTEIQPGDEVPNHFSYTSRDEDYVKDQVPCWLTYTNGTSHEIIQNNLHRAPMFTGVVKGVGPRYCPSIEDKIVRFADKERHQLFLEPEGRNTEEVYVQGLSTSLPEDVQRDLVHSIKGLENAEMMRTGYAIEYDMVLPHQLRATLETKKISGLFTAGQTNGTSGYEEAAGQGIIAGINAALKIQGKPELILKRSDGYIGVMIDDLVTKGTIEPYRLLTSRAEYRLILRHDNADMRLTEMGREIGLVDDERWARFEIKKNQFDNEMKRLDSIKLKPVKETNAKVEEMGFKPLTDAVTAKEFLRRPEVSYQDVVAFIGPAAEDLDDKIIELIETEIKYEGYISKAMDQVAKMKRMEEKRIPANIDWDDIDSIATEARQKFKLINPETIGQASRISGVNPADISILMVYLEGKNRSISKTLQKSK

SEQ ID NO: 39 - DNA, 147 bp, Streptococcus pneumoniae
atgaaaatcaaagagcaaactaggaagctagccgtaggttgctcaaagcactgctttgaggttgtagatagaactgacgaagtcagtagccatacctacggcaaggcgacgttgacgcggtttgaagagattttcgaagagtatcaa

SEQ ID NO: 40 - protein, 49 aa, Streptococcus pneumoniae
  box element
MKIKEQTRKLAVGCSKHCFEVVDRTDEVSSHTYGKATLTRFEEIFEEYQ

SEQ ID NO: 41 - DNA, 1677 bp, Streptococcus pneumoniae
atggcctacactcttaaacctgaagaagtcggcgtttttgccatcggtggtctaggagaaatcgggaaaaacacttacggaattgaataccaagacgagattatcatcgtcgatgctgggattaaattcccagaagatgacttgcttggtatcgactatgtcattcctgactactcttacatcgtggacaatatcgaccgcgtcaaggctgttttaatcacacacggacacgaggaccacattggtgggattccgttcctactcaagcaagcaaatgtccctatttatgctggaccgcttgccttggctttgatccgtgggaaactcgaagaacacggcctcttgcgcaacgccaaactttacgaaatcaaccacaacaccgagttgacctttaaaaatctcaaggcaactttctttagaacgactcactctattccagagcctttggggattgtcattcatactcctcaagggaaaatcgtctgtacgggtgactttaagttcgactttactccagttggagaacctgcggacttgcatcgtatggctgcgcttggtgaagaaggcgtgctctgtctcctgtctgactcgacaaatgcggaagtaccaacctttaccaactctgaaaaagtcgttggtcagtccattatgaagattatccaaggtattgaaggacgtatcatctttgcatcctttgcctcaaatatcttccgtctccagcaggcaacagaagctgctgttaagactggacgcaagattgcggtctttggtcgttctatggaaaaggccattgtcaacggaatcgatcttggctacatcaaagctcctaagggaacctttatcgagccaaatgaaatcaaagattatcctgcaggagaagttcttatcctctgtacaggtagtcagggtgagcctatggcagccctctctcgtatcgccaacggaacccaccgtcaagtacaattacaaccaggtgataccgttatcttctcttctagtcccatccctggaaacactactagtgtcaacaagctgattaacatcatttctgaagctggtgtcgaagttatccacggtaaagtgaacaatatccatacatctggacacggtggtcagcaagagcaaaaactcatgctctgcttgattaagccaaaatacttcatgcctgtccacggtgaataccgcatgcaaaaagtccacgctggactagcagtggatactggtgttgagaaggacaatatctttatcatgagcaatggcgatgtgcttgcccttactgctgactcagctcgtatcgcaggtcatttcaacgcccaagatatctatgtcgatggaaatcgtatcggtgaaattggcgcagctgtcctcaaagatcgtcgcgatctatctgaagacggtgtcgttctggcagttgcaactgttgacttcaaatcgcagatgattctatctggtccagacatcctcagccgaggctttgtctacatgagagagtctggcgacttgattcgccaaagccagcgtatcctcttcaatgccattcgtatcgcactgaaaaataaggatgctagcgtgcaatctgtcaatggtgccattgtcaacgctattcgccccttcctctatgaaaataccgaacgtgaaccgatcatcatcccgatgatcctcacaccagatgaagaa

SEQ ID NO: 42 - protein, 559 aa, Streptococcus pneumoniae
  metallo-beta-lactamase superfamily protein; Cellular location: cytoplasm; Similar to strain R6 sequence 15902169 (0.E+01)
MAYTLKPEEVGVFAIGGLGEIGKNTYGIEYQDEIIIVDAGIKFPEDDLLGIDYVIPDYSYIVDNIDRVKAVLITHGHEDHIGGIPFLLKQANVPIYAGPLALALIRGKLEEHGLLRNAKLYEINHNTELTFKNLKATFFRTTHSIPEPLGIVIHTPQGKIVCTGDFKFDFTPVGEPADLHRMAALGEEGVLCLLSDSTNAEVPTFTNSEKVVGQSIMKIIQGIEGRIIFASFASNIFRLQQATEAAVKTGRKIAVFGRSMEKAIVNGIDLGYIKAPKGTFIEPNEIKDYPAGEVLILCTGSQGEPMAALSRIANGTHRQVQLQPGDTVIFSSSPIPGNTTSVNKLINIISEAGVEVIHGKVNNIHTSGHGGQQEQKLMLCLIKPKYFMPVHGEYRMQKVHAGLAVDTGVEKDNIFIMSNGDVLALTADSARIAGHFNAQDIYVDGNRIGEIGAAVLKDRRDLSEDGVVLAVATVDFKSQMILSGPDILSRGFVYMRESGDLIRQSQRILFNAIRIALKNKDASVQSVNGAIVNAIRPFLYENTEREPIIIPMILTPDEE

SEQ ID NO: 43 - DNA, 231 bp, Streptococcus pneumoniae
atgatttacaaagttttttatcaagaaacaaaagaacgtagcccacgccgtgaaacaacacgcacgctttacctagacatcgatgccagctcagaacttgagggccgtatcactgctcgccaacttgtcgaagaaaatcgcccagagtacaatatcgagtatatcgaactcttgtctgacaaattgctcgattacgaaaaagaaactggcgccttcgaaattacggagttc

SEQ ID NO: 44 - protein, 77 aa, Streptococcus pneumoniae
  conserved hypothetical protein; Cellular location: cytoplasm; Similar to strain R6 sequence 15902170 (6.E-40)
MIYKVFYQETKERSPRRETTRTLYLDIDASSELEGRITARQLVEENRPEYNIEYIELLSDKLLDYEKETGAFEITEF

SEQ ID NO: 45 - DNA, 213 bp, Streptococcus pneumoniae
atgtataacttatttgcttttgctatcggagctcgcttggtagcttttattgtttttgttgcttgcgtttatgcggggaatcttctatttgccaaactggaacgacgacaaaccaagttcttgtggaaaatgacctttgtgactctctactcgctttttctcctcctcgtgacctatgtcgtttggtttgtattttactttgaattaaatgct

SEQ ID NO: 46 - protein, 71 aa, Streptococcus pneumoniae
  hypothetical protein
MYNLFAFAIGARLVAFIVFVACVYAGNLLFAKLERRQTKFLWKMTFVTLYSLFLLLVTYVVWFVFYFELNA

SEQ ID NO: 47 - DNA, 150 bp, Streptococcus pneumoniae
atgatgaaagatttgaacaattatcgtgaaatttctaataaggaattgcaagaaatcaagggtggctttggtgtcggtgttggtatcgctttatttatggcaggttataccattggaaaagaccttcgtaaaaagtttggtaagtcatgc

SEQ ID NO: 48 - protein, 50 aa, Streptococcus pneumoniae
  hypothetical protein; Cellular location: membrane; Similar to strain R6 sequence 15902171 (1.E-24)
MMKDLNNYREISNKELQEIKGGFGVGVGIALFMAGYTIGKDLRKKFGKSC

SEQ ID NO: 49 - DNA, 183 bp, Streptococcus pneumoniae
atgacaaattttgacattcttgacaatcaatttttatccttatctgaaaatgaattatcagatattgatggcggtctcgctcccttggttatctttggagtagcagtatcttggaaggctattgcaggtggaacagcacttataggttctggtttggcagctggttattttttaggaggagat

SEQ ID NO: 50 - protein, 61 aa, Streptococcus pneumoniae
  hypothetical protein; Cellular location: membrane; Similar to strain R6 sequence 15902172 (1.E-30)
MTNFDILDNQFLSLSENELSDIDGGLAPLVIFGVAVSWKAIAGGTALIGSGLAAGYFLGGD

SEQ ID NO: 51 - DNA, 105 bp, Streptococcus pneumoniae
ttgtcaagaatgtcaaaatttgtcattgaactttcctccttttttcttgttcacttttatattcggaaaagaaaaggaaaagtgagcatttttttaaattatttt

SEQ ID NO: 52 - protein, 35 aa, Streptococcus pneumoniae
  hypothetical protein; Cellular location: cytoplasm
MSRMSKFVIELSSFFLVHFYIRKRKGKVSIFLNYF

SEQ ID NO: 53 - DNA, 681 bp, Streptococcus pneumoniae
atgaaagtattagcttttgatacgtccagcaaggctctttctctggctattttagaggataagcaggttcttgccgagacgacgattaatattaagaaaaatcacagtattactcttatgcctgccatcgattttttgatggcaagtttggattggacacccaaggatttggaccgaatcgtggtagctgaagggccgggtagctatacaggcttgcgaattgcggtagcaactgctaagaccttagctcacaccctgaacatcgagttggttggtatgtcgagtctcttggctctggtgccccatcaacaagaaggtttgtttgtccccttgatggatgcgcgtcgcaataatgtttatgcaggattttatgaaaatgccaaacctgtcatggcagaagcgcacctatcttttgaagaggtgctagaaaaagtcaagggtactagtcaggtaacctttgtcggagaagttggcccctttgttgagcagattcaaaaacacttgccaaggactgattacaaagaaacattgcccaatgcagctaatctagctcttttggcctgggacaaggaagcagactccttgcatgattttgtgccgaattacctcaaacgagtcgaggctgaggaaaactggctcaagaaccataccgagtctggcgagtcttacattaaacgccta

SEQ ID NO: 54 - protein, 227 aa, Streptococcus pneumoniae
  conserved hypothetical protein; Cellular location: cytoplasm; Similar to strain R6 sequence 15902173 (e-124)
MKVLAFDTSSKALSLAILEDKQVLAETTINIKKNHSITLMPAIDFLMASLDWTPKDLDRIVVAEGPGSYTGLRIAVATAKTLAHTLNIELVGMSSLLALVPHQQEGLFVPLMDARRNNVYAGFYENAKPVMAEAHLSFEEVLEKVKGTSQVTFVGEVGPFVEQIQKHLPRTDYKETLPNAANLALLAWDKEADSLHDFVPNYLKRVEAEENWLKNHTESGESYIKRL

SEQ ID NO: 55 - DNA, 435 bp, Streptococcus pneumoniae
atgatagaaatcaagcgaattcaacaacagcctgacctagctcaagccatctacgctgttatggcagctgtttacctagtcagtccttggactctggagcaaatccaagcagatctgtcccaagaccagacttggtatgcattggcttatgatggggcagaagtgattggatttctagctgtgcaggagaatctttttgaagcagaagtcctgcaaatcgctgtcaaaggagcttatcagggtcaggggattgcgtcagccttgtttgctcaattgccgacagacaaggaaattttcctcgaagtcagacagtcaaatcaacgagcgcaagcattttacaagaaagaaaagatgacagttatcgctgagcgaaaggcctactaccatgacccagtcgaggacgccattatcatgaagagagaaatagatgaagga

SEQ ID NO: 56 - protein, 145 aa, Streptococcus pneumoniae
  ribosomal-protein-alanine acetyltransferase, putative; Cellular location: outside; Similar to strain R6 sequence 15902174 (3.E-75)
MIEIKRIQQQPDLAQAIYAVMAAVYLVSPWTLEQIQADLSQDQTWYALAYDGAEVIGFLAVQENLFEAEVLQIAVKGAYQGQGIASALFAQLPTDKEIFLEVRQSNQRAQAFYKKEKMTVIAERKAYYHDPVEDAIIMKREIDEG

SEQ ID NO: 57 - DNA, 1008 bp, Streptococcus pneumoniae
atgaaggatagatatattttagcatttgagacatcctgtgatgagaccagtgtcgccgtcttgaaaaacgacgatgagctcttgtccaatgtcattgctagtcaaattgagagtcacaaacgttttggtggcgtagtgcccgaagtagccagtcgtcaccatgtcgaggtcattacagcctgtatcgaggaggcattggcagaagcagggattaccgaagaggacgtgacagctgttgcggttacctacggaccaggcttggtcggagccttgctagttggtttgtcagctgccaaggcctttgcttgggctcacggacttccactgattcctgttaatcacatggctgggcacctcatggcagctcagagtgtggagcctttggagtttcccttgctagccctcttggtcagcggcggacacacagagttggtttatgtttcggaggcaggagattataagattgttggggaaacccgtgatgatgcggttggtgaggcttatgataaggtcggccgtgtcatgggcttgacctatcctgcaggtcgtgagattgacgagctggctcatcaggggcaggatatttatgatttcccccgtgccatgattaaggaagataatctggagttctccttctcaggtttgaaatctgcctttatcaatcttcatcacaatgccgagcaaaagggagaaagcctgtctacagaagatttgtgtgcttccttccaagcagcagttatggacattctcatggcaaaaaccaagaaggctttggagaaatatcctgttaaaatcctagttgtggcaggtggtgtggcagccaataaaggtctcagagaacgcctagcagccgaaatcacagatgtcaaggttatcatcccccctctgcgactctgcggagacaatgcaggtatgattgcctatgccagcgtcagcgagtggaacaaagaaaacttcgcaggctgggacctcaatgccaaaccaagtcttgcctttgataccatggaa

SEQ ID NO: 58 - protein, 336 aa, Streptococcus pneumoniae
  glycoprotease family protein; Cellular location: membrane; Similar to strain R6 sequence 15902175 (0.E+01)
MKDRYILAFETSCDETSVAVLKNDDELLSNVIASQIESHKRFGGVVPEVASRHHVEVITACIEEALAEAGITEEDVTAVAVTYGPGLVGALLVGLSAAKAFAWAHGLPLIPVNHMAGHLMAAQSVEPLEFPLLALLVSGGHTELVYVSEAGDYKIVGETRDDAVGEAYDKVGRVMGLTYPAGREIDELAHQGQDIYDFPRAMIKEDNLEFSFSGLKSAFINLHHNAEQKGESLSTEDLCASFQAAVMDILMAKTKKALEKYPVKILVVAGGVAANKGLRERLAAEITDVKVIIPPLRLCGDNAGMIAYASVSEWNKENFAGWDLNAKPSLAFDTME

SEQ ID NO: 59 - DNA, 1511 bp, Streptococcus pneumoniae
atggaacaacttaagaataccacagatttgctcggattggaagacaaaaatatcaaaatcttgtctgttctgaaataccaaacccatctagtcgttcaggcaaagttggattcccccgctcctccttgtcctcattgtcaagggaagatgatcaaatacgacttccagaaagcctctaaaattccgcttctcgactgtcagggtttacccacggtactgcatctcaaaaagcgccgctttcagtgcaagaattgccttaaggtggtcgtttctcaaacatccattgtcaagaaaaattgccagatttccaacatggtgagacaaaaaatcgctcagctcctccttgaaaagcagtctatgactgagattgcccacagattggcggtctcaacttccaccgtcatccgaaaactgagggaatttaagtttgaaaccgattggaccaagttgccaaaagttatgagttgggatgagtatagcttcaaaaagagcaaaatgagcttcattgcccaagattttgagtccaaatccatcctcgcaattttagacgggcgaactcatgcggtgattcgaaaccatttccaacgctatcagagagaggttcgggagctggtcgaggtcatcaccatggacatgtacagcccttattatcggctcgctaagcaactctttccaaaggcgaagattgttcttgaccgcttccacattgtccaacatctgagccgagctatgaaccgagtacgaatccaaatcatgaaccaatttgaccgaaaatccttggagtatcgggcgctcaagcgcttttggaaccctcgctttttcgtttctaggctcgggctaaatcagtccactggactgatttactacaccagtatagcttcaagctctgtcagaaacgattctatcagcccacgtttcgaatgcacttaacccatcgggaagtacgagataagctgctttcttactctgagggattacaggttcactacgaactctatcaactcctgctctttcattttcaagagaagaatgccgaccatttctttggattgattgagcaagaactgccaacggttcatccgctttttcaaacggtcttttggacttttttaagggatagagataagattatcaacgcacttaagctgccttattccaacgctaaacttgaagcgaccaataatttgattaagattatcaagcgcaaagcctttggtttccggaactttaacaattttaaaaaacggattttgatgactttgaacatcaaaaaagagagtacgaatttcgtactctccagattgcagcttttcgcctacccactacacttgacaaagagccactctttattccatggtatcaaaggcaagacttggtttggcattgaggtcccagcctgcgaagttttctttgttccactcgctgacgctggcataggcaatcatacctgcattgtctccgcagagtcgcagaggggggatgataaccttgacatctgtgatttcggctgc

SEQ ID NO: 60 - protein, 354 aa, Streptococcus pneumoniae
  IS1167, transposase, fusion FRAMESHIFT
MECFGSIISVVGNPTPGIIGSFLVEKKPHMTYNEKRLTNSLERVHMEQLKNTTDLLGLEDKNIKILSVLKYQTHLVVQAKLDSPAPPCPHCQGKMIKYDFQKASKIPLLDCQGLPTVLHLKKRRFQCKNCLKVVVSQTSIVKKNCQISNMVRQKIAQLLLEKQSMTEIAHRLAVSTSTVIRKLREFKFETDWTKLPKVMSWDEYSFKKSKMSFIAQDFESKSILAILDGRTHAVIRNHFQRYQREVRELVEVITMDMYSPYYRLAKQLFPKAKIVLDRFHIVQHLSRAMNRVRIQIMNQFDRKSLEYRALKRFWNPRFFVSRLGLNQSTGLIYYTSIASSSVRNDSISPRFECT

SEQ ID NO: 61 - DNA, 264 bp, Streptococcus pneumoniae
ttgactgaaatagctgctgaattcaactgtcctccaacaactattcattacgctctaaaggctatgggatatagtctaaaaaagagccgtacctactgcgaacaagacccagaaaaagtaaatcggttccttaaagaattgaatcacttaagctacctgactcctatttatatttatgagacaggggttgagacctatttttatctcgaatatgatcgagccttgagcaggcagttagtctctctggaagaagatataattatt

SEQ ID NO: 62 - protein, 88 aa, Streptococcus pneumoniae
  IS630-Spn1, transposase Orf1, truncation FRAMESHIFT; Cellular location: cytoplasm; Similar to strain R6 sequence 15902178 (1.E-21)
MTEIAAEFNCPPTTIHYALKAMGYSLKKSRTYCEQDPEKVNRFLKELNHLSYLTPIYIYETGVETYFYLEYDRALSRQLVSLEEDIII

SEQ ID NO: 63 - DNA, 561 bp, Streptococcus pneumoniae
atggttacaatgcaatatagttgtggaaaaataaatattaatatccctgatggatatggagacattaaggatatagtgttttcggctcatattatagttaggtataataatggacattgtggaggtatagatccgcatataattggactttgtaaaaagcagatcagaaggatgtctctatatcctattttgataattgtatctagagattcaaaggttattgatgattataaaaatttagatattgcctatgttgattgtactcaatgttcaaataattttgaaactgccttacacgttaaaaatattttaaaattattaaaaatccaacttatacactgtcatggctactcaactaattattttttatatatgttaaaaaaacttgacaagaatggatttggaaaggttaagacagtgataacatgccatggatgggttgaatataacttaaaaaagaaattcttgacttattttgatttttggacatattctatgggagatgcttttatttgtgtatctgaaactatgaaaaaaaagattggagagtataataaaaaa

SEQ ID NO: 64 - protein, 187 aa, Streptococcus pneumoniae
  hypothetical protein (Glycosyltransferase); Cellular location: cytoplasm; Similar to strain R6 sequence 15902179 (e-107)
MVTMQYSCGKININIPDGYGDIKDIVFSAHIIVRYNNGHCGGIDPHIIGLCKKQIRRMSLYPILIIVSRDSKVIDDYKNLDIAYVDCTQCSNNFETALHVKNILKLLKIQLIHCHGYSTNYFLYMLKKLDKNGFGKVKTVITCHGWVEYNLKKKFLTYFDFWTYSMGDAFICVSETMKKKIGEYNKK

SEQ ID NO: 65 - DNA, 204 bp, Streptococcus pneumoniae
ttggagagtataataaaaaataagaagatagttgcaataaataacggaattaatgtatcaaatagcgatttagatgtagtaggtgttcaagactttaaaaaagaattttgtattccaaataacaaaaaatcatttgttatgttggaaggttggatccagaaaaaaggccggatagattccttgaatttgcagaaaaattatttt

SEQ ID NO: 66 - protein, 68 aa, Streptococcus pneumoniae
  hypothetical protein (Glycosyltransferase); Cellular location: cytoplasm; Similar to strain R6 sequence 15902179 (6.E-20)
MESIIKNKKIVAINNGINVSNSDLDVVGVQDFKKEFCIPNNKKSFVMLEGWIQKKGRIDSLNLQKNYF

SEQ ID NO: 67 - DNA, 453 bp, Streptococcus pneumoniae
gtgatttttattatggctggaaatggtagtatgtgggctgctttgaaagaaaaaatttgccatttgaaatgtagagataatttcaggttacttggtgaaatctatccagctactatagtttaccaaatatcggatttattgtatattccttctgatacagaaggaatacctatgtgtgttttagagtcaatgtcacaaggaactccggttttagctagtaatgttggcgggttaagtgaaattattgaacatagggttgatggatttttatttgagaaggaagatgttgagggagtgtgtgcttgtgctaattttttactcaatgattctgagtatttgaaatatataggtgagaatagtaaatcaaaaataagaaaacatttttctgtgcaaaaaatgtttgtagaaaccatgagagtatatgatgaattattagagaagagtagtcatgga

SEQ ID NO: 68 - protein, 151 aa, Streptococcus pneumoniae
  glycosyl transferase, putative; Cellular location: cytoplasm; Similar to strain R6 sequence 15902179 (2.E-82)
MIFIMAGNGSMWAALKEKICHLKCRDNFRLLGEIYPATIVYQISDLLYIPSDTEGIPMCVLESMSQGTPVLASNVGGLSEIIEHRVDGFLFEKEDVEGVCACANFLLNDSEYLKYIGENSKSKIRKHFSVQKMFVETMRVYDELLEKSSHG

SEQ ID NO: 69 - DNA, 873 bp, Streptococcus pneumoniae
atggataggaatatagatcaagaattagtaagtattataataccaacacataataggtatgaatctctgattagagctgtgaaaagttgtttacatcaaagttataaaaatatcgaagttataattattgatgataattatagtaatgtaaatttaagaaataaaattatccatcaatttggctataccaatcatagaattaagttaattttaagtaatgaagatttaggtgcaactaatgccagaaacataggtatcaaaaattctagaggtaagtatatatcatttttagacgatgatgatgaatatatgccagatcgaattttaaagttgatggcttgttttaaaaagagtagaatgaagaatttagctttagtttgtagttatggaataataatttatccaaatggtacacgagaagaggagaagaccgattttgttggaaatcccttgtttgttcaaatggttcacaatatagcaggtacgtcattttggttgtgtaaaaaagaggtgctagaattaattaatggttttgagaaaatagattcacatcaggacggtgttgttttattaaaactacttgttcaaggataccaaattgatatagtgcgagaattcttggtgaattactacgctcacagtaaagaaaacggtatcactggagtgacacaaaaaacaattaatgcagatgaagaatattataattactgtaggaaatattttaatttattgagtttcaacgagagaatattggttacaaagaaatattattctttaaacataaagcggttactattaataggagacaaatgcaaggctttaaaagtaatcaagaaggcaagagaagaaaaaatttttaacgaatttcttttt

SEQ ID NO: 70 - protein, 291 aa, Streptococcus pneumoniae
  glycosyl transferase, family 2; Cellular location: cytoplasm; Similar to strain R6 sequence 15902180 (e-167)
MDRNIDQELVSIIIPTHNRYESLIRAVKSCLHQSYKNIEVIIIDDNYSNVNLRNKIIHQFGYTNHRIKLILSNEDLGATNARNIGIKNSRGKYISFLDDDDEYMPDRILKLMACFKKSRMKNLALVCSYGIIIYPNGTREEEKTDFVGNPLFVQMVHNIAGTSFWLCKKEVLELINGFEKIDSHQDGVVLLKLLVQGYQIDIVREFLVNYYAHSKENGITGVTQKTINADEEYYNYCRKYFNLLSFNERILVTKKYYSLNIKRLLLIGDKCKALKVIKKAREEKIFNEFLF

SEQ ID NO: 71 - DNA, 1614 bp, Streptococcus pneumoniae
gtgtatactattataaaatcaaatataaaaaaatttagtttattaacgatatttattgttgctggtcaattattgctaatttatgcagcaactattaatgctctggtgttgaatgaattaattgcgatgaatttagagcggtttttgaaattgtcaatctaccaaatgattgtctggtgtgggataatattccttgactgggtagtgaaaaattatcaggttgaagtgatccaagagtttaatctagagattcgaaatagagttgccacagacatctctaactctacctatcaagaatttcatagtaaatcatcaggaacatatctttcgtggctaaataatgatgttcagactttaaatgatcaggcgtttaaacaactttttttagtaataaaaggaatttctggtactatatttgcagttgtgactcttaatcactatcattggtcattgactgtagccaccttgttttcattaatgattatgctacttgtaccaaaaatctttgcatcgaaaatgcgagaagttagtctaaatttaactaaccaaaatgaagcttttttaaaatctagtgagactatattgaatggatttgatgtgttagcgtccttgaatcttttatatgtattgcctaagaaaattaaagaagcaggaattttattaaagatggttatacaaagaaagacaactgtagaaacgttagcaggcgctattagcttctttctcaatattttttttcagatatctctcgtttttttaacaggctatcttgcaataaaaggaatagtgaaaattggtactattgaagcaataggagcactaacaggtgttatttttacagcgctaggtgaattaggaggtcaattatcctctattattggtacgaagcctatttttttaaaattgtattcaattaatccaattgagtcaaataaaatgaatgatatcgaaccaaatgaggtgaatagagattttccgttatatgaagcaaaaaatatttgctataagtatggagataaagaaatattaaaaaacttaaatttttgttttcaacgtaatgaaaagtatttaattttaggtgaaagtggaagcgggaaatctacattattaaaattattgaatggctttttgagagattatagtggagaattgcgattctgcggggatgatataaaaaaaacctcctatttaaatatggtttcgaatgttctatatgtagatcaaaaagcttatttgtttgaaggtacgattagagataatattttattggaagaaaattatactgatgaagaaatactacagtctttagagcaagttggtttgagtgtaaaagattttcctaataacattttagattattatgttggtgatgatgggagattactgtcaggagggcagaaacaaaaaattactttagctagagggctaattagaaataagaaaatagtattaattgacgagggaacttctgctatcgataggagaacttcgttagcgattgaacgtaagatattagatagagaggatttgactgtcattattgttacccatgctccgcatccggaacttaaacaatattttactaagatatatcaatttccaaaggattttatt

SEQ ID NO: 72 - protein, 538 aa, Streptococcus pneumoniae
  ABC transporter, ATP-binding protein; Cellular location: membrane; Similar to strain R6 sequence 15902181 (0.E+01)
MYTIIKSNIKKFSLLTIFIVAGQLLLIYAATINALVLNELIAMNLERFLKLSIYQMIVWCGIIFLDWVVKNYQVEVIQEFNLEIRNRVATDISNSTYQEFHSKSSGTYLSWLNNDVQTLNDQAFKQLFLVIKGISGTIFAVVTLNHYHWSLTVATLFSLMIMLLVPKIFASKMREVSLNLTNQNEAFLKSSETILNGFDVLASLNLLYVLPKKIKEAGILLKMVIQRKTTVETLAGAISFFLNIFFQISLVFLTGYLAIKGIVKIGTIEAIGALTGVIFTALGELGGQLSSIIGTKPIFLKLYSINPIESNKMNDIEPNEVNRDFPLYEAKNICYKYGDKEILKNLNFCFQRNEKYLILGESGSGKSTLLKLLNGFLRDYSGELRFCGDDIKKTSYLNMVSNVLYVDQKAYLFEGTIRDNILLEENYTDEEILQSLEQVGLSVKDFPNNILDYYVGDDGRLLSGGQKQKITLARGLIRNKKIVLIDEGTSAIDRRTSLAIERKILDREDLTVIIVTHAPHPELKQYFTKIYQFPKDFI

SEQ ID NO: 73 - DNA, 477 bp, Streptococcus pneumoniae
gtgcagttcattttgcatagttttggcattcatcctagatatccatataaaatgtctgagattgttgaaatgtctaaaaaaatatcagatctaaacgataaaaaagaatttcacaaaaagaactgtgagttgaggtttcaagatagtgttcttgataacataaatagtgtcccgggtacaactcatttatttagttgtttaaatattcaaacattagtaaaaattattttatatatttttcgatacaacagttgtatgaaaatatttaattttagagataaagagcttatcttttttaataagattgtaaatgggctgatacaaaatattgaggagaatttagaggatgatattgaaaggatattgaaatatttatatatatgtttatttaacgaaatattcattattaagaataaggtgaatttttttgatgatgtggaatttaatcagacacttagtgagtttttagataaattg

SEQ ID NO: 74 - protein, 159 aa, Streptococcus pneumoniae
  hypothetical protein; Cellular location: membrane
MQFILHSFGIHPRYPYKMSEIVEMSKKISDLNDKKEFHKKNCELRFQDSVLDNINSVPGTTHLFSCLNIQTLVKIILYIFRYNSCMKIFNFRDKELIFFNKIVNGLIQNIEENLEDDIERILKYLYICLFNEIFIIKNKVNFFDDVEFNQTLSEFLDKL

SEQ ID NO: 75 - DNA, 753 bp, Streptococcus pneumoniae
atggttatgagtaacaatactaagtatatctttttatctccacatttagatgacgcaattttttcctgtggtgattatatttcaaaattaacttcagaaggagaaattgtacttgttattactatattttctggttaccctttgagccaacagctacagccctctgctaagcaatttcataagttgtgtaaccttgggaaatatccgattgaagaaaggaagaaagaagacaggttagcttgtgaacgtctacaatgtgattttagacacttatcgtactatgaatgtctctataggaaagatagaaatggcaattttctataccgtcatatctatagtgaattaaaaaatgaggacacattaaagaatgatatcataaaagagctgttaatgcatttagacgacaaatgtgtcgtatattgtccgctttcacttggtgaccatgttgctcatgtttttgtgaatagtattggaagggcgcttgaatttatgcgttataaagtaatatattatgaggacttcccatatgtaagtgatagtagtatggttagttatatgggaaaaactaaagaattaaaaatgtatcaagaggaacttgatgaaaaaaattatattgatagaatatcatcaatattgtgctataaatctcagattttgataatctggaaatcagttgaaaaacttttaaacaatattaaagagttgtatttaaggaatggggcagcttattctattagattttggattaagaaa

SEQ ID NO: 76 - protein, 251 aa, Streptococcus pneumoniae
  conserved domain protein; Cellular location: cytoplasm; Similar to strain R6 sequence 15902182 (e-146)
MVMSNNTKYIFLSPHLDDAIFSCGDYISKLTSEGEIVLVITIFSGYPLSQQLQPSAKQFHKLCNLGKYPIEERKKEDRLACERLQCDFRHLSYYECLYRKDRNGNFLYRHIYSELKNEDTLKNDIIKELLMHLDDKCVVYCPLSLGDHVAHVFVNSIGRALEFMRYKVIYYEDFPYVSDSSMVSYMGKTKELKMYQEELDEKNYIDRISSILCYKSQILIIWKSVEKLLNNIKELYLRNGAAYSIRFWIKK

SEQ ID NO: 77 - DNA, 648 bp, Streptococcus pneumoniae
atgaatatagcagtaattggtttggggcatgttgggctggcctacgcgttactatttgcatctaaatataaagttgttgcatatgatatagattctgtaaaaataaataatttaaaaaagggcattcttccatctaaaaatgaagagcttatgaagtttttttgcgagaataacttaaatattactttttttgatacattttctgaaattaaaaataatattgattattatattattgcgcttccgacagattatgatgagaaaattggtagttttaatacatatgaaatcgaacaaacggtatcgaagattctgagggtaaaacctaatggaaagattattttaaagtcaacagttccgatcggcttttcaaacaaattaaaaaggctgtttgatacaaaaaatatcatttttgtccctgaatttttgagagaaggttgttctatatatgataatttatatccaagtcgcatagttgttggagatgagacagttgaaggaagaaaaattgcagagttgttcctttcgattagtactcatagtactgccaatattaaaaatgttatgttagtttctcctactgaagcagaagcaattaagcttttttctaacacattcttagctctccgtgttgcttttttaatgaac

SEQ ID NO: 78 - protein, 216 aa, Streptococcus pneumoniae
  UDP-glucose 6-dehydrogenase, FRAMESHIFT (ugd)
MNIAVIGLGHVGLAYALLFASKYKVVAYDIDSVKINNLKKGILPSKNEELMKFFCENNLNITFFDTFSEIKNNIDYYIIALPTDYDEKIGSFNTYEIEQTVSKILRVKPNGKIILKSTVPIGFSNKLKRLFDTKNIIFVPEFLREGCSIYDNLYPSRIVVGDETVEGRKIAELFLSISTHSTANIKNVMLVSPTEAEAIKLFSNTFLALRVAFLMN

SEQ ID NO: 79 - DNA, 348 bp, Streptococcus pneumoniae
gtgatagaagcgattgatatttcaaacacaaatagaaaacagttcatagttaaacaaatattggaacgaaagccaaagatagtaggaatatataaattggggatgaaatataattcagataattacaaagagtcagctattttaagtataattaatgaactattgattgtcggtataaaaattttagtatatgaaccaaatttaaacgttagtatagataacgtaattattgaaaagaattttgaactatttacaaaacaaagtgatctaattgttgcaaatagatgggataggggccttgaagcttataaagataaagtttacacaagggggatctggataagagat

SEQ ID NO: 80 - protein, 116 aa, Streptococcus pneumoniae
  putative UDP-glucose 6-dehydrogenase
MIEAIDISNTNRKQFIVKQILERKPKIVGIYKLGMKYNSDNYKESAILSIINELLIVGIKILVYEPNLNVSIDNVIIEKNFELFTKQSDLIVANRWDRGLEAYKDKVYTRGIWIRD

SEQ ID NO: 81 - DNA, 861 bp, Streptococcus pneumoniae
atgattgagagaatggaactgggggaattttacaaggaattacgtttggcgagaaagctcaagcagtcagatgtggcttgtgagggtctaacagcttctcagttgtccaagtttgaactagggcagtctatgctgtctgcggataagttgattctagctatccaaggtataaatgtgacctttgatgagtttgggcacaagctcaacaactatcaagaatctccacatatgcgaatcggtcgaaaggttgtgaatcgctttgcccatcaggatatagctgctttagagcagctattggaggaagtcgatcaagaacagatggcgcagacctatcgtcgtttgaatgccatcgtgattaaagatgccatccattcactaaataaaagctacccactagcagaggaggatagcgagtttttgaccacctatctctatgctatcgagtcttggacctggtttgaactctatctcttttgcaataccatgcccttcttgagcaatcaagatctgatttttttatcaacctccttactcgaaaaatccaaagaatttaaagagttagtacacaatcgattgtatatgaagcaaggactcttaaatatcttatcagaactcatggagcgaaaacttttctcctacatcccaatcttcgaagccgagttggagaggatgttacgaccgtatgatgtttttgaaaaagtatcgtggcaatttttaaagaagatgagtgtctttcttcaaacaaagggaagcaatcaaaaagagattgaacgctttatccaatctctgcaggtattagaaaatccacaattaatagccctttttgaattgcgttttcagcaatataaagaacttatagat

SEQ ID NO: 82 - protein, 287 aa, Streptococcus pneumoniae
  transcriptional regulator; Cellular location: cytoplasm; Similar to strain R6 sequence 15902184 (e-161)
MIERMELGEFYKELRLARKLKQSDVACEGLTASQLSKFELGQSMLSADKLILAIQGINVTFDEFGHKLNNYQESPHMRIGRKVVNRFAHQDIAALEQLLEEVDQEQMAQTYRRLNAIVIKDAIHSLNKSYPLAEEDSEFLTTYLYAIESWTWFELYLFCNTMPFLSNQDLIFLSTSLLEKSKEFKELVHNRLYMKQGLLNILSELMERKLFSYIPIFEAELERMLRPYDVFEKVSWQFLKKMSVFLQTKGSNQKEIERFIQSLQVLENPQLIALFELRFQQYKELID

SEQ ID NO: 83 - DNA, 231 bp, Streptococcus pneumoniae
atgttaaatttacaatttgcagaaacaatggaattgacagaagctgagttgcaagatgttagaggaggcaacctcgtaaattctatgggaggtggtggaagaagtggtatatctggttggggcgtcccaggaatttaccctggttggggcaatcaagggatgagtcctaatcgtggagcttttgattggactatagatttagcagatggattgtttggccgccgtagaaga

SEQ ID NO: 84 - protein, 77 aa, Streptococcus pneumoniae
  hypothetical protein; Cellular location: cytoplasm; Similar to strain R6 sequence 15902185 (3.E-43)
MLNLQFAETMELTEAELQDVRGGNLVNSMGGGGRSGISGWGVPGIYPGWGNQGMSPNRGAFDWTIDLADGLFGRRRR

SEQ ID NO: 85 - DNA, 105 bp, Streptococcus pneumoniae
ttgttagatttgcccacacgaacaataagaaaaaagaaagaaggaaaacacccaggtaagaccaacgaaactggaaacgaccacactctttccaatgttcacttt

SEQ ID NO: 86 - protein, 35 aa, Streptococcus pneumoniae
  hypothetical protein
MLDLPTRTIRKKKEGKHPGKTNETGNDHTLSNVHF

SEQ ID NO: 87 - DNA, 675 bp, Streptococcus pneumoniae
atgaagaaaatgaaagaagtgaaatttcacctagcaactggcttgttgattttgacttattacctcatttttaatgtcacatcagacttagattttatggttgctttgtctgataatatgtactatgtgttccaagttttattggtacttattctgggaactatagctacaattgcttttgtcaaaagtgaacattggaaagagtgtggtcgtttccagtttcgttggtcttacctgggtgttttccttctttcttttttcttattgttcgtgtgggcaaatctaacaacctatatctttcctcgtacccagaatggaagtacagtcgtagaagtagccaccaatttaacaggaattagctattttgttacgcgaatactttatactagtattatcgcacctgtatcagaagaggttgtttgtcgtggtcttttgatgacaagtttatctaaagttaagagatactatcttgatgttcttgtttccgctgccatatttggcgctatgcatgttttgcagtatggttggataacgacagatttcataaagtattttggaatgggcttgatattttgtatgatgtttcgctacacccgatccatctattgggctatagctctgcatgcttcatggaatagtttcttactcattgttactttattggtatttggatat

SEQ ID NO: 88 - protein, 225 aa, Streptococcus pneumoniae
  conserved domain protein; Cellular location: membrane; Similar to strain R6 sequence 15902186 (e-128)
MKKMKEVKFHLATGLLILTYYLIFNVTSDLDFMVALSDNMYYVFQVLLVLILGTIATIAFVKSEHWKECGRFQFRWSYLGVFLLSFFLLFVWANLTTYIFPRTQNGSTVVEVATNLTGISYFVTRILYTSIIAPVSEEVVCRGLLMTSLSKVKRYYLDVLVSAAIFGAMHVLQYGWITTDFIKYFGMGLIFCMMFRYTRSIYWAIALHASWNSFLLIVTLLVFGY

SEQ ID NO: 89 - DNA, 663 bp, Streptococcus pneumoniae
atgaaaaagataatctcacaccgctactttattatagtttttctactagttattgctgaccagaagttcagtgttctagttttacgcagcgaccttgttactgggctatctgactttgcctattatctgtcggatatgatgttgaattttcttgtggttttatttgctcttattgctatgatttggtcggggaaatggcagaaaatcaatagtagaaagtttaaaggatcctatcttttctattccttcctagctctgcttgcttttgttgtttggaatttcgttaccttttttcttttcccacctactcgaaatgaaatttcttatcaacatgctgctccgacttttacaggggctacagcatttttgatgtattttttttatcctgtgattgcaggtcccatttttgaagacatgatttatcgtggattagtgatgactgctctggaaaaaggaaagaaatgggggctagatgtacttggttccgctgttttatttggggtctcgcacattagtaatcacggttgggtcttgacagactttgtcttctatatgggtggaggtcttatatttgcagtcttatttagaatgacaaagtcaatttattggcctattggactgcatatagtctacaatggcattggtcagcttttgatgttactg

SEQ ID NO: 90 - protein, 221 aa, Streptococcus pneumoniae
  hypothetical protein; Cellular location: membrane; Similar to strain R6 sequence 15902187 (e-126)
MKKIISHRYFIIVFLLVIADQKFSVLVLRSDLVTGLSDFAYYLSDMMLNFLVVLFALIAMIWSGKWQKINSRKFKGSYLFYSFLALLAFVVWNFVTFFLFPPTRNEISYQHAAPTFTGATAFLMYFFYPVIAGPIFEDMIYRGLVMTALEKGKKWGLDVLGSAVLFGVSHISNHGWVLTDFVFYMGGGLIFAVLFRMTKSIYWPIGLHIVYNGIGQLLMLL

SEQ ID NO: 91 - DNA, 1224 bp, Streptococcus pneumoniae
atgaaagtatttcttcaaaatagagattttaggcaattaactatcaaccagtggatttcaacgcttggggatacgattttttatctggccttcctgaattatgtggcagatgcatcttttgcccctttggcgattttactcatcacgatttcagaaaccctgccccaagttctacaaatctttctgggagttttggcggattttcaacatcatcgtgtcttgaaatacacagtcattagttttgcaaaatttttgctttactctatagtgtctttatcactttcagggcagtctttctccttgttgctagtagcatttatttgtctgattaacctcttgtctgacacattgagttatttttcaggcgccatgctcactccgattttcattagaattattgggcaagaccatctggcagaagctattggctttaaacagtcaactgttagtttagtgaaaacaatcagtaatatcctaggaggagtcttactaggcattctatccatccagtttatttccttactgaacgctcttacctttttaatcgcatttttaggtatcctcttcataaaaactgacctcttgaaagtagaaaaaacgattagctatcaagaaggactctctgtaaaatccttttgccagcatttgctccaatcatcgaaattgatatggaatatgaataaggtgctcttggttttgtttattatctctactagtcaagcagtgataaatgttacggttcctatttccactctatttttaaggaaccagccctttttgaatttacaaactggtcaatctcttgccttgttagccacactagaattatcagccctgattgtcggaagccttgtaagtggctatctgcaacataccatttccataaaaacagctctctatgcctcacttgtcatccagttgcttcttctagtaggatttgccacagttcgttttgactggattctcatctttagtaccttggatgcctttttcgcaggtgttctctctcctagattgcaagaactcgtttttaaacaaatacctgaggagtcaatgggagcagttcaatcctctatcggtgccattacggttgttttacctagcttatttacaatagctttggtaaccattgctactagctttggaactctggcagttagctttgttttattgctatttcttctagttgcctttgttatgcttctgaatattcgtgaaagtatt

SEQ ID NO: 92 - protein, 408 aa, Streptococcus pneumoniae
  conserved hypothetical protein; Cellular location: membrane; Similar to strain R6 sequence 15902188 (0.E+01)
MKVFLQNRDFRQLTINQWISTLGDTIFYLAFLNYVADASFAPLAILLITISETLPQVLQIFLGVLADFQHHRVLKYTVISFAKFLLYSIVSLSLSGQSFSLLLVAFICLINLLSDTLSYFSGAMLTPIFIRIIGQDHLAEAIGFKQSTVSLVKTISNILGGVLLGILSIQFISLLNALTFLIAFLGILFIKTDLLKVEKTISYQEGLSVKSFCQHLLQSSKLIWNMNKVLLVLFIISTSQAVINVTVPISTLFLRNQPFLNLQTGQSLALLATLELSALIVGSLVSGYLQHTISIKTALYASLVIQLLLLVGFATVRFDWILIFSTLDAFFAGVLSPRLQELVFKQIPEESMGAVQSSIGAITVVLPSLFTIALVTIATSFGTLAVSFVLLLFLLVAFVMLLNIRESI

SEQ ID NO: 93 - DNA, 237 bp, Streptococcus pneumoniae
atgaaaatcaaagagcaaactaggaaactagccgcaggttgctcaaaacactgttttgaggttgcagatagaactgatgaagtcagctcaaaacactgttttgaggttgtggatagaactgacgaagtcagctcaaaacaccgttttgaggttgtggatagaactgacgaagtcagtaaccatacctacggcaaagtgaagctgacgtggtttgaagagagtttcgaagagtacaag

SEQ ID NO: 94 - protein, 79 aa, Streptococcus pneumoniae
  box element
MKIKEQTRKLAAGCSKHCFEVADRTDEVSSKHCFEVVDRTDEVSSKHRFEVVDRTDEVSNHTYGKVKLTWFEESFEEYK

SEQ ID NO: 95 - DNA, 654 bp, Streptococcus pneumoniae
atgccaacggctcttggctatgtcagtatcggcctggcctgtggaattatcggtgcgccctatgtgacacctgttgagatgggcttgatgagtctctttgtttatgctgggagtgcccagtttgccatgttggcactgattgtggttcaagctcctgtggcagctattgctatgacggtttttctaatcaacttgcgtctctttttgttgagtttacacgcatcgacttatttccgtcataccagtctttggtacaatatcggtatgtctagtatcttgacagatgagacctatggcgttttgatgggtgaattggcccatacagacaaggtaaatcctatgtggatgcacggaaacaatcttaacagctatgtggcttggtttgtggggacagtagtcggaacggctctgggtggcctgctaccaaatccagaaatctttggcttggattttgccctggttgggatgtttattggtatttttgcttcgcaatttcagattatgcaaagacggattcctgtccgcaatctgctcattatcctagcagttgttgcggtgtccttctttttgctcttgacagtgatgtctcagtcactagctgttctgtttgcgacgctacttggttgtagcatgggggtggttttagatggtcag

SEQ ID NO: 96 - protein, 218 aa, Streptococcus pneumoniae
  conserved hypothetical protein; Cellular location: membrane; Similar to strain R6 sequence 15902189 (2.E-55)
MPTALGYVSIGLACGIIGAPYVTPVEMGLMSLFVYAGSAQFAMLALIVVQAPVAAIAMTVFLINLRLFLLSLHASTYFRHTSLWYNIGMSSILTDETYGVLMGELAHTDKVNPMWMHGNNLNSYVAWFVGTVVGTALGGLLPNPEIFGLDFALVGMFIGIFASQFQIMQRRIPVRNLLIILAVVAVSFFLLLTVMSQSLAVLFATLLGCSMGVVLDGQ

SEQ ID NO: 97 - DNA, 207 bp, Streptococcus pneumoniae
atggtcagtaagtatcttttattagcagttattttctctggcttggtgacttggattccccgtatgattcccttcatcttggtcaagtataagggcctgcctgcgattgttgagcgttttttgaagtttttgcctgtttccattatctttgccctgattctttcaagcgtagtgacaggtaaggttggcagtcttcctcaaatcaaa

SEQ ID NO: 98 - protein, 69 aa, Streptococcus pneumoniae
  hypothetical protein; Cellular location: membrane; Similar to strain R6 sequence 15902189 (2.E-06)
MVSKYLLLAVIFSGLVTWIPRMIPFILVKYKGLPAIVERFLKFLPVSIIFALILSSVVTGKVGSLPQIK

SEQ ID NO: 99 - DNA, 828 bp, Streptococcus pneumoniae
atgaaaaaaatcgttaaatactcatctcttgcagcccttgctcttgttgctgcaggtgtgcttgcggcttgctcagggggtgctaagaaagaaggagaagcagctagcaagaaagaaatcatcgttgcaaccaatggatcaccaaagccatttatctatgaagaaaatggcgaattgactggttacgagattgaagtcgttcgcgctatctttaaagattctgacaaatatgatgtcaagtttgaaaagacagaatggtcaggtgtctttgctggtcttgacgctgatcgttacaatatggctgtcaacaatcttagctacactaaagaacgtgcggagaaatacctctatgccgcaccaattgcccaaaatcctaatgtccttgtcgtgaagaaagatgactctagtatcaagtctctcgatgatatcggtggaaaatcgacggaagtcgttcaagccactacatcagctaagcagttagaagcatacaatgctgaacacacggacaacccaactatccttaactatactaaggcagacttgcaacaaatcatggtacgtttgagcgatggacaatttgactataagatttttgataaaatcggtgttgaaacagtgatcaagaaccaaggtttggacaacttgaaagttatcgaacttccaagcgaccaacaaccgtacgtttacccacttcttgctcagggtcaagatgagttgaaatcgtttgtagacaaacgcatcaaagaactttataaagatggaactcttgaaaaattgtctaaacaattcttcggagacacttatctaccggcagaagctgatattaaa

SEQ ID NO: 100 - protein, 276 aa, Streptococcus pneumoniae
  ABC transporter, substrate-binding protein; Cellular location: lipoprotein; Similar to strain R6 sequence 15902190 (e-154)
MKKIVKYSSLAALALVAAGVLAACSGGAKKEGEAASKKEIIVATNGSPKPFIYEENGELTGYEIEVVRAIFKDSDKYDVKFEKTEWSGVFAGLDADRYNMAVNNLSYTKERAEKYLYAAPIAQNPNVLVVKKDDSSIKSLDDIGGKSTEVVQATTSAKQLEAYNAEHTDNPTILNYTKADLQQIMVRLSDGQFDYKIFDKIGVETVIKNQGLDNLKVIELPSDQQPYVYPLLAQGQDELKSFVDKRIKELYKDGTLEKLSKQFFGDTYLPAEADIK

SEQ ID NO: 101 - DNA, 852 bp, Streptococcus pneumoniae
atgaaaatcaaaaaatggcttggtctagcagcccttgctacagtcgcaggtttggctcttgcagcttgcggaaactcagaaaagaaagcagacaatgcaacaactatcaaaatcgcaactgttaaccgtagcggttctgaagaaaaacgttgggacaaaatccaagaattggttaaaaaagacggaattaccttggaatttacagagttcacagactactcacaaccaaacaaagcaactgctgatggcgaagtagatttgaacgctttccaacactataacttcttgaacaactggaacaaagaaaacggaaaagaccttgtagcgattgcagatacttacatctctccaatccgcctttactcaggtttgaatggaagtgccaacaagtacactaaagtagaagacatcccagcaaacggagaaatcgctgtaccgaatgacgctacaaacgaaagccgtgcgctttatttgcttcaatcagctggcttgattaaattggatgtttctggaactgctcttgcaacagttgccaacatcaaagaaaatccaaagaacttgaaaatcactgaattggacgctagccaaacagctcgttcattgtcatcagttgacgctgccgttgtaaacaataccttcgttacagaagcaaaattggactacaagaaatcacttttcaaagaacaagctgatgaaaactcaaaacaatggtacaacatcattgttgcaaaaaaagattgggaaacatcacctaaggctgatgctatcaagaaagtaatcgcagcttaccacacagatgacgtgaaaaaagttatcgaagaatcatcagatggtttggatcaaccagtttgg

SEQ ID NO: 102 - protein, 284 aa, Streptococcus pneumoniae
  lipoprotein; Cellular location: lipoprotein; Similar to strain R6 sequence 15902191 (e-161)
MKIKKWLGLAALATVAGLALAACGNSEKKADNATTIKIATVNRSGSEEKRWDKIQELVKKDGITLEFTEFTDYSQPNKATADGEVDLNAFQHYNFLNNWNKENGKDLVAIADTYISPIRLYSGLNGSANKYTKVEDIPANGEIAVPNDATNESRALYLLQSAGLIKLDVSGTALATVANIKENPKNLKITELDASQTARSLSSVDAAVVNNTFVTEAKLDYKKSLFKEQADENSKQWYNIIVAKKDWETSPKADAIKKVIAAYHTDDVKKVIEESSDGLDQPVW

SEQ ID NO: 103 - DNA, 1371 bp, Streptococcus pneumoniae
atggtttttcctagcgaacaagaacagattgaaaaatttgaaaaggatcatgtagcccagcattattttgaggttttgcgtaccttgatttctaagaaatcagtctttgcccagcaggttggactcaaggaagtcgcaaattatctgggtgagattttcaagcgtgttggagctgaagtggagattgatgagagctatacagcgccctttgtcatggcacatttcaagagttcgcgtccagatgccaagaccttgattttctataaccactatgacactgtgccagcggatggggatcaggtctggacagaggatccttttacgctttcggtccgcaatggcttcatgtatgggcgtggggttgatgacgacaagggtcatatcacagctcgcttgagtgctttgagaaaatatatgcagcaccatgatgatttacctgtcaatatcagctttatcatggagggagcggaggaatcggcttcaacagacctagataagtatttggaaaagcatgcagacaaactccgtggggcggatttgttggtctgggaacaagggaccaaaaatgccttggaacagctggaaatttctggtggcaataaggggattgtgacctttgatgccaaggtaaaaagcgctgatgtggatatccactcgagttatggtggtgttgtggaatcagctccttggtatctcctccaagccttacagtctcttcgtgctgcggatggccgtatcttggttgaaggcttgtacgaagaagtacaagagcccaatgaacgagaaatggccttgctagaaacttatggtcaacgaaacccagaggaagttagtcggatttatggattggagttgcctctcttacaggaggagcggatggcctttctaaaacgtttctttttcgatccagcgcttaatatcgaaggaatccagtctggttatcaaggtcagggtgttaagactattttacctgcagaagccagtgccaagctagaggttcgtctggttccgggcctagaaccgcatgatgttctggaaaaaattcggaaacagctagacaaaaatggctttgataaggtagaattatactataccttgggagagatgagctatcgaagcgatatgagcgcaccagccattctcaatgtgatcgagttggccaagaaattctatccacagggcgtttcagtcttgccgacgacagcggggacaggacctatgcatacggtctttgatgccctagaggtaccaatggttgcattcggtctaggaaatgccaatagccgagaccacggtggagatgaaaatgtgcgaatcgctgattattacacccatatcgaattagtagaggagctgattagaagctatgag

SEQ ID NO: 104 - protein, 457 aa, Streptococcus pneumoniae
  peptidase, M20/M25/M40 family; Cellular location: cytoplasm; Similar to strain R6 sequence 15902192 (0.E+01)
MVFPSEQEQIEKFEKDHVAQHYFEVLRTLISKKSVFAQQVGLKEVANYLGEIFKRVGAEVEIDESYTAPFVMAHFKSSRPDAKTLIFYNHYDTVPADGDQVWTEDPFTLSVRNGFMYGRGVDDDKGHITARLSALRKYMQHHDDLPVNISFIMEGAEESASTDLDKYLEKHADKLRGADLLVWEQGTKNALEQLEISGGNKGIVTFDAKVKSADVDIHSSYGGVVESAPWYLLQALQSLRAADGRILVEGLYEEVQEPNEREMALLETYGQRNPEEVSRIYGLELPLLQEERMAFLKRFFFDPALNIEGIQSGYQGQGVKTILPAEASAKLEVRLVPGLEPHDVLEKIRKQLDKNGFDKVELYYTLGEMSYRSDMSAPAILNVIELAKKFYPQGVSVLPTTAGTGPMHTVFDALEVPMVAFGLGNANSRDHGGDENVRIADYYTHIELVEELIRSYE

SEQ ID NO: 105 - DNA, 1059 bp, Streptococcus pneumoniae
atgagtagagatattatcaagttagatcagatcgatgtgacttttcaccaaaagaagagaaccatcacagcggttaaggatgtgaccattcacatccaagaaggggatatctacggaatcgttggatattctggagcaggaaaatcaacccttgtacgggtgattaatctcttgcaaaaaccatctgcagggaaaattaccattgacgacgatgtgatttttgacggcaaggtgaccttgacggcagagcagttgcgtcgtaaacgtcaagatatcggaatgattttccagcattttaacctgatgagccaaaagacagcagaggagaatgtagcctttgcccttaaacactctgaactcagcaaggaagaaaagaaggctaaagtagctaagttgttggacttggttggtttggcagatcgtgctgaaaactacccttcacaactatctggagggcaaaaacagcgtgtggcaattgcgcgtgccttggccaatgatccaaaaatcttgatttcagacgagtcaacttctgcccttgatccgaagacaaccaagcagattttggccttgttgcaagatttgaaccaaaaattaggcttgactgttgtcttgattacgcatgaaatgcagattgtcaaagacattgccaaccgtgttgcagttatgcaggatgggcatttgattgaagagggtagtgtgcttgaaatcttctcaaaccctaaacaacctttgactcaagactttatctcaacagctacaggtattgacgaagccatggtcaaaatcgagaagcaagaaatcgtggaacacttgtctgaaaacagtctcttggtgcaactcaagtacgctggagcttcaacagacgagccacttttgaatgaattgtacaagcattaccaagtaatggctaatattctctatgggaatatcgaaattctcgatggtactcctgttggagaattggtggtggttttgtcaggtgaaaaagcagcgttggcaggtgcccaagaagccattcgtcaagcaggtgtacaactaaaagtattgaagggagtacag

SEQ ID NO: 106 - protein, 353 aa, Streptococcus pneumoniae
  ABC transporter, ATP-binding protein; Cellular location: cytoplasm; Similar to strain R6 sequence 15902193 (0.E+01)
MSRDIIKLDQIDVTFHQKKRTITAVKDVTIHIQEGDIYGIVGYSGAGKSTLVRVINLLQKPSAGKITIDDDVIFDGKVTLTAEQLRRKRQDIGMIFQHFNLMSQKTAEENVAFALKHSELSKEEKKAKVAKLLDLVGLADRAENYPSQLSGGQKQRVAIARALANDPKILISDESTSALDPKTTKQILALLQDLNQKLGLTVVLITHEMQIVKDIANRVAVMQDGHLIEEGSVLEIFSNPKQPLTQDFISTATGIDEAMVKIEKQEIVEHLSENSLLVQLKYAGASTDEPLLNELYKHYQVMANILYGNIEILDGTPVGELVVVLSGEKAALAGAQEAIRQAGVQLKVLKGVQ

SEQ ID NO: 107 - DNA, 690 bp, Streptococcus pneumoniae
atggaatcattgattcaaacctatttaccaaatgtctataagatgggttgggctggtcaggcaggctggggaacggctatctacttaactctttatatgacagttctttccttcattatcggaggcttcttggggctagtggcaggtctctttctcgtcttgacagcgccaggtggtgtcttggagaataaagtcgtattctggattttagacaaaattacctcaatttttcgtgcggttccctttatcatcctcttggcaatcttgtcaccactttctcacttgattgttaaaacaagtatcgggccaaatgcagcccttgtcccactttcttttgcagtctttgccttctttgcccgtcaggtgcaggttgtcttggctgaattggatggcggtgtcattgaggcggctcaagcgagcggagcgactttctgggacatcgtgggtgtttacctatcagaaggtcttccagatttgatccgtgtgacgactgtgaccttgatttcccttgttggggaaacagctatggccggtgcggttggagctggtggtatcggtaacgtagccatcgcttatggatttaaccgctacaatcacgatgtgaccatcttggcaaccattattatcattttgattatctttgcaatccaattcttgggagatttcttgactaagaaattgagccataaa

SEQ ID NO: 108 - protein, 230 aa, Streptococcus pneumoniae
  ABC transporter, permease protein, putative; Cellular location: membrane; Similar to strain R6 sequence 15902194 (e-127)
MESLIQTYLPNVYKMGWAGQAGWGTAIYLTLYMTVLSFIIGGFLGLVAGLFLVLTAPGGVLENKVVFWILDKITSIFRAVPFIILLAILSPLSHLIVKTSIGPNAALVPLSFAVFAFFARQVQVVLAELDGGVIEAAQASGATFWDIVGVYLSEGLPDLIRVTTVTLISLVGETAMAGAVGAGGIGNVAIAYGFNRYNHDVTILATIIIILIIFAIQFLGDFLTKKLSHK

SEQ ID NO: 109 - DNA, 567 bp, Streptococcus pneumoniae
atgaagaaatctatcttaactacactgctttttgcagttctttacttcctctgcatggggattggtgtccttttgggcaatctctttgaccaaactggaaacatgttttatgcgcctgcctttactgcccttgtcggcggtagcgtctatatgatcctagtcgcaaaagttccgcgctttggagccattaccactatcggccttgtcattgccctctttttcttgggaactaaacacggtgctggttccttccttcctggaattatctgtggcctcctagcagatggagtagctcatttaggaaaatacaaggacaaaacaaagaacttcctttctttcattattttcgcctttagtacaacaggaccaatcttgcttatgtggattgcgcccaaagcctatatggctactcttctggcaagaggaaaatcccaagaatatatcgaccgtatcatggtcgctccaaaccctggaactgtccttctatttatcgcaagtattgtcatcggagccctagtgggtgccttgattggacaagccttgagtaaaaaatttgcccagaaaatc

SEQ ID NO: 110 - protein, 189 aa, Streptococcus pneumoniae
  hypothetical protein; Cellular location: membrane; Similar to strain R6 sequence 15902195 (e-104)
MKKSILTTLLFAVLYFLCMGIGVLLGNLFDQTGNMFYAPAFTALVGGSVYMILVAKVPRFGAITTIGLVIALFFLGTKHGAGSFLPGIICGLLADGVAHLGKYKDKTKNFLSFIIFAFSTTGPILLMWIAPKAYMATLLARGKSQEYIDRIMVAPNPGTVLLFIASIVIGALVGALIGQALSKKFAQKI

SEQ ID NO: 111 - DNA, 612 bp, Streptococcus pneumoniae
atgggtagatttttagactttgtctttaatcgtttctttttagggatgattgcgacagccttcttttggctattaactttagcaggagggattatccttggtctagcgccggctagtgccaccttgatgagcttatatgcagaacatggttatagctttcgggaatacagtttgaaggaggcttggtctctttacaagcaaaattttgtctcaagcaacctgattttctatagctttttaggtgtgggtctagttttgacctatggtttgtatctcttggtgcaattgcctcatcagaccattgttcatttgattgcgacccttttgaatgtcctagtagttgccctgatctttttggcttatacagtatctttaaaattacaagtttattttgccttgtcctatcgaaatagtctcaaattatccttgattggcatctttatgagtctagcagctgtggctaaggttctccttgggactgtgctacttgtagcaattggttattatatgcctgccctgctattttttgtaggaattgggatgtggcatttctttatcagtgatatgttggaacctgtctatgaaatcatccatgaaaaattggcgacaaaa

SEQ ID NO: 112 - protein, 204 aa, Streptococcus pneumoniae
  hypothetical protein; Cellular location: membrane; Similar to strain R6 sequence 15902196 (e-113)
MGRFLDFVFNRFFLGMIATAFFWLLTLAGGIILGLAPASATLMSLYAEHGYSFREYSLKEAWSLYKQNFVSSNLIFYSFLGVGLVLTYGLYLLVQLPHQTIVHLIATLLNVLVVALIFLAYTVSLKLQVYFALSYRNSLKLSLIGIFMSLAAVAKVLLGTVLLVAIGYYMPALLFFVGIGMWHFFISDMLEPVYEIIHEKLATK

SEQ ID NO: 113 - DNA, 1701 bp, Streptococcus pneumoniae
gtgatatgttggaacctgtctatgaaatcatccatgaaaaattggcgacaaaatagaatgaagcagttttggctacatacgcttctaagaacctatagttcagtgatgatcattatcattgcgagttttgcaatcttactctcttacgctgactgggattcacgtgaaaaggaagcccagagagtagcccagcgtgtaactgctagaacagtgagtgaaattgaatattaccatagagagtcaacccagatagctcaggctttagttgaaaatcaagctcgtatcgagggaatctataaatactttagccttagcatgccagactatttttactggcaattagagcggaaagcttcgccttatatatcagtctctctgtatgaaaatgttgatgacctctatgttcgaaatgattttgtaactggggtggccattgcttttcaagattacaaggaagtctatgtttctactaaagacaaacgtagtggagaaaaaatcagggctgaggatttcaaaccagcaggaaatagttttgccattccagtgtcagatccagtgtcagatcaagacttaggagtgatttacatctccttggatcctgctgttttataccatgccattgataatactagaggtcatactccgatggcagtaacagtgacctcaccttttgatacggagatttttcatatgggtgagacagttgataaggagagtgaaaattggctagttggcttaacttctcatggatatcaggttcaggtggcagttcctaaaaactttgttttacaaggaacagtgactagctctgctttgattgtgggtttgagccttctctttattgtcattctttatctgactttgaggcagacttttgctaattaccaaaagcaggtagtggatttagtagaatccattcaagtcattgctcaaggcgaagaggggcgtcggattgacatttccgagaaagatcaggaattactcctaatcgcggagacgaccaatgatatgttggatcgattggaaaagaatatccatgatatttaccagttagagcttagtcaaaaagatgccaatatgcgagccttgcaggcgcaaatcaatcctcattttatgtataatacgctggagttcttgcgcatgtatgcagttatgcagagtcaagatgagttggcagatatcatttatgaattcagtagtctcttgcgtaacaatatttccgacgaaagagagaccctcctcaaacaggaattagaattttgccgtaaatacagctatctctgcatggttcgctatcccaagtccattgcctatggtttcaagatagatccagagttagagaatatgaagattcccaagtttaccttgcaaccgctggtagaaaactatttcgcgcatggtgttgaccacaggcggacagataatgtgattagcatcaaggctcttaaacaggatggttttgtggaaattttggtggtcgataatggtagaggaatgtcggctgaaaagttggcaaatatccgagaaaaattaagtcagagatattttgaacaccaagccagctacagtgatcaaaggcagtctatcgggattgtcaatgtacacgagcgttttgtgctctattttggagaccgctatgccattactatagagtctgcagagcaagccggtgttcagtatcgtattacaattcaagatgag

SEQ ID NO: 114 - protein, 567 aa, Streptococcus pneumoniae
  sensor histidine kinase, putative; Cellular location: membrane; Similar to strain R6 sequence 15902197 (e-130)
MICWNLSMKSSMKNWRQNRMKQFWLHTLLRTYSSVMIIIIASFAILLSYADWDSREKEAQRVAQRVTARTVSEIEYYHRESTQIAQALVENQARIEGIYKYFSLSMPDYFYWQLERKASPYISVSLYENVDDLYVRNDFVTGVAIAFQDYKEVYVSTKDKRSGEKIRAEDFKPAGNSFAIPVSDPVSDQDLGVIYISLDPAVLYHAIDNTRGHTPMAVTVTSPFDTEIFHMGETVDKESENWLVGLTSHGYQVQVAVPKNFVLQGTVTSSALIVGLSLLFIVILYLTLRQTFANYQKQVVDLVESIQVIAQGEEGRRIDISEKDQELLLIAETTNDMLDRLEKNIHDIYQLELSQKDANMRALQAQINPHFMYNTLEFLRMYAVMQSQDELADIIYEFSSLLRNNISDERETLLKQELEFCRKYSYLCMVRYPKSIAYGFKIDPELENMKIPKFTLQPLVENYFAHGVDHRRTDNVISIKALKQDGFVEILVVDNGRGMSAEKLANIREKLSQRYFEHQASYSDQRQSIGIVNVHERFVLYFGDRYAITIESAEQAGVQYRITIQDE

SEQ ID NO: 115 - DNA, 1284 bp, Streptococcus pneumoniae
atgtataaagtattattagtagatgatgagtacatggtgacagaaggtctgaagcgtttgattccctttgataagtgggatatggaggtcgtcgcaacagccagtcatgccgatgaagctctagaatatgttcaggaaaatcctgtcgatgtcatcatttccgatgtcaatatgccagacaaaacagggcttgatatgattcgggagatgaaagagatcttaccagatgctgcctatatcctgctctcaggttatcaggagtttgattatgtaaaaagagcaatgaaccttagtgtggtggactatttggtcaagcctgttgataaggtagagctgggaaatctgctggagaagattgcaggtcagctcggcgagagagggaagaaaagtcagactcttagtcaagaattagacgaggctggatttgttagttatttaggggataaggagaattggtggataggtctatccaaggaaaaacaaggttccttcaccattccctactatgtcttgggtcaagactggcagattttcatttctggccaccccctagatggtttagtcgttacaccttttgaagctccttatcaagaacactttgaacgctggaagctgaatgctgagaaaaccctcttttacggttctgtaaatctgcagcagtctgagagtctctttgcctattacgaaccgatttatagggttatcattcagggaaatctcaatcaaatcgtagaagagttaaatctcttggagaaggtagttcttgaaaatacacctcgtgtttcgattactaaacagctttttatccagtttgtcatggatgttttccatttatttgaacatctcaaagctgatgatatgacggacattgtcaaaaccattcatgctattcaatccttcgatgaattggtttcttatatcaaggaaactctgatcagctttttcggtcaataccgtatgaatgaaaatgtggtcagtgtgctggaagtcattggtcgtgattaccaaaaagagctttccctcaaggatatcagtaaggccctctttatcaatcctgtctatctagggcagttgattaagcgtgaaaccgattcgacctttgcagagttactaaacaaacaacgtattaaggctgcccagcagctcttgctttcaactagtgacagtatcgaagatatttgttatgctgttggttacagtaaccttggatatttctataaagttttccgaaaattgtgcggaaaatcgccaaaagcctaccgaaaacaggtagaaactatacta

SEQ ID NO: 116 - protein, 428 aa, Streptococcus pneumoniae
  DNA-binding response regulator; Cellular location: cytoplasm; Similar to strain R6 sequence 15902198 (0.E+01)
MYKVLLVDDEYMVTEGLKRLIPFDKWDMEVVATASHADEALEYVQENPVDVIISDVNMPDKTGLDMIREMKEILPDAAYILLSGYQEFDYVKRAMNLSVVDYLVKPVDKVELGNLLEKIAGQLGERGKKSQTLSQELDEAGFVSYLGDKENWWIGLSKEKQGSFTIPYYVLGQDWQIFISGHPLDGLVVTPFEAPYQEHFERWKLNAEKTLFYGSVNLQQSESLFAYYEPIYRVIIQGNLNQIVEELNLLEKVVLENTPRVSITKQLFIQFVMDVFHLFEHLKADDMTDIVKTIHAIQSFDELVSYIKETLISFFGQYRMNENVVSVLEVIGRDYQKELSLKDISKALFINPVYLGQLIKRETDSTFAELLNKQRIKAAQQLLLSTSDSIEDICYAVGYSNLGYFYKVFRKLCGKSPKAYRKQVETIL

SEQ ID NO: 117 - DNA, 579 bp, Streptococcus pneumoniae
ttgtattcctttacaaaaggtgctataatattatcaggaggtcctatcatgaaaaagaaaccaatttatctatgggttttgctaatcttgtctgcccttatttcagttccgtctctgtttggaattgtgagtcccttgcctagtaaagaagcccttcgtgctgctcagaaacaagttgcaggggtcaatgctcagcaattagaagaccagcttaattatacctatagagtagcagaagcatctcattctatttttaatgttgctttgattgtgctatctactattttagtggtcgtagcgattgtcttccttgttcgtaaaaatttgcaatatgcaaactatacttacgttggctatgttttgttagctattattggttcgatttatggctatgttggtttacaagacgctgtgcagttggttcaagatgagagcatgcgtttgacagtgagtattggttcaaaagctgttagcattttctatatcgtcatcaatgttctcttcctagcccttgtcttctataagatgtggcgacaacagaaagccttggcagaagaagaggaaacagaagagcttacc

SEQ ID NO: 118 - protein, 193 aa, Streptococcus pneumoniae
  hypothetical protein; Cellular location: membrane; Similar to strain R6 sequence 15902199 (e-102)
MYSFTKGAIILSGGPIMKKKPIYLWVLLILSALISVPSLFGIVSPLPSKEALRAAQKQVAGVNAQQLEDQLNYTYRVAEASHSIFNVALIVLSTILVVVAIVFLVRKNLQYANYTYVGYVLLAIIGSIYGYVGLQDAVQLVQDESMRLTVSIGSKAVSIFYIVINVLFLALVFYKMWRQQKALAEEEETEELT

SEQ ID NO: 119 - DNA, 600 bp, Streptococcus pneumoniae
gtggcgacaacagaaagccttggcagaagaagaggaaacagaagagcttacctaagtattgacaaaaaagaactatcaagatacaatcttggtagttgttttttgattatagataaaatcatggaggtacatatgaagacaatttctttagtttatattagtttgagtggcaacactgaaagttttgtgacgcgcttgaaagactatctcttgtcccagtacaaagggattgaggttcaaaagattcatatcaaggatttggtcaaggaaggcaaaaatttctatgaaatggaccatccctatgtcgcttttttgccgacctatctcgaaggtgggaatggcgtggataacggagatgttgagattttgacgacaccggtgggagattttattgcctatggtaacaatgctagtaagtgttttggtgtggttgggtcaggaaatcgtaactttaataaccaatactgcctaacagccaagcaatacagtcaacgctttggcttccctgtattggctgactttgaaatgcgaggcatgctggaagatatcaaacatgtcgcagctattatcgcagatttgtatgagttggaaaaggagaat

SEQ ID NO: 120 - protein, 200 aa, Streptococcus pneumoniae
  NrdI family protein; Cellular location: cytoplasm; Similar to strain R6 sequence 15902200 (5.E-88)
MATTESLGRRRGNRRAYLSIDKKELSRYNLGSCFLIIDKIMEVHMKTISLVYISLSGNTESFVTRLKDYLLSQYKGIEVQKIHIKDLVKEGKNFYEMDHPYVAFLPTYLEGGNGVDNGDVEILTTPVGDFIAYGNNASKCFGVVGSGNRNFNNQYCLTAKQYSQRFGFPVLADFEMRGMLEDIKHVAAIIADLYELEKEN

SEQ ID NO: 121 - DNA, 1260 bp, Streptococcus pneumoniae
atgtcgcaagctatttccttaaatcaatcaacctgggcaagcaagctaaaagcaatgggacctggaatcctaatggcaactgccgctgttggaggttcccacattgtatcctcaactcaagctggcggttcttacggttggtctctacttctcttggtcatcttagccaatgtctttaaatatccatttttccgttttggtgctgaatacacagctgatactggaaagactttggttgaaggttatgccgaaaaaggaaaactctatctctggattttctttatcctcaatgtcttttcggctatggtcaacacggctggtgttgccattctgtgctcagctatcatcgccagtgccttcccaatgattggacttagcattactcagtggtccctcattctcgttgcaatcatttgggctatgctactctttggaggctacaaacttttagacggcatggtcaaatggattatgtctgccttaaccattgcgactgttcttgcagttatcattgcggcggtcaagcatccagaatacagttctgattttgtcgagaagacaccttggcaaatggcagctctgcccttcatcgtctccctcctaggatggatgccggctcctattgaaatttcagccatcaattcactttggtcagctgaaaagagaaagaccgtcaactttaacacagaagacgctctgtttgactttaacactggttatattggaacagctatcctagccgtcttctttgtggcactgggagcactgattcagtatcctacagggcaggcggttgaagctgcttcagccaaatacatctctcaattcgtgggcatgtatgcctctgttcttggcgaatggtcccgttacttgattacctttattgccttcctctgtatctttggaacagttataactgttatcgatggctattctcgcgttaatcaggaatctctccgactgctaatcagtcaaaaagaggacaatcgtaaatctttgaacatctggatgaccatcactgctatcatcggtatcgtcattatcaagttcttcgctggtcaggtttcaaccatgctccgctttgccatgattggctctttcctgacaacacctttctttgctcttttgaattacgccttggtaacgcgtgaaaacaaaaatcttccttcttggctcaaacaccttgccattgcgggattgattttcctctttggcttcgccatcttctttatctacgcactcgcaatcggaaaagcaggg

SEQ ID NO: 122 - protein, 420 aa, Streptococcus pneumoniae
  conserved hypothetical protein; Cellular location: membrane; Similar to strain R6 sequence 15902201 (0.E+01)
MSQAISLNQSTWASKLKAMGPGILMATAAVGGSHIVSSTQAGGSYGWSLLLLVILANVFKYPFFRFGAEYTADTGKTLVEGYAEKGKLYLWIFFILNVFSAMVNTAGVAILCSAIIASAFPMIGLSITQWSLILVAIIWAMLLFGGYKLLDGMVKWIMSALTIATVLAVIIAAVKHPEYSSDFVEKTPWQMAALPFIVSLLGWMPAPIEISAINSLWSAEKRKTVNFNTEDALFDFNTGYIGTAILAVFFVALGALIQYPTGQAVEAASAKYISQFVGMYASVLGEWSRYLITFIAFLCIFGTVITVIDGYSRVNQESLRLLISQKEDNRKSLNIWMTITAIIGIVIIKFFAGQVSTMLRFAMIGSFLTTPFFALLNYALVTRENKNLPSWLKHLAIAGLIFLFGFAIFFIYALAIGKAG

SEQ ID NO: 123 - DNA, 147 bp, Streptococcus pneumoniae
atgctccaagagttgattgatgtgatctacttttttagcctctcttttatagagaatagcccagatgatgagatagacaatcgcaaactcgataatgagctggaggtagaaaatccagtggaaagggaaccaaccagcaagagttgc

SEQ ID NO: 124 - protein, 49 aa, Streptococcus pneumoniae
  hypothetical protein
MLQELIDVIYFFSLSFIENSPDDEIDNRKLDNELEVENPVEREPTSKSC

SEQ ID NO: 125 - DNA, 456 bp, Streptococcus pneumoniae
atgaaaaaacaagtatttcacgatgcagctaccggtgttcttatcggcctcatcctctctatcctcttttcactcatttatgcaccaaatacctacgcaccactaaatccctactctctcataggccaagtgatggatcagcatcaggttcacggtgccctggtcttgctctactgcacacttatctgggcaaccatcggtatgctcttcaactttggcaaccgcttatttagccgtgactggagcatgcttcgtgccactctgactcatttcttccttatgctggctggctttgtcccactagcaactcttgctggttggttccctttccactggattttctacctccagctcattatcgagtttgcgattgtctatctcatcatctgggctattctctataaaagagaggctaaaaaagtagatcacatcaatcaactcttggagcatagaaaa

SEQ ID NO: 126 - protein, 152 aa, Streptococcus pneumoniae
  conserved domain protein; Cellular location: membrane; Similar to strain R6 sequence 15902202 (4.E-86)
MKKQVFHDAATGVLIGLILSILFSLIYAPNTYAPLNPYSLIGQVMDQHQVHGALVLLYCTLIWATIGMLFNFGNRLFSRDWSMLRATLTHFFLMLAGFVPLATLAGWFPFHWIFYLQLIIEFAIVYLIIWAILYKREAKKVDHINQLLEHRK

SEQ ID NO: 127 - DNA, 438 bp, Streptococcus pneumoniae
atgaaagtagaactacagattagtgagacttacgaggaggaaaagctgattgtccaagcacctcaagaaaccgaaaaagtccagaaagtcatcgagttcgcagaaaatctggaccaaagagaaaaaatcaaaggaaaaatcgatgatcaggtctatctagttgagattggcaagattcagcgcttctatatcgagaatcggaaggttctagcagaaaccgcgagtcagacctacagcattgatttgcgactctatcaggttcttaaactcttgccaaccaattttatccaaatttcccaatcagaaatcatcaatatcgattccatctctcacctcaagctcacgccaaacggtctggtagaaattttcttgaaaaacgaaagcttcacctactcttcacgccgttatctaaaaaccatcaaggagaaattagaacta

SEQ ID NO: 128 - protein, 146 aa, Streptococcus pneumoniae
  conserved domain protein; Cellular location: cytoplasm; Similar to strain R6 sequence 15902203 (8.E-76)
MKVELQISETYEEEKLIVQAPQETEKVQKVIEFAENLDQREKIKGKIDDQVYLVEIGKIQRFYIENRKVLAETASQTYSIDLRLYQVLKLLPTNFIQISQSEIINIDSISHLKLTPNGLVEIFLKNESFTYSSRRYLKTIKEKLEL

SEQ ID NO: 129 - DNA, 93 bp, Streptococcus pneumoniae
ttgtctatgtggagggattgggctcctatgtggtggagcttttctgttctttctgaaatatggtataatagcactaatcaatttctaggaaaa

SEQ ID NO: 130 - protein, 31 aa, Streptococcus pneumoniae
  hypothetical protein; Cellular location: cytoplasm
MSMWRDWAPMWWSFSVLSEIWYNSTNQFLGK

SEQ ID NO: 131 - DNA, 864 bp, Streptococcus pneumoniae
gtgggcacactattagcaacaagattaaaaaatagacggaaagaattaaaaatgtctcagcgagaactagctgaaggtatctgtaaacaggggcaaatcagtcgattagagagcggagagtttacccctggagcggatttcctgaatgcccttgctaagaagttaaaagtcagtatggattatttttttgatgagcaggttgtagagaaagttgaggagttatcagaatttaagaaattagcacagacatttattacaaatcgcaattatgagtctttgaaatatatatatgaattggagaatgtaaaagctcaccgcctatctttagcagataaaatctacatggaatggataaaatctctgatagatttttatttttacggacagaaagaagatgcgattgtacgattagagggggtattatcacagttaagtgtatctgatttgaactatctccaagtttcaaacaccctattcaatttttattatgatattggagatttaggtcgtttcaataaaattcgtgaaaaactagagtatcaagtaaatcacctcaatttgagtacaatcgaagagttagaactatctattaagtttaactacaacgtttgtcgttatctatggttacagaaaaatattgaagaagctattactaaaattacagctactataaaacaatgtaaggcttacagaacgaattatcttttggctgatttgtacttattgatgggaaatgtaagtgaaaatttttcttctaaaagttcggtgaaagaatattttgagacggcatattttctatacaaacttgaggagaacatgtcaatgactctgaaagttgagcattacattgcagatataacagaa

SEQ ID NO: 132 - protein, 288 aa, Streptococcus pneumoniae
  transcriptional regulator PlcR, putative; Cellular location: cytoplasm; Similar to strain R6 sequence 15903805 (2.E-55)
MGTLLATRLKNRRKELKMSQRELAEGICKQGQISRLESGEFTPGADFLNALAKKLKVSMDYFFDEQVVEKVEELSEFKKLAQTFITNRNYESLKYIYELENVKAHRLSLADKIYMEWIKSLIDFYFYGQKEDAIVRLEGVLSQLSVSDLNYLQVSNTLFNFYYDIGDLGRFNKIREKLEYQVNHLNLSTIEELELSIKFNYNVCRYLWLQKNIEEAITKITATIKQCKAYRTNYLLADLYLLMGNVSENFSSKSSVKEYFETAYFLYKLEENMSMTLKVEHYIADITE

SEQ ID NO: 133 - DNA, 126 bp, Streptococcus pneumoniae
atgagaagtttgtttaagaaaatagttgctgtattagttattggcttaattctgttaggaattgcgagaacacctcaagttcataagatggctagagggattgatcctggtcctgcgaattttatt

SEQ ID NO: 134 - protein, 42 aa, Streptococcus pneumoniae
  hypothetical protein; Cellular location: outside
MRSLFKKIVAVLVIGLILLGIARTPQVHKMARGIDPGPANFI

SEQ ID NO: 135 - DNA, 555 bp, Streptococcus pneumoniae
atggataagaaaaatttacttgtattggttactggttcggtaggtgccagtaatgtagatacatacttatattacataaaaaaattctataatgttaaagtgatactttctgaaaattctaaaaaatttataagtaaggaattaattagttatttttgtgataaagtttatgatgaaatatttgttgaagaggtagttccgcacgtttttctgccatatgaatctgacttacttcttattttaccagctacggcaaatgtgattggcaaaattgctaatggtattgctgatgatttagttacagcaactgttttaaactttaataaaaaaataattttttgtcccaatatgaactctactatgtgggacaatcacatagttcaaagaaatgtatcaattctaaaggagttgggacatatatttttatttgagtctaaaaaaacatatgaggtaggattgcgtaaagcaatagattcaacatgttcaatgttacaaccacagtcgttagtaaaagaacttatcaaattagaaaatattgtccttgaagagggacat

SEQ ID NO: 136 - protein, 185 aa, Streptococcus pneumoniae
  flavoprotein; Cellular location: outside; Similar to strain R6 sequence 15903154 (1.E-14)
MDKKNLLVLVTGSVGASNVDTYLYYIKKFYNVKVILSENSKKFISKELISYFCDKVYDEIFVEEVVPHVFLPYESDLLLILPATANVIGKIANGIADDLVTATVLNFNKKIIFCPNMNSTMWDNHIVQRNVSILKELGHIFLFESKKTYEVGLRKAIDSTCSMLQPQSLVKELIKLENIVLEEGH

SEQ ID NO: 137 - DNA, 1104 bp, Streptococcus pneumoniae
atgattaataaaaaaatacaacaagttgttttggaatcattacagaattttttgaatgggaacttcatttcgccttgtgtagtctatgattttggcttgctggaaactgtacttgatgaatttaaaaatcaaattcctgtaacattcaattaccaacttttttatgccgttaaagcaaattcaaatgagaagatacttgaattcttagtagataaaattgatggagttgatgtggcgtcattatctgaattagatgtggctaaaaaatttttcccaccaactcaaatttctgttaatggtcccgcattttcttatgaaactttatataatctgattaaaaaacaatataaagttgatattaactttttggaacatcttcaacaattttccccaaaagaatctgttggaataagagtaacggagccagatgaacttaataatcgtatgagtcgatttggaataaatatttgcagtgataattggactagtaatttacaaaatcctttaattacacgactgcattttcattttggagaaaaagatgataaatttattgttaagttagataaaatattatttaagttacaagaaattaataaacttagagaggttagagaaataaatcttggaggcggttttatgaaattatttatggaaaatcgtttgaaagaattttttctatcacttatggaaatctataaaaagtacgatattgatagtactgtgactacaataatagaaccaggtagtgcaattacttcattttctgcctatatgattactagcccagttaatgttagtgaggtgaatgagcagcaggttatcacgttagacacatcaatatacaccaatacattatggtttgttccgcatattattacaacgttaaattcaagtagtaaagagcgttatagtactattctctatggtaatacctgttatgaacatgacaagtataaaatgaaagtttcgcttccaaggttaactcaaaatagcagtatagtgttttttcctgtaggagcttatataaaaagcaatcattcaaatttacatcgtaatgattttatgcgggaggtatatttgtggacaaaaaacttgacatat

SEQ ID NO: 138 - protein, 368 aa, Streptococcus pneumoniae
  pyridoxal-dependent decarboxylase, Orn/Lys/Arg family; Cellular location: cytoplasm
MINKKIQQVVLESLQNFLNGNFISPCVVYDFGLLETVLDEFKNQIPVTFNYQLFYAVKANSNEKILEFLVDKIDGVDVASLSELDVAKKFFPPTQISVNGPAFSYETLYNLIKKQYKVDINFLEHLQQFSPKESVGIRVTEPDELNNRMSRFGINICSDNWTSNLQNPLITRLHFHFGEKDDKFIVKLDKILFKLQEINKLREVREINLGGGFMKLFMENRLKEFFLSLMEIYKKYDIDSTVTTIIEPGSAITSFSAYMITSPVNVSEVNEQQVITLDTSIYTNTLWFVPHIITTLNSSSKERYSTILYGNTCYEHDKYKMKVSLPRLTQNSSIVFFPVGAYIKSNHSNLHRNDFMREVYLWTKNLTY

SEQ ID NO: 139 - DNA, 1389 bp, Streptococcus pneumoniae
gtggacaaaaaacttgacatattagataaagttaaggaatatttaggaaataaaactactcaaattctggataatcaatataaagaatttttgaaacttaatgatataaggcgagcgtttggtatttcagaaaaagtattaaacaattcttttaattttacgagtaaagaatttaatgatttaattaataacgaaaattatttattcgaatatgcatgtagaattagagaggaatggagaaaaaaatgctttaatcattcttatcgttttctatgctcacctataattacagatgattttcttaacacgaagacattgagaagtagccaaattgaatataaatatgagcgatatttatcgaaaagttcgataggcgatagagcggttgatggctttgtttccttcaatactttaacagctaatggtatgtctgctattaaactatgtcttgagatattaaactctattttcttcaagaagaagattgatttattatattcaaccggatattatgaaacaagatttttattaaataatcttgctaaatcaggtattagttgctatgaggtaagtaattgtgaattggataaagataaattttataatgtattcatgatggaacccaatcgagccgatttaacattacaaaaaactgatttcaagatagtagaatattttgttaagtataaaaataattcaataaaagtcgttattttagatatttcatatcaaggttctaattttaaattagtagaatttttagagaaatttaaatttgcgaatgtaattatttttgtggtacgatctttgataaaattagatcaaatgggattagaattgacaaatgggggaataatagaagtgtttattcctaatcatttgagaaagttgaaaaattttattgaagaggaattcaataaatttagaaattctcacggagctaatctaagcctctatgaatactgtttgcttgataattctttaactttaaaaaatgattggaactattctgatttagttatgaaatttacgagtaatttttatgctgatataaaagacttgttcatggaaaattctgatattgaaatcatccatgaagagggagtaccttttgtatttttagatttaataggtgaaggtaaaaaagaatatgaaatgttttttcaatggttaaacttcttttacaaacagcttggaatcacattgtatgctagaaatagttttgggtttcggaatctaacagtagagtattttggaattattgggacagaaagatatatatttaagatttgtccaggtgtttataaagggttaagttattatttgatgaaatttttattaaaatctttttcaaatgaatatttaaaaactactgatgaggttaataga

SEQ ID NO: 140 - protein, 463 aa, Streptococcus pneumoniae
  hypothetical protein; Cellular location: membrane
MDKKLDILDKVKEYLGNKTTQILDNQYKEFLKLNDIRRAFGISEKVLNNSFNFTSKEFNDLINNENYLFEYACRIREEWRKKCFNHSYRFLCSPIITDDFLNTKTLRSSQIEYKYERYLSKSSIGDRAVDGFVSFNTLTANGMSAIKLCLEILNSIFFKKKIDLLYSTGYYETRFLLNNLAKSGISCYEVSNCELDKDKFYNVFMMEPNRADLTLQKTDFKIVEYFVKYKNNSIKVVILDISYQGSNFKLVEFLEKFKFANVIIFVVRSLIKLDQMGLELTNGGIIEVFIPNHLRKLKNFIEEEFNKFRNSHGANLSLYEYCLLDNSLTLKNDWNYSDLVMKFTSNFYADIKDLFMENSDIEIIHEEGVPFVFLDLIGEGKKEYEMFFQWLNFFYKQLGITLYARNSFGFRNLTVEYFGIIGTERYIFKICPGVYKGLSYYLMKFLLKSFSNEYLKTTDEVNR

SEQ ID NO: 141 - DNA, 96 bp, Streptococcus pneumoniae
atggagctagccattactgaaataaacactagactcattatcacccaaaatgatatttggtttaataataataaaaatattacagccactgctaat

SEQ ID NO: 142 - protein, 32 aa, Streptococcus pneumoniae
  hypothetical protein
MELAITEINTRLIITQNDIWFNNNKNITATAN

SEQ ID NO: 143 - DNA, 1176 bp, Streptococcus pneumoniae
atgaaaaatttgataaagttgctaataattagattgattgttaacttagcagacagtgtattttatatagtagcattgtggcacgttagcaataattattcttcgagcatgttcttaggaatatttattgcagtaaattatctaccggatttgttactaatcttttttggaccagttattgacagagtaaatccgcaaaaaattcttataatatcaattttggttcaattagcagtggctgtaatatttttattattattaaaccaaatatcattttgggtgataatgagtctagtgtttatttcagtaatggctagctccataagttacgtgatagaagatgtgttgattcctcaagtggtagaatatgataagattgtatttgcaaattctctttttagtatttcgtataaagtattagattctatttttaattcattcgcatcatttttacaggtggcagtaggatttattttattggttaagatagatataggcatatttttacttgctctatttatattgttgttgttaaaatttagaactagcaatgcgaatatagaaaacttctctttcaaatattacaagagagaagtgttgcaaggtacaaagtttattttaaataataaattattatttaaaaccagtatttctttaacgcttataaactttttttattcatttcagacagtagttgtaccgattttttctattcgatattttgatggtccgattttttatggtatttttttaactattgctggtttgggtggtatattgggaaatatgctagcgccaatcgtaataaaatatttaaaatcgaatcaaattgttggtgtatttctttttttgaacggctcaagttggttagtagcaattgttataaaagactatactttatcacttattttatttttcgtttgttttatgtctaaaggagtcttcaatattatttttaattcgttgtaccaacaaatacctccacatcaacttcttggtagggtaaatactaccattgattctattatttcttttggaatgccaattggtagtttagttgcaggaacgcttattgatttgaatattgaattagtgttaattgctattagcataccttattttttgttttcttatattttttatacggataatggattgaaagaatttagtatatat

SEQ ID NO: 144 - protein, 392 aa, Streptococcus pneumoniae
  macrolide efflux protein, putative; Cellular location: membrane; Similar to strain R6 sequence 15903015 (2.E-20)
MKNLIKLLIIRLIVNLADSVFYIVALWHVSNNYSSSMFLGIFIAVNYLPDLLLIFFGPVIDRVNPQKILIISILVQLAVAVIFLLLLNQISFWVIMSLVFISVMASSISYVIEDVLIPQVVEYDKIVFANSLFSISYKVLDSIFNSFASFLQVAVGFILLVKIDIGIFLLALFILLLLKFRTSNANIENFSFKYYKREVLQGTKFILNNKLLFKTSISLTLINFFYSFQTVVVPIFSIRYFDGPIFYGIFLTIAGLGGILGNMLAPIVIKYLKSNQIVGVFLFLNGSSWLVAIVIKDYTLSLILFFVCFMSKGVFNIIFNSLYQQIPPHQLLGRVNTTIDSIISFGMPIGSLVAGTLIDLNIELVLIAISIPYFLFSYIFYTDNGLKEFSIY

SEQ ID NO: 145 - DNA, 135 bp, Streptococcus pneumoniae
gtggatggacgtgtaataacctcttctttcgaggagtattttactaaaaaactagccttggagcgttccccagaaacggacttactcattgactcttcaaagatttggggagaagattttgcttcatctgttcct

SEQ ID NO: 146 - protein, 45 aa, Streptococcus pneumoniae
  lactose phosphotransferase system repressor, degenerate FRAMESHIFT; Cellular location: cytoplasm
MDGRVITSSFEEYFTKKLALERSPETDLLIDSSKIWGEDFASSVP

SEQ ID NO: 147 - DNA, 114 bp, Streptococcus pneumoniae
ttggggagaagattttgcttcatctgttccttgaaaaaagtcacagcagtcatcacagacgatagtactgaacaaaactatgaagagttagaaatttatacgcaggtgattgta

SEQ ID NO: 148 - protein, 38 aa, Streptococcus pneumoniae
  hypothetical protein; Cellular location: cytoplasm
MGRRFCFICSLKKVTAVITDDSTEQNYEELEIYTQVIV

SEQ ID NO: 149 - DNA, 231 bp, Streptococcus pneumoniae
ttgattagtattgacctaggtggtacaaatattaagattactgttctttcaaatgacggtgagattgaaactttgtggagtattacaacagatacaagtgagaaaggttctcaaattatatcggacatcatcagttctattaaaaataaattgaccgaacggaatattcctgatagcgaccttcttggaatcggtatgggaagttgctcatcatactttccttgtaaatca

SEQ ID NO: 150 - protein, 77 aa, Streptococcus pneumoniae
  ROK family protein; Cellular location: cytoplasm; Similar to strain R6 sequence 15902628 (1.E-13)
MISIDLGGTNIKITVLSNDGEIETLWSITTDTSEKGSQIISDIISSIKNKLTERNIPDSDLLGIGMGSCSSYFPCKS

SEQ ID NO: 151 - DNA, 102 bp, Streptococcus pneumoniae
ttgatttttattgagtataccactattttactccctctggcaagggactttgtctatgtggagggattgggctcctatgtggtggagcttttctgttctttc

SEQ ID NO: 152 - protein, 34 aa, Streptococcus pneumoniae
  hypothetical protein; Cellular location: cytoplasm
MIFIEYTTILLPLARDFVYVEGLGSYVVELFCSF

SEQ ID NO: 153 - DNA, 132 bp, Streptococcus pneumoniae
ttgagtataccactattttactccctctggcaagggactttgtctatgtggagggattgggctcctatgtggtggagcttttctgttctttctgaaatatggtataatagcactaatcaatttctaggaaaa

SEQ ID NO: 154 - protein, 44 aa, Streptococcus pneumoniae
  hypothetical protein
MSIPLFYSLWQGTLSMWRDWAPMWWSFSVLSEIWYNSTNQFLGK

SEQ ID NO: 155 - DNA, 1947 bp, Streptococcus pneumoniae
atgtctcatattattgaattgccagagatgctggcaaaccaaatcgcggctggagaggtcattgaacgtcctgccagtgtggtcaaagagttggtagaaaatgccattgacgcgggctctagtcagattatcattgagattgaggaagctggtctcaagaaggttcaaatcacggataacggtcatggaattgcccacgatgaggtggagttggccctgcgtcgccatgcgaccagtaagataaaaaatcaagcagatctctttcggattcggacgcttggttttcgtggtgaagccttgccttctattgcgtctgttagtgtcttgactctgttaacggcggtggatggtgctagtcatggaaccaagttagtcgcgcgtgggggtgaagttgaggaagtcatcccagcgactagtcctgtgggaaccaaggtttgtgtggaggatctctttttcaacacgcctgcccgtctcaagtatatgaagagccagcaagcggagttgtctcatatcattgatattgtcaaccgtctgggcttggcccatcctgagatttcttttagcttgattagtgatggcaaggaaatgacgcggacagcagggactggtcaattgcgccaagcaatcgcagggatttacggtttggtcagtgccaagaagatgattgaaattgagaactctgacctagatttcgaaatttcaggttttgtgtccttgcctgagttgactcgggctaaccgcaattatatcagcctcttcatcaatggccgttatattaagaacttcctgctcaatcgtgctattttggatggttttggaagcaagcttatggttggacgttttccactggctgtcattcacatccatatcgacccttatctagcggatgtcaatgtgcatccaactaagcaagaggtgcggatttccaaggaaaaagaactgatgactctggtttcagaagctattgcaaatagtctcaaggaacaaaccttgattccagatgccttggaaaatcttgccaaatcgaccgtgcgcaatcgtgagaaggtggagcaaactattctcccactcaaagaaaatacgctctactatgagaaaactgagccgtcaagacctagtcaaactgaagtagctgattatcaggtagaattgactgatgaagggcaggatttgaccctgtttgccaaggaaaccttggaccgattgaccaagccagcaaaactgcattttgcagagagaaagcctgctaactacgaccagctagaccatccagagttagatcttgctagcatcgataaggcttatgacaaactggagcgagaagaagcatccagcttcccagagttggagtttttcggacaaatgcacgggacttatctctttgcccaagggcgagatggactttacatcatagatcagcacgctgctcaggaacgggtcaagtacgaggagtaccgtgaaagcattggcaatgttgaccaaagccagcagcaactcctagtgccctatatctttgaatttcctgcggatgatgccctgcgtctcaaggaaagaatgcctctcttagaggaagtgggcgtctttctagcagagtacggagaaaatcaatttattctacgtgaacatcctatttggatggcagaagaagagattgaatcaggcatctatgagatgtgcgacatgctccttttgaccaaggaagtttctatcaagaaataccgagcagagctggctatcatgatgtcttgcaagcgatctatcaaggccaatcatcgtattgatgatcattcagctagacaactcctctatcagctttctcaatgtgacaatccctataactgtcctcacggacgtcctgttttggtgcattttaccaagtcggatatggaaaagatgttccgacgtattcaggaaaatcacaccagtctccgtgagttggggaaatat

SEQ ID NO: 156 - protein, 649 aa, Streptococcus pneumoniae
  DNA mismatch repair protein HexB (hexB); Cellular location: membrane; Similar to strain R6 sequence 15902204 (0.E+01)
MSHIIELPEMLANQIAAGEVIERPASVVKELVENAIDAGSSQIIIEIEEAGLKKVQITDNGHGIAHDEVELALRRHATSKIKNQADLFRIRTLGFRGEALPSIASVSVLTLLTAVDGASHGTKLVARGGEVEEVIPATSPVGTKVCVEDLFFNTPARLKYMKSQQAELSHIIDIVNRLGLAHPEISFSLISDGKEMTRTAGTGQLRQAIAGIYGLVSAKKMIEIENSDLDFEISGFVSLPELTRANRNYISLFINGRYIKNFLLNRAILDGFGSKLMVGRFPLAVIHIHIDPYLADVNVHPTKQEVRISKEKELMTLVSEAIANSLKEQTLIPDALENLAKSTVRNREKVEQTILPLKENTLYYEKTEPSRPSQTEVADYQVELTDEGQDLTLFAKETLDRLTKPAKLHFAERKPANYDQLDHPELDLASIDKAYDKLEREEASSFPELEFFGQMHGTYLFAQGRDGLYIIDQHAAQERVKYEEYRESIGNVDQSQQQLLVPYIFEFPADDALRLKERMPLLEEVGVFLAEYGENQFILREHPIWMAEEEIESGIYEMCDMLLLTKEVSIKKYRAELAIMMSCKRSIKANHRIDDHSARQLLYQLSQCDNPYNCPHGRPVLVHFTKSDMEKMFRRIQENHTSLRELGKY

SEQ ID NO: 157 - DNA, 90 bp, Streptococcus pneumoniae
gtggtaaaacacaacttcgatgttacagacaaaactggcaaaattagctcaaaacactgttttgagattactgataaaactgacgtcgtt

SEQ ID NO: 158 - protein, 30 aa, Streptococcus pneumoniae
  hypothetical protein (N-ethylammeline); Cellular location: cytoplasm; Similar to strain R6 sequence 15903257 (1.E-07)
MVKHNFDVTDKTGKISSKHCFEITDKTDVV

SEQ ID NO: 159 - DNA, 465 bp, Streptococcus pneumoniae
atgaacacttatgaaggtaatttagtagcaaacaatattaaaataggtattgttgtagcgagatttaatgaatttataacttcaaaattattatctggagcactagataatctcaaaagagagaatgtaaacgagaaagatatagaggtagcctgggttccaggagcttttgaaataccactgattgcatcaaaaatggcaaaaagtaaaaaatatgatgcaattatctgcttgggagctgtcattagagggaatacaagtcattatgattatgtatgtagcgaggtatctaagggaatcgcccaaatcagtttaaatagcgaaattcctgttatgtttggtgtgctaacgacagatacaattgaacaagccatagaacgagctggtactaaagcaggaaataagggttctgagtgtgcacaaggagctattgaaatggtcaacctgattcgtacattagacgca

SEQ ID NO: 160 - protein, 155 aa, Streptococcus pneumoniae
  riboflavin synthase, beta subunit (ribH); Cellular location: cytoplasm; Similar to strain R6 sequence 15902205 (1.E-84)
MNTYEGNLVANNIKIGIVVARFNEFITSKLLSGALDNLKRENVNEKDIEVAWVPGAFEIPLIASKMAKSKKYDAIICLGAVIRGNTSHYDYVCSEVSKGIAQISLNSEIPVMFGVLTTDTIEQAIERAGTKAGNKGSECAQGAIEMVNLIRTLDA

SEQ ID NO: 161 - DNA, 1233 bp, Streptococcus pneumoniae
atggattttagcagaaaggataatcagtcaatggaatatcgaaaaatacaagaagcattagaagcattgcagaagggacgacttgttcttgttatagacgacaaggatagagaaaatgaaggagacttaatttgttctgcacaagcagctacaacagaaaatgttaattttatggctacttatgccaaaggattaatttgtatgcctatgagcgaaagtttagctaatcaattaatgctttcacctatggttgaaaacaatacagataatcataagactgcttttacagtttcaattgattataaagaaacgaccacaggtatttctgccgaggaaagaggactgaccgcacgtatgtgtgtagctgaagatataacaccctctgattttcgcaggccaggacacatgtttcctttaattgcaaaaaaaggtggtgtcctagaaagaaatggacacacagaagcaactgttgatttattaaaattagctggactaaaagagtgtggcctatgttgtgaaataatgaatcatgatggcaaaatgatgagaacagatgatttaattcagttctcgaaaaaacacaacattccactaattaccatcaaagaattacaagaatatagaaaagtatatgatcagctggtagaacgagtttcaactgtcaatatgcctactagatacggtaatttcaaagcaattagctatatagataaactaaatggggaacatcatcttgctcttattatgggaaatatagaggatgaagccaatgtattatgtcgggtccactccgaatgtttaacaggagatgttttaggctctttacgttgcgattgtggacagcaattcgataaggctatgaaaatgattgttgagaatggttcgggtgtcttactttacttgcgacaggagggacgaggaattggacttatcaataaattaaaagcctatcatttacaagatcaaggcatggatacgcttgatgccaatcttgcattaggctttgaaggtgatttaagagaatatcatattggagcaaaaatgcttaaagatctgggacttcagtcacttcatttactgacaaataatcctgacaaggttgaacagttagaaaaatatggaattaccatttccagtagaatatcaatcgaaatagaagccaatccttacgatagtttttatttagaaacaaagaaaaatcgaatgggtcacattttaaatatggaggaaaaa

SEQ ID NO: 162 - protein, 411 aa, Streptococcus pneumoniae
  3,4-dihydroxy-2-butanone 4-phosphate synthase/GTP cyclohydrolase II (ri; Cellular location: cytoplasm; Similar to strain R6 sequence 15902206 (0.E+01)
MDFSRKDNQSMEYRKIQEALEALQKGRLVLVIDDKDRENEGDLICSAQAATTENVNFMATYAKGLICMPMSESLANQLMLSPMVENNTDNHKTAFTVSIDYKETTTGISAEERGLTARMCVAEDITPSDFRRPGHMFPLIAKKGGVLERNGHTEATVDLLKLAGLKECGLCCEIMNHDGKMMRTDDLIQFSKKHNIPLITIKELQEYRKVYDQLVERVSTVNMPTRYGNFKAISYIDKLNGEHHLALIMGNIEDEANVLCRVHSECLTGDVLGSLRCDCGQQFDKAMKMIVENGSGVLLYLRQEGRGIGLINKLKAYHLQDQGMDTLDANLALGFEGDLREYHIGAKMLKDLGLQSLHLLTNNPDKVEQLEKYGITISSRISIEIEANPYDSFYLETKKNRMGHILNMEEK

SEQ ID NO: 163 - DNA, 633 bp, Streptococcus pneumoniae
atgttcacaggaataattgaagaaatcggaaaagttgaaagaatacagaaagactctcgtaattgtaaactatcaattaaagcctcaaaaatattaacggatatccatttaggcgatagtatagcagtaaatggtatctgtcttacagttactcatttcaatcatcaatcctttacagttgatgtaatgaatgaaacatggagtcgaacagctcttactctattaaaacatggaagtgaggtgaatctagaaagagccttatctgtcaacggtcgacttgggggtcacgtcgttacaggacacattgatggtacaggaaaaatctcgtcaataaaaaaagatgataatgctgtatggtatcaaatcaacacacaaaaagaaattttagatttaatagttgaaaaaggatctattacaattgacggcattagtctgactgtcgctaaagtctccaaagtaaacttttcagtatctgttatccctcataccttggaacaaaccattcttaagagtaaacaagtcgggagtacagtaaatcttgaaaatgatatcttaggtaaatatgtgcaaaaactgatggataactctccaaaatcagaaatatctaaggaactattatatcaaaatggattt

SEQ ID NO: 164 - protein, 211 aa, Streptococcus pneumoniae
  riboflavin synthase, alpha subunit (ribE); Cellular location: cytoplasm; Similar to strain R6 sequence 15902207 (e-117)
MFTGIIEEIGKVERIQKDSRNCKLSIKASKILTDIHLGDSIAVNGICLTVTHFNHQSFTVDVMNETWSRTALTLLKHGSEVNLERALSVNGRLGGHVVTGHIDGTGKISSIKKDDNAVWYQINTQKEILDLIVEKGSITIDGISLTVAKVSKVNFSVSVIPHTLEQTILKSKQVGSTVNLENDILGKYVQKLMDNSPKSEISKELLYQNGF

SEQ ID NO: 165 - DNA, 1194 bp, Streptococcus pneumoniae
ttgtcatttcagagcatttttgttaatcgcataagttttcttttgtatgccttgagtagtcccctattcaaggtatatttttttggaggtagcgagatgagcgattcaaaatatatgaaattagcaataaaactggcacaaaaaggggctggttacgtcaatcccaatcctatggtcggcgcagttattgtaaaagataatcacattatcggacaaggttatcatgagttttttggtggcccacatgctgagagaaatgctcttaaaaactgtagagaatcccctgtcggagcgacgctttatgtaacacttgaaccctgttgtcacttcgggaaaacacctccctgtatagatgctataatcgatagtggtattacaagagtagtcattggaagcctagactgtaatcctattgtatctggaaaaggagtaaagatacttgaggaaaataatcttcaagttactgttggaattttagaaaatgagtgtcttaacttaataaaaagttttagaaagtatattacccagcatgtaccctatgtttttatgaaatatgcaatgtcaatggatggaaaaatagccactaaaacaaatcaatccaaatggattactgaagaagaagcaagaaagcatgtgcatcagttacgacaccatgttagtgcaattatggtgggagtcaatactgttattcaagacgatcctttgctgacatgtagattggaggaagggaaaaatcctatccgtatcatatgcgatacacatttacgaactcctcttacctctaaaatcgtaaaaacagcaaatgatattaaaacttacattgccacttcctctgaagacaaaaataaaatgaagctatatcaaaatcatggctgtgaaatactttccataaagaaaaaaggcaatcatatagacttatcgagtttaatgcaacatctaggaaacatgcagattgatagcctagttctagaagggggcagtctaatgaattggagtgctttggaacaacaaattgttgatgagctgaaaatatatattgcaccaaaagtttttggaggtagtgccaagtttcctgtcggaggtgaaggtatttctttgccaaatgacgctattagattgaaaccttatgcattttctcaaataggaaatgactatctcatagaaagtgaagtgatttatccatgttcacaggaa

SEQ ID NO: 166 - protein, 398 aa, Streptococcus pneumoniae
  riboflavin biosynthesis protein RibD (ribD); Cellular location: cytoplasm; Similar to strain R6 sequence 15902208 (0.E+01)
MSFQSIFVNRISFLLYALSSPLFKVYFFGGSEMSDSKYMKLAIKLAQKGAGYVNPNPMVGAVIVKDNHIIGQGYHEFFGGPHAERNALKNCRESPVGATLYVTLEPCCHFGKTPPCIDAIIDSGITRVVIGSLDCNPIVSGKGVKILEENNLQVTVGILENECLNLIKSFRKYITQHVPYVFMKYAMSMDGKIATKTNQSKWITEEEARKHVHQLRHHVSAIMVGVNTVIQDDPLLTCRLEEGKNPIRIICDTHLRTPLTSKIVKTANDIKTYIATSSEDKNKMKLYQNHGCEILSIKKKGNHIDLSSLMQHLGNMQIDSLVLEGGSLMNWSALEQQIVDELKIYIAPKVFGGSAKFPVGGEGISLPNDAIRLKPYAFSQIGNDYLIESEVIYPCSQE

SEQ ID NO: 167 - DNA, 591 bp, Streptococcus pneumoniae
atgtacgcatatttaaaaggaatcattaccaaaattactgccaaatacattgttcttgaaaccaatggtattggttatatcctgcatgtggccaatccttatgcctattcaggtcaggttaatcaggaggctcagatttatgtgcatcaggttgtgcgtgaggacgcccatttgctttatggatttcgctcagaggatgagaaaaagctctttcttagtctgatttcggtctctgggattggtcctgtatcagctcttgctattatcgctgctgatgacaatgctggcttggttcaagccattgaaaccaagaacatcacctacttgaccaagttccctaaaattggcaagaaaacagcccagcagatggtgctggacttggaaggcaaggtagtagttgcaggagatgaccttcctgccaaggtcgcagtgcaagcaagtgctgaaaaccaagaattggaagaagctatggaagccatgttggctctgggctacaaggcaacagagctcaagaaaatcaagaaattctttgaaggaacgacagatacagctgagaactatatcaagtcggcccttaaaatgttggtcaaa

SEQ ID NO: 168 - protein, 197 aa, Streptococcus pneumoniae
  Holliday junction DNA helicase RuvA (ruvA); Cellular location: membrane; Similar to strain R6 sequence 15902209 (e-106)
MYAYLKGIITKITAKYIVLETNGIGYILHVANPYAYSGQVNQEAQIYVHQVVREDAHLLYGFRSEDEKKLFLSLISVSGIGPVSALAIIAADDNAGLVQAIETKNITYLTKFPKIGKKTAQQMVLDLEGKVVVAGDDLPAKVAVQASAENQELEEAMEAMLALGYKATELKKIKKFFEGTTDTAENYIKSALKMLVK

SEQ ID NO: 169 - DNA, 534 bp, Streptococcus pneumoniae
atgaccaacccgctctacatcgcctatcatgatgaggagtggggccagcccctccatgatgaccaagtattgtttgagttgttgtgtatggaaacctatcaggcaggcctgtcttgggaaacggtactcaacaaacgccaagctttccgagaagtctttcatagctatcaaattcactcagtcgcagagatgactgacactgaattggaagccatgctggagaatccagctatcattcgaaatagagccaagctttttgctacacgcgctaacgcccaagcctttctacagttacaggcagagtacggctcttttgatgcctatctttggtcttttgttgaggggaaaactgtcgttaacgatgttcctgattatcgccaagcgccagctaaaacacccttatctgagaaattagccaaagatctcaaaaaacgaggcttcaagttcacaggcccagtcgccgtattgtcttttctacaggctgcagggctagttgatgaccacgagaatgattgtgagtggaaaggtcttaaa

SEQ ID NO: 170 - protein, 178 aa, Streptococcus pneumoniae
  DNA-3-methyladenine glycosylase I (tag); Cellular location: membrane; Similar to strain R6 sequence 15902210 (e-102)
MTNPLYIAYHDEEWGQPLHDDQVLFELLCMETYQAGLSWETVLNKRQAFREVFHSYQIHSVAEMTDTELEAMLENPAIIRNRAKLFATRANAQAFLQLQAEYGSFDAYLWSFVEGKTVVNDVPDYRQAPAKTPLSEKLAKDLKKRGFKFTGPVAVLSFLQAAGLVDDHENDCEWKGLK

SEQ ID NO: 171 - DNA, 675 bp, Streptococcus pneumoniae
atgatgtctaacaaaaataaggaaattctgatttttgcgattctctatacagtcctctttatgtttgatggcgttaaattgctggcttctttaatgccatctgccattgcaaattatcttgtttatgtagttttagctctatatggctccttcttgttcaaggatagattgatccaacaatggaaggagattagaaagactaaaagaaaattcttctttggagtcttaacaggatggctctttctcattctgatgactgttgtctttgaatttgtatcagagatgttgaagcagtttgtgggactagatggacaaggtctaaatcagtctaatattcaaagtacctttcaagaacaaccactactgatagctgtttttgcttgtgtcattggacctctggtagaagaattatttttccgtcaggtcttattgcattacttgcaggaacggttgtcaggtttactaagcattattctggtaggacttgtttttgctctgactcatatgcacagtttggctctatcagagtggattggtgcagttggttacttaggtggaggccttgccttttctattatttatgtgaaagaaaaagagaatatctactatcccctacttgttcacatgttaagcaacagcctctccttaatcattttagctatcagtatagtaaaa

SEQ ID NO: 172 - protein, 225 aa, Streptococcus pneumoniae
  conserved hypothetical protein; Cellular location: membrane; Similar to strain R6 sequence 15902211 (e-122)
MMSNKNKEILIFAILYTVLFMFDGVKLLASLMPSAIANYLVYVVLALYGSFLFKDRLIQQWKEIRKTKRKFFFGVLTGWLFLILMTVVFEFVSEMLKQFVGLDGQGLNQSNIQSTFQEQPLLIAVFACVIGPLVEELFFRQVLLHYLQERLSGLLSIILVGLVFALTHMHSLALSEWIGAVGYLGGGLAFSIIYVKEKENIYYPLLVHMLSNSLSLIILAISIVK

SEQ ID NO: 173 - DNA, 1029 bp, Streptococcus pneumoniae
atggtttctactattggtattgttagtttatctagtggcattatcggagaggattttgtcaaacacgaagtggacttgggtatccaacgtctcaaggatctgggactcaatcccatctttttgccccattcgttaaaaggattagactttatcaaggaccatcctgaagctcgtgcagaggatttgattcatgccttttctgatgatagcatcgacatgatcctatgtgccatcggtggagacgatacctatcgcttgctaccttatctttttgaaaatgaccaactccaaaaggttatcaagcaaaaaatttttcttggcttctcggatacaaccatgaaccacctcatgttgcataaattaggaatcaagactttttatggtcaatcctttttagcagacatttgtgaattagacaaagaaatgctagcctatagccttcactactttaaagaattgattgagacgggaagaatttcagaaatccgccctagtgacgtttggtatgaggaacgaactgattttagtcccacggccctgggaacacctcgtgtcagtcatacaaatacaggttttgacttgttgcaaggaagtgcccagttcgaggggaaaatcctcggtggttgcctcgaatccctctacgatatctttgacaactctcgatacgcagatagcacggaactctgccaaaaatacaaacttttccctgacttgtcagactgggaagggaaaatcctcttgctcgaaacaagcgaagaaaagcctaagccagaagacttcaaaaagatgttgctaactttaaaggacactggcatattcgcggtcatcaatggactcttggtcggaaaacctatggatgaaactttccatgacgactataaagaggcactattggatatcattgacagcaatatcccgattgtctataatctgaatgtcggccacgcaactccaagagcaattgtaccctttggggtccatgctcatgtagatgcacaggaacaagtcattctctttgactataacaaa

SEQ ID NO: 174 - protein, 343 aa, Streptococcus pneumoniae
  MccC family protein; Cellular location: outside; Similar to strain R6 sequence 15902212 (0.E+01)
MVSTIGIVSLSSGIIGEDFVKHEVDLGIQRLKDLGLNPIFLPHSLKGLDFIKDHPEARAEDLIHAFSDDSIDMILCAIGGDDTYRLLPYLFENDQLQKVIKQKIFLGFSDTTMNHLMLHKLGIKTFYGQSFLADICELDKEMLAYSLHYFKELIETGRISEIRPSDVWYEERTDFSPTALGTPRVSHTNTGFDLLQGSAQFEGKILGGCLESLYDIFDNSRYADSTELCQKYKLFPDLSDWEGKILLLETSEEKPKPEDFKKMLLTLKDTGIFAVINGLLVGKPMDETFHDDYKEALLDIIDSNIPIVYNLNVGHATPRAIVPFGVHAHVDAQEQVILFDYNK

SEQ ID NO: 175 - DNA, 93 bp, Streptococcus pneumoniae
gtgcaggaccaacacgctatcaagaataagaaaacgataaaagcaactgcaggtgcggttgctttttcacttacttttttgagttatattcaa

SEQ ID NO: 176 - protein, 31 aa, Streptococcus pneumoniae
  hypothetical protein; Cellular location: cytoplasm
MQDQHAIKNKKTIKATAGAVAFSLTFLSYIQ

SEQ ID NO: 177 - DNA, 702 bp, Streptococcus pneumoniae
atggttctaagaggagttcctatgtctcaaattgatctacaaaaattaactaagaaaaaccaagagtttgtccacattgctacccaacaattcatcaaagatgggaaaacagacgctgaaatccagactatttttgaggaagtcattccccaaatccttgaggagcaatctaaaggtacaactgcccgttccctatacggcgcaccaactcattgggctcatagcttcactgtcaaagagcagtacgaaaaagagcatccaaaagaaaatgatgacccaaaactgatgattatggactcagctcttttcatcactagcctctttgcccttgtcagcgccctcacaaccttctttgcggcagaccaagctttcggctatggattgattactcttctattagttggactggttggtggatttgccttctacttgatgtactactttgtttaccaatactatggaccagatatggatcgcagtcaacgtccacctttctggaaatctgtactagttatcctagcttctatgttcctttggttgcttgtcttctttgcaacaagcttcctaccagctagccttaacccagtactggatccattgccactagctattattggagcagccctcctagcccttcgcttctatctcaagaaacgcttgaatatccgtagtgcaagtgcaggaccaacacgctatcaagaa

SEQ ID NO: 178 - protein, 234 aa, Streptococcus pneumoniae
  hypothetical protein; Cellular location: membrane; Similar to strain R6 sequence 15902213 (e-132)
MVLRGVPMSQIDLQKLTKKNQEFVHIATQQFIKDGKTDAEIQTIFEEVIPQILEEQSKGTTARSLYGAPTHWAHSFTVKEQYEKEHPKENDDPKLMIMDSALFITSLFALVSALTTFFAADQAFGYGLITLLLVGLVGGFAFYLMYYFVYQYYGPDMDRSQRPPFWKSVLVILASMFLWLLVFFATSFLPASLNPVLDPLPLAIIGAALLALRFYLKKRLNIRSASAGPTRYQE

SEQ ID NO: 179 - DNA, 942 bp, Streptococcus pneumoniae
atgaaacaagtttttctctctacaacaactgaatttaaagagatcgatacgcttgaaccgggtacttggatcaatctcgtcaatccgactcaaaatgaatcactcgaaatcgccaacaccttcgatattgatattgctgaccttcgagcaccgctcgatgcggaagaaatgtctcgtattaccattgaagacgagtataccctgattatcgtagacgtgccggtcacggaggaaagaaataaccgcacctactacgtaaccatcccgcttggtattatcatcactgaggaaaccattatcactacgtgtttggaaccactacctgtccttgatgtctttatcaaccgtcgattgcgtaatttctataccttcatgcgttcacgttttatctttcaaattctttatcgcaatgcagagctttacctaacagcccttcgttcaatcgaccgcaagagtgaacaaatcgaaagtcaactgcatcaatcaactcgtaatgaagaattgattgagctcatggaattggaaaaaactatcgtctatttcaaggcctccctcaaaacaaatgagcgcgtgattaagaaattgaccagttcaaccagcaatatcaagaaataccttgaggacgaagacctgcttgaagacaccctgattgaaacccaacaggccatcgagatggcagatatttatggaaacgtcttgcattctatgacagagacctttgcctctatcatttctaacaaccagaacaacatcatgaaaaccttggcccttgtgaccatcgtcatgtccatcccaaccatggtcttttctgcctacgggatgaactttaaggataatgaaatccccctaaacggagagccaaatgccttctggttaatcgtctttatcgcctttgctatgagtgtctcgctcactctctatctcatccataaaaaatggttc

SEQ ID NO: 180 - protein, 314 aa, Streptococcus pneumoniae
  magnesium transporter, CorA family; Cellular location: membrane; Similar to strain R6 sequence 15902214 (e-177)
MKQVFLSTTTEFKEIDTLEPGTWINLVNPTQNESLEIANTFDIDIADLRAPLDAEEMSRITIEDEYTLIIVDVPVTEERNNRTYYVTIPLGIIITEETIITTCLEPLPVLDVFINRRLRNFYTFMRSRFIFQILYRNAELYLTALRSIDRKSEQIESQLHQSTRNEELIELMELEKTIVYFKASLKTNERVIKKLTSSTSNIKKYLEDEDLLEDTLIETQQAIEMADIYGNVLHSMTETFASIISNNQNNIMKTLALVTIVMSIPTMVFSAYGMNFKDNEIPLNGEPNAFWLIVFIAFAMSVSLTLYLIHKKWF

SEQ ID NO: 181 - DNA, 2862 bp, Streptococcus pneumoniae
atggtaagcaataatggactagaaagaacaaagatgcaagataaaattgtcattcatggggcgcgtgcccataatttaaaaaatattgatgtggagattccgcgagacaagttggttgtcgtgactggcttgtcaggttcagggaagtccagtctggcttttgatactctctatgcggagggacaacgtcgctatgtagagagtttgtccgcctacgctcgtcagttcttgggaaatatggaaaaaccagatgtagatgccattgatggtctcagcccagctatttccatcgaccagaaaacgactagtaaaaatcctcgctcgacggtgggaacgacgactgaaatcaatgactatctgcgtctcctctacgcacgtgtggggacgccttactgtatcaacggacatggagctatcaatgcttcttctgtggagcaaatcgttgataaggttttggagttacctgaacgccagcgcttgcagatcttggctcctgtcatccgcaagaaaaaaggccaacataagagtgttatcgagaaggttcagaaagacgggtatgttcgtgtccgtgtggatggggaagtctatgatgtgaccgaagtgccagagttgtctaagagcaagcaacacaatatcgatgtcgtggttgaccgtattgttatcaaggagggcattcgtagtcgtctctttgattccattgaggctgcccttcgtattgcagaaggttatgtcattatcgacaccatggacgactcggagttgttgttctctgagcattatgcctgtccagtttgtggttttactgtcccagagttagagcctcgtctcttttctttcaatgctccttttggctcttgtagtgagtgtgacggcttgggcatcaagctggaggtggatactgatttggtagtgccagatgctagcaaaaccttacgtgagggagcgctagcaccttggaatcctatctcatccaactactatccaaacatgttagagcaggccatgaaagtctttggagtggctatggataagccttttgaggacctgtcagaagaagataagaacttgattctctatgggtcagatggtaaggaattccatttccactatgagaatgaatttggtggcgtgcgcgatatcgacattccgtttgagggagttatcaataatatcaaacgtcgttaccatgaaaccaatagcgattacactcgcactcagatgcgtctctacatgaatgagctgacctgcggaacctgtcaaggctatcgtctcaatgaccaggccttgtctgtccgtgtgggcggccagcaagggccacatattggagaaatctcagacctgtctatcgctgaccacttggacttggtgagccagttaactttgtctgaaaatgaagccatcattgctcgtcccattctcaaggaaatcaaggatcgtttgaccttccttaataatgtgggtcttaactatctaaccctgtcacgttcagcaggaaccctttcaggtggggaaagtcagcgcattcgtttggcaacccagattggttccaacctatcaggtgtcctctatatcctagacgagccgtcaatcggtcttcaccagagggacaatgatcgcctgattgccagtctgaaaaagatgcgtgacttgggcaatactcttatcgtggtggaacacgacgaagataccatgcgtgaggctgattatctgattgacgttggtcctggtgccggtgtttttggtggtgagattgttgcagcaggtacacctaagcaagtggctcgcaacagcaagtctatcacaggtcagtacttgtcaggcaaacgtgtcatcccagtaccagaagagcgccgtgtcggaaatggtcgttttattgaagtgataggagcgcgtgagaacaacttgcaaaatgtcacggctcgctttccactaggaaaatttatcgcagtgacaggtgtgtcgggttcagggaaatcgactctaatcaacagcattctcaaaaaagccattgcccagaagctcaaccgtaattcagacaaacctggtaagtttaagactattacagggattgagcatgtcgaccgtttgattgatattgaccagagccctatcggacggacgccgaggtctaacccagctacctatacaggagtttttgacgatatacgtgacctttttgctcagacaaatgaagccaagattcgaggctacaagaaggggcgcttcagtttcaacgtcaagggaggtcgctgtgaagcttgctcaggtgacgggattatcaagattgagatgcacttcttgccagatgtttatgtggcttgtgaagtttgccacggaacccgctataacagtgaaaccctagaagttcactacaaggaaaagaatatttcgcaggtcttggatatgacggtcaacgatgcggtagaatttttccaacacattccgaaaattcaacgcaaactccagaccatcaaggatgtagggctaggctatgtgaccttgggacagccagctaccaccctttctgggggagaagcccaacgtatgaagttagctagcgaactccacaaacgatcgacaggaaaatctttctacattctggatgagccgacgacagggcttcatacagaggacattgctcgcctgctcaaggttttagctcgctttgtagacgatggcaatacagtcctcgtcatcgagcacaatctggatgttatcaagacggcagaccatatcattgacttgggacctgagggcggtgtcggtggtggaaccatcatcgtaacaggaactccagaagaagtagctgccaacgaagccagctatacaggacactatttgaaaggaaagttacatcatgaa

SEQ ID NO: 182 - protein, 954 aa, Streptococcus pneumoniae
  excinuclease ABC, subunit A (uvrA); Cellular location: cytoplasm; Similar to strain R6 sequence 15902215 (0.E+01)
MVSNNGLERTKMQDKIVIHGARAHNLKNIDVEIPRDKLVVVTGLSGSGKSSLAFDTLYAEGQRRYVESLSAYARQFLGNMEKPDVDAIDGLSPAISIDQKTTSKNPRSTVGTTTEINDYLRLLYARVGTPYCINGHGAINASSVEQIVDKVLELPERQRLQILAPVIRKKKGQHKSVIEKVQKDGYVRVRVDGEVYDVTEVPELSKSKQHNIDVVVDRIVIKEGIRSRLFDSIEAALRIAEGYVIIDTMDDSELLFSEHYACPVCGFTVPELEPRLFSFNAPFGSCSECDGLGIKLEVDTDLVVPDASKTLREGALAPWNPISSNYYPNMLEQAMKVFGVAMDKPFEDLSEEDKNLILYGSDGKEFHFHYENEFGGVRDIDIPFEGVINNIKRRYHETNSDYTRTQMRLYMNELTCGTCQGYRLNDQALSVRVGGQQGPHIGEISDLSIADHLDLVSQLTLSENEAIIARPILKEIKDRLTFLNNVGLNYLTLSRSAGTLSGGESQRIRLATQIGSNLSGVLYILDEPSIGLHQRDNDRLIASLKKMRDLGNTLIVVEHDEDTMREADYLIDVGPGAGVFGGEIVAAGTPKQVARNSKSITGQYLSGKRVIPVPEERRVGNGRFIEVIGARENNLQNVTARFPLGKFIAVTGVSGSGKSTLINSILKKAIAQKLNRNSDKPGKFKTITGIEHVDRLIDIDQSPIGRTPRSNPATYTGVFDDIRDLFAQTNEAKIRGYKKGRFSFNVKGGRCEACSGDGIIKIEMHFLPDVYVACEVCHGTRYNSETLEVHYKEKNISQVLDMTVNDAVEFFQHIPKIQRKLQTIKDVGLGYVTLGQPATTLSGGEAQRMKLASELHKRSTGKSFYILDEPTTGLHTEDIARLLKVLARFVDDGNTVLVIEHNLDVIKTADHIIDLGPEGGVGGGTIIVTGTPEEVAANEASYTGHYLKGKLHHE

SEQ ID NO: 183 - DNA, 1059 bp, Streptococcus pneumoniae
atgaataaacgcgtacaagcatttctagctaaaatgcaagaaaaagaactagatggtatcatcatcaacaatcttaaaaacgtctattatttgactggtttttggggctcaaacggaacagtctttatcagtcgtgaccgtcaggtcttagtgacagactctcgctatatcatcgcagctaagcaagaaaccagtggttttgagattgtggctgatcgtgatgaattggctgtcattgcaggaattgttaaggacatgggcttgactcgtatcggttttgaagatgagatttcagtgtcttattaccaccgtatgcaggcagcttttgcaggtttgaacttgcttccacaaactcagtttgtggaaggtcttcgtatgattaaggatgaggcagagattgcagcgattcgcaaggcttgttctatctcagaccaagctttccgcgatgcgcttgactttatcaaaccaggaaaaactgaaattgagattgccaacttccttgatttccgcatgcgtgagttgggagcatctggcttatcttttgatacgatcctagctagcggtatcaattcttctaaaccccatgcccatccaatgcacaaaccagtggagttgggagaagccatcaccatggacttcggctgtctctatgaccactatgtcagtgatatgacccggactatctatctagggcatgttagcgatgagcaggcagagatttacaatacggttctaaaagctaaccaagccttgattgaccaagctaaggcaggcttaggtttccgtgactttgacaaaatccctcgtgatattatcattgaggcaggttatggtgactactttactcacggcattggccacggtattggtctggatatccatgaggaaccctactttagtcagacttctacagaaactattaagacaggtatggccttgaccgatgaaccaggtatctatatcgaaggcaaatatggcgttcgtatcgaggatgatatcctgattacagagacaggttgtgaattattgaccctagctccaaaagagttgatagtcatt

SEQ ID NO: 184 - protein, 353 aa, Streptococcus pneumoniae
  peptidase M24 family protein; Cellular location: cytoplasm; Similar to strain R6 sequence 15902216 (0.E+01)
MNKRVQAFLAKMQEKELDGIIINNLKNVYYLTGFWGSNGTVFISRDRQVLVTDSRYIIAAKQETSGFEIVADRDELAVIAGIVKDMGLTRIGFEDEISVSYYHRMQAAFAGLNLLPQTQFVEGLRMIKDEAEIAAIRKACSISDQAFRDALDFIKPGKTEIEIANFLDFRMRELGASGLSFDTILASGINSSKPHAHPMHKPVELGEAITMDFGCLYDHYVSDMTRTIYLGHVSDEQAEIYNTVLKANQALIDQAKAGLGFRDFDKIPRDIIIEAGYGDYFTHGIGHGIGLDIHEEPYFSQTSTETIKTGMALTDEPGIYIEGKYGVRIEDDILITETGCELLTLAPKELIVI

SEQ ID NO: 185 - DNA, 90 bp, Streptococcus pneumoniae
ttgtcaagaaaaaagtacgaaaatgacgaaaaaagtcaaaaaaaattaaaaataggtcgcaagtcggatgttttttatggtataatagac

SEQ ID NO: 186 - protein, 30 aa, Streptococcus pneumoniae
  hypothetical protein; Cellular location: cytoplasm
MSRKKYENDEKSQKKLKIGRKSDVFYGIID

SEQ ID NO: 187 - DNA, 396 bp, Streptococcus pneumoniae
atgattaaaatttatacagtctcaagttgtactagctgtaaaaaagcaaaaacctggctcaatgcccaccagttaagttataaagaacaaaaccttggtaaagaaggaattacgagagaagaattactggatattctaaccaaaacagataacggaatagccagcatcgtttcgtctaaaaatcgctatgccaaagcccttggagtggatattgaagatttgagtgtcaatgaagttctcaatctgattatggaaacaccgagaattttaaagagcccaatccttgtagatgaaaaacgcctgcaagttggctacaaggaagacgatattcgtgccttcctaccacgctctgtccgtaatgtagaaaatgcagaagcacgtttgcgtgcagctcta

SEQ ID NO: 188 - protein, 132 aa, Streptococcus pneumoniae
  conserved hypothetical protein (Arsenate reductase); Cellular location: cytoplasm; Similar to strain R6 sequence 15902217 (2.E-70)
MIKIYTVSSCTSCKKAKTWLNAHQLSYKEQNLGKEGITREELLDILTKTDNGIASIVSSKNRYAKALGVDIEDLSVNEVLNLIMETPRILKSPILVDEKRLQVGYKEDDIRAFLPRSVRNVENAEARLRAAL

SEQ ID NO: 189 - DNA, 117 bp, Streptococcus pneumoniae
atgcagaagcacgtttgcgtgcagctctataaacatcaaggctgggagcacttcccagtcttattctattttaatttcaaaaagaaagaagaaagaaatgaaaaaaatagttcttgt

SEQ ID NO: 190 - protein, 39 aa, Streptococcus pneumoniae
  hypothetical protein; Cellular location: cytoplasm
MQKHVCVQLYKHQGWEHFPVLFYFNFKKKEERNEKNSSC

SEQ ID NO: 191 - DNA, 567 bp, Streptococcus pneumoniae
atgaaaaaaatagttcttgttagtctagctttcctttttgtcctggttggttgcggacagaaaaaagaaactggaccagctacaaaaacagaaaaagatacgcttcagtcggcattgccagttattgaaaatgctgagaagaatacagttgtaactaagactttggtcttgcccaagtcagatgatggtagccagcagacacaaacaattacttacaaagacaagacttttttgagtctagctatccaacaaaaacgtccagtctctgatgagttgaagacttatattgaccaacatggagtggaggaaactcaaaaagctcttcttgaagcggaggagaaggataagtctatcattgaagctcgtaaattggcaggtttcaaacttgaaacaaaactattgagcgcaacggaacttcaaacaacgactagttttgattttcaagttctggatgtcaagaaggcttcccagttggaacatctgaagaatattggtttggaaaatcttttgaaaaatgaaccaagcaaatatatttcagatagattggcaaatggcgcgacagaacaa

SEQ ID NO: 192 - protein, 189 aa, Streptococcus pneumoniae
  hypothetical protein; Cellular location: lipoprotein; Similar to strain R6 sequence 15902218 (e-101)
MKKIVLVSLAFLFVLVGCGQKKETGPATKTEKDTLQSALPVIENAEKNTVVTKTLVLPKSDDGSQQTQTITYKDKTFLSLAIQQKRPVSDELKTYIDQHGVEETQKALLEAEEKDKSIIEARKLAGFKLETKLLSATELQTTTSFDFQVLDVKKASQLEHLKNIGLENLLKNEPSKYISDRLANGATEQ

SEQ ID NO: 193 - DNA, 264 bp, Streptococcus pneumoniae
atgggatttactgaagaaacagtacgttttaaattggacgattccaataaaaaagaaattagcgaaactttgacagatgtttatgcttcgttgaacgataagggttacaacccaattaaccaaatcgtaggttacgtattgagtggagaccctgcctacgttcctcgttataataatgcacgaaatcaaatccgtaagtatgagcgtgatgaaatcgttgaggaattggttcgctactacctcaaaggacaaggagtcgatcta

SEQ ID NO: 194 - protein, 88 aa, Streptococcus pneumoniae
  conserved hypothetical protein; Cellular location: cytoplasm; Similar to strain R6 sequence 15902219 (1.E-47)
MGFTEETVRFKLDDSNKKEISETLTDVYASLNDKGYNPINQIVGYVLSGDPAYVPRYNNARNQIRKYERDEIVEELVRYYLKGQGVDL

SEQ ID NO: 195 - DNA, 246 bp, Streptococcus pneumoniae
atgagaattatgggattggacgtcggttcaaaaacggtaggggtggcgattagcgatccgcttggttttacagctcaagggcttgaaatcatccagataaatgaagaacaaggccaatttggttttgaccgcgttaaggaattggttgatacttacaaggtggaacgatttgtagtgggcttgcctaaaaacatgaacaatacaagtggaccgcgcgtagaagctagtcaagctacggagcaaagc

SEQ ID NO: 196 - protein, 82 aa, Streptococcus pneumoniae
  conserved hypothetical protein, FRAMESHIFT
MRIMGLDVGSKTVGVAISDPLGFTAQGLEIIQINEEQGQFGFDRVKELVDTYKVERFVVGLPKNMNNTSGPRVEASQATEQS

SEQ ID NO: 197 - DNA, 126 bp, Streptococcus pneumoniae
ttgacaacagtggctgctgagcgcatgttgattgaacaagcagatatcagtcgcaataagcgcaagaaagtcattgataagttagcagctcagctgattttacaaaattatttagatagaaaattt

SEQ ID NO: 198 - protein, 42 aa, Streptococcus pneumoniae
  conserved hypothetical protein, FRAMESHIFT
MTTVAAERMLIEQADISRNKRKKVIDKLAAQLILQNYLDRKF

SEQ ID NO: 199 - DNA, 303 bp, Streptococcus pneumoniae
atgtcacacgatcataaccacgaccacgaagaacgtgaactaatcacactagtagatgagcaaggaaatgaaaccttgtttgaaatccttttgacaattgatggaaaagaagaatttggtaaaaactatgttcttctagtaccagttaacgcagaagaagacgaagacggacaagttgaaatccaagcttactcattcatcgaaaacgaagatggaacagaaggcgaattgcaaccaatcccagaagactcagaagacgaatggaacatgattgaagaagtcttcaacagctttatggaggag

SEQ ID NO: 200 - protein, 101 aa, Streptococcus pneumoniae
  conserved hypothetical protein; Cellular location: cytoplasm; Similar to strain R6 sequence 15902221 (2.E-56)
MSHDHNHDHEERELITLVDEQGNETLFEILLTIDGKEEFGKNYVLLVPVNAEEDEDGQVEIQAYSFIENEDGTEGELQPIPEDSEDEWNMIEEVFNSFMEE

SEQ ID NO: 201 - DNA, 96 bp, Streptococcus pneumoniae
ttgaagaagtcttcaacagctttatggaggagtgatacagtctgggagactgtatcagcccaactcccagaaatggggaagagttggaacgtccag

SEQ ID NO: 202 - protein, 32 aa, Streptococcus pneumoniae
  hypothetical protein; Cellular location: cytoplasm
MKKSSTALWRSDTVWETVSAQLPEMGKSWNVQ

SEQ ID NO: 203 - DNA, 93 bp, Streptococcus pneumoniae
ttggaacgtccagtgaacatttttaccccaactcccagaaatggggaagagttggaacgtccagtggatgtttttagcccatattcacattca

SEQ ID NO: 204 - protein, 31 aa, Streptococcus pneumoniae
  hypothetical protein; Cellular location: cytoplasm
MERPVNIFTPTPRNGEELERPVDVFSPYSHS

SEQ ID NO: 205 - DNA, 1248 bp, Streptococcus pneumoniae
atgtttgaagtagaagaatggctccatagtcggattggtttgaattttcgatcaggtttgggtcgaatgcagcaagcggtggatttgttaggaaatcctgagcagtcttaccctattatccacgtaacagggactaatgggaaaggatctaccattgcttttatgagggaattatttatggggcatggcaaaaaagttgcgacctttacctcccctcatatcgtctctatcaatgaccgaatctgcattaatgggcagcctatagcagacgcagactttatccgtttgactgatcaggtcaaggagatggagaaaacgcttctgcaaactcctgcccagttgtccttttttgaattgctgaccttggttgcttttctttattttagggagcaggaggtggatttggttttattagaagtgggaattggtggcttacttgacacgaccaatgtggtaactggagagtttgctgtcatcacctccattgggcttgaccatcaagaaaccttgggtgatagtctagaagcaattgcagagcagaaagctggtattttcaaggctggtaagaaggcagtgattgcgaaattgcctccagaagctaggcttgcctgtcagaaaaaagccgaatctttagctgttaacctttatcaggcaggtcaagattttttaatgctgaatggtgatttttcaagctctttactaaatctttcacagctgaacataggcttagaaggagtctatcagcaggagaatgcagccttggcgttgcaaacttttcttctttttatgagagaaagaaaggaagctgttgatgaacaggctgtaagaaaggccttggaacagacccattgggctggtcgcttggagcgtattcgcccacagatttatttggatggtgctcataacctccctgccttgactcgcttggctgagtttatcaaagaaaaagagcaggaaggctatcgacctcaaatcctctttggatccttgaaacgtaaggattatcaagggatgttgggttatctgactgaaaaattgcctcaggtggaactcaaggtgaccggctttgactatcagggggctttggacgaaagggatgtgacaggttacgatatagtttcttcttaccgagaatttatcagcgattttgaagaaagggcagacgctcaagacttgctgttcgttacagggtctctctattttatctcagaagtacggggctacctgctggaccgtgagcagataaat

SEQ ID NO: 206 - protein, 416 aa, Streptococcus pneumoniae
  dihydrofolate synthetase, putative; Cellular location: membrane; Similar to strain R6 sequence 15902222 (0.E+01)
MFEVEEWLHSRIGLNFRSGLGRMQQAVDLLGNPEQSYPIIHVTGTNGKGSTIAFMRELFMGHGKKVATFTSPHIVSINDRICINGQPIADADFIRLTDQVKEMEKTLLQTPAQLSFFELLTLVAFLYFREQEVDLVLLEVGIGGLLDTTNVVTGEFAVITSIGLDHQETLGDSLEAIAEQKAGIFKAGKKAVIAKLPPEARLACQKKAESLAVNLYQAGQDFLMLNGDFSSSLLNLSQLNIGLEGVYQQENAALALQTFLLFMRERKEAVDEQAVRKALEQTHWAGRLERIRPQIYLDGAHNLPALTRLAEFIKEKEQEGYRPQILFGSLKRKDYQGMLGYLTEKLPQVELKVTGFDYQGALDERDVTGYDIVSSYREFISDFEERADAQDLLFVTGSLYFISEVRGYLLDREQIN

SEQ ID NO: 207 - DNA, 99 bp, Streptococcus pneumoniae
ttgcagtattggtattctgttgagcaggttgttggacctgctgctgagcaacaggctgttgaacctgttgagctctttgtgaacaagctactaagagac

SEQ ID NO: 208 - protein, 33 aa, Streptococcus pneumoniae
  hypothetical protein
MQYWYSVEQVVGPAAEQQAVEPVELFVNKLLRD

SEQ ID NO: 209 - DNA, 543 bp, Streptococcus pneumoniae
ttgactccattttttgaacttgttatactaggggaattgctggttagagaaaatttctctaaattggtagcagaaaggaaattcatcatgaaattaaaaagattcacactttctcttgcttctctagcaagttttagtctcttagtagcttgttcacaaagagctcaacaggttcaacagcctgttgctcagcagcaggtccaacaacctgctcaacagaataccaatactgcaaatgcaggaggtaaccaaaatcaagcggctccagtacaaaaccaacctgttgctcaaccgaccgatattgatgggacttatactggtcaggatgacggagaccgtatcactttagtggtaactggaacgactggtacatggactgagctcgaatctgacggggatcagaaagtcaaacaggttacattggattcagcaaatcaacgcatgattattggcgatgatgtcaaaatttacactgtaaacggtaatcaaatcgtcgtagatgatatggatagagacccatcggaccaaatcgttttaactaaa

SEQ ID NO: 210 - protein, 181 aa, Streptococcus pneumoniae
  hypothetical protein; Cellular location: lipoprotein; Similar to strain R6 sequence 15902223 (9.E-76)
MTPFFELVILGELLVRENFSKLVAERKFIMKLKRFTLSLASLASFSLLVACSQRAQQVQQPVAQQQVQQPAQQNTNTANAGGNQNQAAPVQNQPVAQPTDIDGTYTGQDDGDRITLVVTGTTGTWTELESDGDQKVKQVTLDSANQRMIIGDDVKIYTVNGNQIVVDDMDRDPSDQIVLTK

SEQ ID NO: 211 - DNA, 1530 bp, Streptococcus pneumoniae
atgaaatataggaaatttcaattattgatgtccaagtatggctttagtctttcgattatgctacttgaactttgtcttgtttttggtctctttctttatttaggacgcatggctcccattttatggattactgtcctcattctactgagtatcatcacaatcatttcgatagtcaaccgtaatacgactcctgagaataaggtaacctggttgttagtagcctttgtgccagtatttggtcccttgctctatctgatgtttggtgaaaggcgattgtccaaaaaagaaatcaaacaactgaagaagctaggctctatgcatttccaagaagcaaatagccagctactaaaagagaaattaaaagaaagtgacaaggcagcttatggagtcatcaagtccttattgagtatggataccaatgctgacatctatgatcaaactgcctctacattttttcctaacggagaagctatgtggaaaaagatggtagaagatcttaaaaaggctgagaaatttattttcttggaatattacattatagaagaaggtttgatgtggaatcgcatactagatatactagagcaaaaggtagctcagggtgtagaggttaagatgctctatgatgatatcggctgtatggctactttaacaggagattatgcacatcgacttcgtcagctgggcatcgaggcccataaattcaataaagttattcctcgtttgacagtggcttataataacagagatcatagaaaaatattgattgttgatggtcagatagcctatactggtggggtcaatctggcagatgagtacattaaccacgtcgagagatttggttattggaaggatagtggaattcgcttagacggactagcagtaaaagctctgacacgcttatttttgaccacttggtacattaatcgaggagaaattagtgattttgatcaatatcatttagaaaatcattctatcccgagtgacggtttaaccattccatacggaagtggacccaagccaatttttcgagcgcaggtagggaaaaaagtttatcagagtttaatcaatcaagcaacagaatcggtctatattacgacaccttatttgattatagattatgatttaacagagacaatcaaaaatgcagctatgagaggggtcgatgttcgaattatcaccccttacataccagataagaagttcattcagttagtcacgagaggagcttatcccgaccttctttctgctggtgttcggatttatgagtatagtccaggttttattcatagtaagcagatgttggtagacgaagattttgcggtggtggggacaatcaatctcgactaccggagcttggtacaccattatgaaaatgcagtcttactctataaaactccttctataagggaaatcgcccgagattttcgaaatatatttgcagattctcaggaagtctatcctcattctatcaaaacgagctggtatcaaaagcttgtaaaagaaatcgcccagctattcgcccctatctta

SEQ ID NO: 212 - protein, 510 aa, Streptococcus pneumoniae
  cardiolipin synthetase (cls); Cellular location: membrane; Similar to strain R6 sequence 15902224 (0.E+01)
MKYRKFQLLMSKYGFSLSIMLLELCLVFGLFLYLGRMAPILWITVLILLSIITIISIVNRNTTPENKVTWLLVAFVPVFGPLLYLMFGERRLSKKEIKQLKKLGSMHFQEANSQLLKEKLKESDKAAYGVIKSLLSMDTNADIYDQTASTFFPNGEAMWKKMVEDLKKAEKFIFLEYYIIEEGLMWNRILDILEQKVAQGVEVKMLYDDIGCMATLTGDYAHRLRQLGIEAHKFNKVIPRLTVAYNNRDHRKILIVDGQIAYTGGVNLADEYINHVERFGYWKDSGIRLDGLAVKALTRLFLTTWYINRGEISDFDQYHLENHSIPSDGLTIPYGSGPKPIFRAQVGKKVYQSLINQATESVYITTPYLIIDYDLTETIKNAAMRGVDVRIITPYIPDKKFIQLVTRGAYPDLLSAGVRIYEYSPGFIHSKQMLVDEDFAVVGTINLDYRSLVHHYENAVLLYKTPSIREIARDFRNIFADSQEVYPHSIKTSWYQKLVKEIAQLFAPIL

SEQ ID NO: 213 - DNA, 1311 bp, Streptococcus pneumoniae
ttgaacaggagaaacgatatgagtgtgtatggtagagtagaagaagttcataaggagaatcgtgaacctctagaataccaaatcgaacaagaatcgcatcatcgtgaatcaagtcgtcttcctttggtgaaaattttactatggagtacgcttgtaacggggataactctaggagtaccgctattactcgacttaatgagtgcacaagaagtgcaggatttttatgcaggttgggcgcttcatcagacagggaagatttacagcgactattatggaagtcaaggtttgctttattatttgctgacttacgtgagtcagggcggatttttctttgccatctttgagtggttagccttggtagcaggaggatttttcctttttagatcagcggacaccttgacagagcaaggagaccaagctggacatctggtgactattttttacatgctagttacaggtcttgcttttggtggaggctatgcgactcttttagcgcttcctttcttattcgcagcctttagtttagttgcggcttacctaagcaatccaagccatgataagggatttgtacggattgggctagctttggcaggcggatttttctttgctcccttatcatcgctcctgtttattgctgtagtgagtttaggcttgttggtctttaaccttgggcatagacgctttgcgcatgggttttatcagtttcttgcagtggctttaggtttttcacttgtcttttatccaactgcctactatagtgctgcaacaggaagttttggggatgcgattagtggtattcgttatcctattgacagtattcgctttgattttacttctaaaattttagagaatatgtttttttatggcttgttgtcccttggtttgggatttgtggtttgtatctttttaggtctctttcaatccaaaccctttaaactatacgtcatttcggttcctgcaagtcttgtggtaattttaggtttgattttacttttcttttcacaagagcctctgcacgcttcttatttgatggtcgtcttccctgttttcctacttttattggtaaccaatattaagagtcaacagagggggcgtagtgctagaagaagccgaagagaaacgccagttagcctatggagtcgtttcttcaaaggaaatctatatctgctagtttttgggtttgtctatcttttgtctgttccttttttgatgaagtttgtcctttatccagtaccttatcaagaacgtaatcgtcttgctgatttggtaaaagaggagacaaatacggaagatgctatctcatgcatggga

SEQ ID NO: 214 - protein, 437 aa, Streptococcus pneumoniae
  competence-induced protein Ccs4 (ccs4); Cellular location: membrane; Similar to strain R6 sequence 15902226 (0.E+01)
MNRRNDMSVYGRVEEVHKENREPLEYQIEQESHHRESSRLPLVKILLWSTLVTGITLGVPLLLDLMSAQEVQDFYAGWALHQTGKIYSDYYGSQGLLYYLLTYVSQGGFFFAIFEWLALVAGGFFLFRSADTLTEQGDQAGHLVTIFYMLVTGLAFGGGYATLLALPFLFAAFSLVAAYLSNPSHDKGFVRIGLALAGGFFFAPLSSLLFIAVVSLGLLVFNLGHRRFAHGFYQFLAVALGFSLVFYPTAYYSAATGSFGDAISGIRYPIDSIRFDFTSKILENMFFYGLLSLGLGFVVCIFLGLFQSKPFKLYVISVPASLVVILGLILLFFSQEPLHASYLMVVFPVFLLLLVTNIKSQQRGRSARRSRRETPVSLWSRFFKGNLYLLVFGFVYLLSVPFLMKFVLYPVPYQERNRLADLVKEETNTEDAISCMG

SEQ ID NO: 215 - DNA, 264 bp, Streptococcus pneumoniae
atgctatctcatgcatgggatgatactgcgactctttatcgtaagagtgagcgcttgtcgccatcggcgattttgtccccgttgcactatacagcaactgaggaaaatcgtaataagttacttaatgacttgaaagaaaaacaacctaaggtgattgtggtaaatgataaggtggtagtctggtctgaagtggaaacactcttaaaagaaaattaccaacaagtaaagactgattactcagagtttaaagtctataaaattaaa

SEQ ID NO: 216 - protein, 88 aa, Streptococcus pneumoniae
  hypothetical protein; Cellular location: cytoplasm; Similar to strain R6 sequence 15902226 (6.E-45)
MLSHAWDDTATLYRKSERLSPSAILSPLHYTATEENRNKLLNDLKEKQPKVIVVNDKVVVWSEVETLLKENYQQVKTDYSEFKVYKIK

SEQ ID NO: 217 - DNA, 2211 bp, Streptococcus pneumoniae
atgcatatgattgcactagaagaaaaaattacaattttgccaactctcttcgtcgagaaacgagatgggagacgtgttgtatttgatgtggacaagattgacaaggctctccacaaggcggctgacaaggttatggatgtgacacccctggttgaaaaatgcctcaatgatctgactgagcgaattattacagaaattcatagtcgctttccacagggaattaagatttacgaaattcaaaatatcgtagaacatgaactccttgaagccaaagaatatgcgctggctgaggagtatattacttatcggacacagagggattttgagcgctcaaaagcgacggatatcaactttagtattcataaacttctcaacaaagaccagacagttgtcaatgaaaacgctaataaagacagtgatgtctttaacactcagcgtgatttgacagcagggattgttgggaaatcaatcggactgcaaatgcttcctaagcacgtagccaatgcccaccaaaagggggatatccactatcacgatttggactacagtccctatacccctatgaccaactgctgtttgattgattttaagggtatgttggaaaatggttttaagattggaaatgcagaggtagagagtcccaagtctatccagactgcgacagcacagatttctcaaatcattgccaacgttgcttctagccagtacggtggctgttcagctgaccgtatcgatgaaattttggcgccttatgcagagaagaattatcaaaaacatctcaaagatgcagaagagtgggtattgcctgaaaaacaggaagattacgcttggaagaaagcgcaaaaggacatctacgatgccatgcaatctcttgagtatgaaatcaatactctcttcacttcaaatggacaaacaccttttacttcgttaggttttggtctgggaaccagtcgttttgaacgagaaattcaaaaagctattttaaacattcgcatcaagggtcttggttcagaacaccgtacggctatctttcctaaacttatctttacgcttaaaagaggcctcaacttagaggaaggaactcccaactatgacatcaagcagttggctctagagtgtgcaaccaagcggatgtatccagacgtcttgtcttatgataagattgttgatttgacaggttctttcaaggtgcctatgggctgccgttctttccttcaagggtggaaggatgaaaatggtgtagaagtcaattcaggtcgcatgaatctgggtgttgtgacggttaatctgcctcgtattgctcttgagtctgaaggtgatatgaataagttctgggaaatcttcaacgagcgaatgaatatcgcagaagatgctcttgtttaccgtgtcgaacgcactaaagaggcgacaccagcgaatgctcctattctttatcagtacggtgcttttggccatcgtctaggtaaagaagaaagtgttgaccagctctttaagaatcgtcgtgcgaccgtttcgctgggctatatcggcttgtatgaagtagcgacagttttctttggtaacagctgggaaagtaatccagatgctaaggaattcacgctagacatcattcacgatatgaaacgccgtgtagaagagtggtcagaccaatatggctaccatttctctatctactcaacaccatccgaaagtctgacagaccgtttctgccgactagatatagacaagtttggctctattcctgatatcacagacaaggaatactacaccaactctttccactacgatgttcgtaaaaatccaacaccgtttgaaaaattggactttgagaaagtctatccggaagcaggtgcgtcaggtggtttcatccattattgtgagtatccagtccttcagcaaaatccaaaggccttggaagctgtctgggattatgcttatgaccgtgtaggctatctaggcaccaatactccgattgaccgttgctacaagtgtgactttgaaggggattttgaaccaactgagagagggtttgcttgtccaaactgtggcaatagcgaccctaaaacagtagatgtggtgaaacgaacttgtggctacctaggtaatcctcaagcaagaccgatggtcaacgggcgtcacaaggaaatcgctgcgcgtgtcaaacatatgaatggttcaacgattaaaatagctgggcatcaagtaacaaat

SEQ ID NO: 218 - protein, 737 aa, Streptococcus pneumoniae
  anaerobic ribonucleoside-triphosphate reductase (nrdD); Cellular location: cytoplasm; Similar to strain R6 sequence 15902227 (0.E+01)
MHMIALEEKITILPTLFVEKRDGRRVVFDVDKIDKALHKAADKVMDVTPLVEKCLNDLTERIITEIHSRFPQGIKIYEIQNIVEHELLEAKEYALAEEYITYRTQRDFERSKATDINFSIHKLLNKDQTVVNENANKDSDVFNTQRDLTAGIVGKSIGLQMLPKHVANAHQKGDIHYHDLDYSPYTPMTNCCLIDFKGMLENGFKIGNAEVESPKSIQTATAQISQIIANVASSQYGGCSADRIDEILAPYAEKNYQKHLKDAEEWVLPEKQEDYAWKKAQKDIYDAMQSLEYEINTLFTSNGQTPFTSLGFGLGTSRFEREIQKAILNIRIKGLGSEHRTAIFPKLIFTLKRGLNLEEGTPNYDIKQLALECATKRMYPDVLSYDKIVDLTGSFKVPMGCRSFLQGWKDENGVEVNSGRMNLGVVTVNLPRIALESEGDMNKFWEIFNERMNIAEDALVYRVERTKEATPANAPILYQYGAFGHRLGKEESVDQLFKNRRATVSLGYIGLYEVATVFFGNSWESNPDAKEFTLDIIHDMKRRVEEWSDQYGYHFSIYSTPSESLTDRFCRLDIDKFGSIPDITDKEYYTNSFHYDVRKNPTPFEKLDFEKVYPEAGASGGFIHYCEYPVLQQNPKALEAVWDYAYDRVGYLGTNTPIDRCYKCDFEGDFEPTERGFACPNCGNSDPKTVDVVKRTCGYLGNPQARPMVNGRHKEIAARVKHMNGSTIKIAGHQVTN

SEQ ID NO: 219 - DNA, 138 bp, Streptococcus pneumoniae
atgggaaaatatcaactagacgataaggggcgcgcacaagtgacccgttatcacgagaaacactctaaaggtggagctggtaagaaagaacgcttgcttagcttcagagaacaatttttaaacaagaacaagaaaaaa

SEQ ID NO: 220 - protein, 46 aa, Streptococcus pneumoniae
  hypothetical protein; Cellular location: cytoplasm
MGKYQLDDKGRAQVTRYHEKHSKGGAGKKERLLSFREQFLNKNKKK

SEQ ID NO: 221 - DNA, 504 bp, Streptococcus pneumoniae
atggaattacgcagaccaagattagcggataagaaagctgttttagatatgatgacagagtttgaaaaatttcagtcgcctcacgacggcggtttctgggatacagagaactttgtgtatgaagactggttagaaagcaatcaggaacaggaaatggggattaatctgcctgaaggatgggtttctgcaattcagttagtggctttttctgagaaaggtcaagcagttggatttcttaatctccggttgcgcctcagtaactttctactagaagaaggtggccacattggctactccattcgtccatctgaaagaggcaagggttatgcaaaagagactctccgtcagggcttgcaagttgctaaggaaaagaacatcaagaaagctctggtgacctgtagtgtgaataatcctgctagcagagcagtcattctagcaaatggtggaatatttgaggatgctcgcaatggagtcgagcgttattggatagaggtagcgaatgaa

SEQ ID NO: 222 - protein, 168 aa, Streptococcus pneumoniae
  acetyltransferase, GNAT family; Cellular location: cytoplasm; Similar to strain R6 sequence 15902228 (3.E-95)
MELRRPRLADKKAVLDMMTEFEKFQSPHDGGFWDTENFVYEDWLESNQEQEMGINLPEGWVSAIQLVAFSEKGQAVGFLNLRLRLSNFLLEEGGHIGYSIRPSERGKGYAKETLRQGLQVAKEKNIKKALVTCSVNNPASRAVILANGGIFEDARNGVERYWIEVANE

SEQ ID NO: 223 - DNA, 588 bp, Streptococcus pneumoniae
atgaataatccaaaaccacaagaatggaaaagcgaggaacttagtcaaggtcgtatcattgactacaaggcctttaactttgtggacggcgaaggcgtgcgcaactctctctatgtatcaggctgtatgtttcactgcgagggatgttataatgttgcgacttggtcttttaatgctggcattccctatacagcagaattagaagagcagattatggcagaccttgcccaaccctatgttcaaggcttgactttgctgggaggggagccttttctcaatactgggattctcttgccacttgttaagcggattcggaaggaattgccagacaaggacatctggtcctggaccggctacacttgggaagaaatgatgttggaaactccagataaactggaattcttgtcactgattgacattcttgtcgatggaagatatgatcgaactaagagaaatcttatgctccagtttcgaggttcatctaaccaacgaattatcgatgtgcaaaaatcgctcaaaagtgggcaagtagtgatttgggacaagctcaatgacggaaaagaaagctatgaacaggtgaagagagaa

SEQ ID NO: 224 - protein, 196 aa, Streptococcus pneumoniae
  anaerobic ribonucleoside-triphosphate reductase activating protein (nrd; Cellular location: cytoplasm; Similar to strain R6 sequence 15902229 (e-114)
MNNPKPQEWKSEELSQGRIIDYKAFNFVDGEGVRNSLYVSGCMFHCEGCYNVATWSFNAGIPYTAELEEQIMADLAQPYVQGLTLLGGEPFLNTGILLPLVKRIRKELPDKDIWSWTGYTWEEMMLETPDKLEFLSLIDILVDGRYDRTKRNLMLQFRGSSNQRIIDVQKSLKSGQVVIWDKLNDGKESYEQVKRE

SEQ ID NO: 225 - DNA, 300 bp, Streptococcus pneumoniae
atgaagaaaaaggacttagtagaccaactagtctcagagatcgagacggggaaagtcaggacactgggaatatacggtcatggagcttcaggtaaatcaacctttgcacaggaattgtaccaagctttagattctactacagtaaatttgctagagacagatccttatatcacctcaggacgccatctggtagtacccaaggacgcgccgaatcaaaaggtgacagccagtctgccagtggcgcatgaactggagagtttgcagagagatatccttgcttgcaggcgggtatggatgtct

SEQ ID NO: 226 - protein, 100 aa, Streptococcus pneumoniae
  hypothetical protein; Cellular location: cytoplasm; Similar to strain R6 sequence 15902230 (2.E-48)
MKKKDLVDQLVSEIETGKVRTLGIYGHGASGKSTFAQELYQALDSTTVNLLETDPYITSGRHLVVPKDAPNQKVTASLPVAHELESLQRDILACRRVWMS

SEQ ID NO: 227 - DNA, 336 bp, Streptococcus pneumoniae
ttgcaggcgggtatggatgtcttgacaattgaagaaccttggaaggctagtgaggtcttgtctggagccaaaccaattttgattgtcgaagggatgtctgttggctttctacccaaggaactctttgaaaaaaccatctgtttctacacggatgaggagaccgaattaaagcgacgccttgctagagatacgactgtgagaaatcgcgatgcatcctttatattggctagccatcagatgagacgggagcagtatctgcgatactataaagaaactgagtctaaggcggatatcttagtggaccaatcagaagataaatttgatgtcaagaggact

SEQ ID NO: 228 - protein, 112 aa, Streptococcus pneumoniae
  conserved domain protein; Cellular location: cytoplasm; Similar to strain R6 sequence 15902230 (5.E-60)
MQAGMDVLTIEEPWKASEVLSGAKPILIVEGMSVGFLPKELFEKTICFYTDEETELKRRLARDTTVRNRDASFILASHQMRREQYLRYYKETESKADILVDQSEDKFDVKRT

SEQ ID NO: 229 - DNA, 306 bp, Streptococcus pneumoniae
atggcaaacaaaaaaatccgtatccgtttgaaagcttacgaacaccgtacgcttgacacagcggctgcaaaaatcgtagaatcagctactcgtacaggtgcacaagttgcgggtccaatcccacttccaactgaacgtagcctctacacaatcattcgtgcgactcacaaatacaaagactctcgcgaacaatttgaaatgcgtacacacaaacgtttgatcgatatcgttaacccaactcaaaaaacagttgatgccttgatgaaattggatcttccaagtggtgtaaacgtagaaatcaaactt

SEQ ID NO: 230 - protein, 102 aa, Streptococcus pneumoniae
  ribosomal protein S10 (rpsJ); Cellular location: cytoplasm; Similar to strain R6 sequence 15902231 (1.E-53)
MANKKIRIRLKAYEHRTLDTAAAKIVESATRTGAQVAGPIPLPTERSLYTIIRATHKYKDSREQFEMRTHKRLIDIVNPTQKTVDALMKLDLPSGVNVEIKL

SEQ ID NO: 231 - DNA, 624 bp, Streptococcus pneumoniae
atgacaaaaggaatcttagggaaaaaagtgggaatgactcaaatcttcactgaagctggcgaattgatccctgtaacagttattgaagcaactccaaacgttgttcttcaagttaaaactgttgaaacagacggatacaacgctatccaagttggtttcgatgacaaacgcgaagtattgagcaacaaacctgctaaaggacatgtagcgaaagctaacacggctcctaagcgcttcattcgtgaattcaaaaacgttgaaggcttggaagttggtgctgaaattacagttgaaacattcgcagctggagacgttgttgacgtaacgggtacttctaaaggtaaaggtttccaaggtgttatcaaacgccacggacaatcacgtggaccaatggctcacggttctcgttaccaccgtcgtccaggttctatggggcctgttgcacctaaccgcgtattcaaaggtaaaaaccttgcaggacgtatgggtggcgaccgcgtaacaattcaaaaccttgaagttgtacaagttgttccagaaaagaacgttatccttatcaaaggtaacgtaccaggtgctaagaaatctcttatcactatcaaatcagcagttaaagctggtaaa

SEQ ID NO: 232 - protein, 208 aa, Streptococcus pneumoniae
  ribosomal protein L3 (rplC); Cellular location: cytoplasm; Similar to strain R6 sequence 15902232 (e-116)
MTKGILGKKVGMTQIFTEAGELIPVTVIEATPNVVLQVKTVETDGYNAIQVGFDDKREVLSNKPAKGHVAKANTAPKRFIREFKNVEGLEVGAEITVETFAAGDVVDVTGTSKGKGFQGVIKRHGQSRGPMAHGSRYHRRPGSMGPVAPNRVFKGKNLAGRMGGDRVTIQNLEVVQVVPEKNVILIKGNVPGAKKSLITIKSAVKAGK

SEQ ID NO: 233 - DNA, 621 bp, Streptococcus pneumoniae
atggcaaacgtaacattatttgaccaaactggtaaagaagctggccaagttgttcttagcgatgcagtatttggtatcgaaccaaatgaatcagttgtgtttgatgtaatcatcagccaacgcgcaagccttcgtcaaggaacacacgctgttaaaaaccgctctgcagtatcaggtggtggacgcaaaccatggcgtcaaaaaggaactggacgtgctcgtcaaggttctatccgctcaccacaatggcgtggtggtggtgttgtcttcggaccaactccacgttcatacggctacaaacttccacaaaaagttcgtcgcctagctcttaaatcagtttactctgaaaaagttgctgaaaacaaattcgtagctgtagacgctctttcatttacagctccaaaaactgctgaatttgcaaaagttcttgcagcattgagcatcgattctaaagttcttgttatccttgaagaaggaaatgaattcgcagctctttcagctcgtaaccttccaaacgtgaaagttgcaactgctacaactgcaagtgttcttgacatcgcaaatagcgacaaacttcttgtcacacaagcagctatctctaaaatcgaggaggttcttgca

SEQ ID NO: 234 - protein, 207 aa, Streptococcus pneumoniae
  ribosomal protein L4 (rplD); Cellular location: membrane; Similar to strain R6 sequence 15902233 (e-112)
MANVTLFDQTGKEAGQVVLSDAVFGIEPNESVVFDVIISQRASLRQGTHAVKNRSAVSGGGRKPWRQKGTGRARQGSIRSPQWRGGGVVFGPTPRSYGYKLPQKVRRLALKSVYSEKVAENKFVAVDALSFTAPKTAEFAKVLAALSIDSKVLVILEEGNEFAALSARNLPNVKVATATTASVLDIANSDKLLVTQAAISKIEEVLA

SEQ ID NO: 235 - DNA, 294 bp, Streptococcus pneumoniae
atgaatttgtatgatgttatcaaaaaacctgtcatcactgaaagctcaatggctcaacttgaagcaggaaaatatgtatttgaagttgacactcgtgcacacaaacttttgatcaagcaagctgttgaagctgctttcgaaggtgttaaagttgccaatgttaacacaatcaacgtaaaaccaaaagctaaacgtgttggacgttacactggttttactaacaaaactaaaaaagctatcatcacacttacagctgattctaaagcaatcgagttgtttgctgctgaagctgaa

SEQ ID NO: 236 - protein, 98 aa, Streptococcus pneumoniae
  ribosomal protein L23 (rplW); Cellular location: cytoplasm; Similar to strain R6 sequence 15902234 (3.E-50)
MNLYDVIKKPVITESSMAQLEAGKYVFEVDTRAHKLLIKQAVEAAFEGVKVANVNTINVKPKAKRVGRYTGFTNKTKKAIITLTADSKAIELFAAEAE

SEQ ID NO: 237 - DNA, 831 bp, Streptococcus pneumoniae
gtgggaattcgtgtttataaaccaacaacaaacggtcgccgtaatatgacttctttggatttcgctgaaatcacaacaagcactcctgaaaaatcattgcttgttgcattgaagagcaaggctggtcgtaacaacaacggtcgtatcacagttcgtcaccaaggtggtggacacaaacgtttctaccgtttggttgacttcaaacgtaataaagacaacgttgaagcagttgttaaaacaatcgagtacgatccaaaccgttctgcaaacatcgctcttgtacactacactgacggtgtgaaagcatacatcatcgctccaaaaggtcttgaagtaggtcaacgtatcgtttcaggtccagaagcagatatcaaagtcggaaacgctcttccacttgctaacatcccagttggtactttgattcacaacatcgagttgaaaccaggtcgtggtggtgaattggtacgtgctgctggtgcatctgctcaagtattgggttctgaaggtaaatatgttcttgttcgtcttcaatcaggtgaagttcgtatgattcttggaacttgccgtgctacagttggtgttgtcggaaacgaacaacatggacttgtaaaccttggtaaagcaggacgtagccgttggaaaggtatccgcccaacagttcgtggttctgtaatgaaccctaacgatcacccacacggtggtggtgaaggtaaagcaccagttggtcgtaaagcaccatctactccatggggcaaacctgctcttggtcttaaaactcgtaacaagaaagcgaaatctgacaaacttatcgttcgtcgtcgcaacgagaaa

SEQ ID NO: 238 - protein, 277 aa, Streptococcus pneumoniae
  ribosomal protein L2 (rplB); Cellular location: cytoplasm; Similar to strain R6 sequence 15902235 (e-160)
MGIRVYKPTTNGRRNMTSLDFAEITTSTPEKSLLVALKSKAGRNNNGRITVRHQGGGHKRFYRLVDFKRNKDNVEAVVKTIEYDPNRSANIALVHYTDGVKAYIIAPKGLEVGQRIVSGPEADIKVGNALPLANIPVGTLIHNIELKPGRGGELVRAAGASAQVLGSEGKYVLVRLQSGEVRMILGTCRATVGVVGNEQHGLVNLGKAGRSRWKGIRPTVRGSVMNPNDHPHGGGEGKAPVGRKAPSTPWGKPALGLKTRNKKAKSDKLIVRRRNEK

SEQ ID NO: 239 - DNA, 279 bp, Streptococcus pneumoniae
atgggacgcagtcttaaaaaaggacctttcgtcgatgagcatttgatgaaaaaagttgaagctcaagctaacgacgaaaagaaaaaagttattaaaacttggtcacgtcgttcaacgatcttcccaagtttcattggttacactattgcagtttatgacggacgtaaacacgtacctgtttacatccaagaagacatggtaggccacaaacttggtgaatttgcaccaactcgtacttacaaaggtcacgctgcagacgacaagaaaacacgtagaaaa

SEQ ID NO: 240 - protein, 93 aa, Streptococcus pneumoniae
  ribosomal protein S19 (rpsS); Cellular location: cytoplasm; Similar to strain R6 sequence 15902236 (1.E-51)
MGRSLKKGPFVDEHLMKKVEAQANDEKKKVIKTWSRRSTIFPSFIGYTIAVYDGRKHVPVYIQEDMVGHKLGEFAPTRTYKGHAADDKKTRRK

SEQ ID NO: 241 - DNA, 342 bp, Streptococcus pneumoniae
atggcagaaattacttcagctaaagcaatggctcgtacagtacgtgtttcacctcgtaaatcacgtcttgttcttgataacatccgtggtaaaagcgtagccgatgcaatcgcaatcttgacattcactccaaacaaagctgctgaaatcatcttgaaagttttgaactcagctgtagctaacgctgaaaacaactttggtttggataaagctaacttggtagtatctgaagcattcgcaaacgaaggaccaactatgaaacgtttccgtccacgtgcgaaaggttcagcttcaccaatcaacaaacgtacagctcacatcactgtagctgttgcagaaaaa

SEQ ID NO: 242 - protein, 114 aa, Streptococcus pneumoniae
  ribosomal protein L22 (rplV); Cellular location: cytoplasm; Similar to strain R6 sequence 15902238 (2.E-58)
MAEITSAKAMARTVRVSPRKSRLVLDNIRGKSVADAIAILTFTPNKAAEIILKVLNSAVANAENNFGLDKANLVVSEAFANEGPTMKRFRPRAKGSASPINKRTAHITVAVAEK

SEQ ID NO: 243 - DNA, 651 bp, Streptococcus pneumoniae
gtgggtcaaaaagtacatccaattggtatgcgtgtcggcatcatccgtgattgggatgccaaatggtatgctgaaaaagaatacgcggattaccttcatgaagatcttgcaatccgtaaattcgttcaaaaagaacttgctgacgcagcagtttcaactattgaaatcgaacgcgcagtaaacaaagttaacgtttcacttcacactgctaaaccaggtatggttatcggtaaaggtggtgctaacgttgatgcactccgtgcaaaacttaacaaattgactggaaaacaagtacacatcaacatcatcgaaatcaaacaacctgatttggatgctcaccttgtaggtgaaggaattgctcgtcaattggagcaacgtgttgctttccgtcgtgcacaaaaacaagcaatccaacgtgcaatgcgtgctggagctaaaggaatcaaaactcaagtatcaggtcgtttgaacggtgcagatatcgcccgtgctgaaggatactctgaaggaactgttccgcttcacacacttcgtgcagatatcgattacgcttgggaagaagcagatactacatacggtaaacttggtgttaaagtatggatctaccgtggtgaagttcttccagctcgtaaaaacactaaaggaggtaaa

SEQ ID NO: 244 - protein, 217 aa, Streptococcus pneumoniae
  ribosomal protein S3 (rpsC); Cellular location: cytoplasm; Similar to strain R6 sequence 15902239 (e-123)
MGQKVHPIGMRVGIIRDWDAKWYAEKEYADYLHEDLAIRKFVQKELADAAVSTIEIERAVNKVNVSLHTAKPGMVIGKGGANVDALRAKLNKLTGKQVHINIIEIKQPDLDAHLVGEGIARQLEQRVAFRRAQKQAIQRAMRAGAKGIKTQVSGRLNGADIARAEGYSEGTVPLHTLRADIDYAWEEADTTYGKLGVKVWIYRGEVLPARKNTKGGK

SEQ ID NO: 245 - DNA, 411 bp, Streptococcus pneumoniae
atgttagtacctaaacgtgttaaacaccgtcgtgagttccgtggaaaaatgcgcggtgaagcaaaaggtggaaaagaagtagcattcggtgaatacggtcttcaagctacaactagccactggatcactaaccgccaaatcgaagctgctcgtatcgccatgactcgttacatgaaacgtggtggtaaagtttggattaaaatcttcccacacaaatcatacactgctaaagctatcggtgtgcgtatgggatctggtaaaggggcacctgaaggttgggtagcaccagttaaacgtggtaaagtgatgttcgaaatcgctggtgtatctgaagagattgcacgtgaagcgcttcgacttgctagccacaaattgccagttaaatgtaaattcgtaaaacgtgaagcagaa

SEQ ID NO: 246 - protein, 137 aa, Streptococcus pneumoniae
  ribosomal protein L16 (rplP); Cellular location: cytoplasm; Similar to strain R6 sequence 15902240 (6.E-77)
MLVPKRVKHRREFRGKMRGEAKGGKEVAFGEYGLQATTSHWITNRQIEAARIAMTRYMKRGGKVWIKIFPHKSYTAKAIGVRMGSGKGAPEGWVAPVKRGKVMFEIAGVSEEIAREALRLASHKLPVKCKFVKREAE

SEQ ID NO: 247 - DNA, 204 bp, Streptococcus pneumoniae
atgaaacttaatgaagtaaaagaatttgttaaagaacttcgtggtctttctcaagaagaactcgcgaagcgcgaaaacgaattgaaaaaagaattgtttgaacttcgtttccaagctgctactggtcaattggaacaaacagctcgcttgaaagaagttaaaaaacaaatcgctcgcatcaaaacagttcaatctgaagcgaaa

SEQ ID NO: 248 - protein, 68 aa, Streptococcus pneumoniae
  ribosomal protein L29 (rpmC); Cellular location: cytoplasm; Similar to strain R6 sequence 15902241 (1.E-32)
MKLNEVKEFVKELRGLSQEELAKRENELKKELFELRFQAATGQLEQTARLKEVKKQIARIKTVQSEAK

SEQ ID NO: 249 - DNA, 396 bp, Streptococcus pneumoniae
ttgaactgttttgatgcgagcgatttgttttttaacttctttcaagcgagctgtttgttccaattgaccagtagcagcttggaaacgaagttcaaacaattcttttttcaattcgttttcgcgcttcgcgagttcttcttgagaaagaccacgaagttctttaacaaattcttttacttcattaagtttcatgccttctccttattctgcttcacgttttacgaatttacatttaactggcaatttgtggctagcaagtcgaagcgcttcacgtgcaatctcttcagatacaccagcgatttcgaacatcactttaccacgtttaactggtgctacccaaccttcaggtgcccctttaccagatcccatacgcacaccgatagctttagcagtgta

SEQ ID NO: 250 - protein, 132 aa, Streptococcus pneumoniae
  hypothetical protein
MNCFDASDLFFNFFQASCLFQLTSSSLETKFKQFFFQFVFALREFFLRKTTKFFNKFFYFIKFHAFSLFCFTFYEFTFNWQFVASKSKRFTCNLFRYTSDFEHHFTTFNWCYPTFRCPFTRSHTHTDSFSSV

SEQ ID NO: 251 - DNA, 258 bp, Streptococcus pneumoniae
atggaacgcaataatcgtaaagttcttgttggacgtgttgtatctgacaaaatggacaagacaatcacagttgtagttgaaacaaaacgtaaccacccagtctatggtaaacgtattaactactctaaaaaatacaaagctcatgatgaaaacaatgttgccaaagaaggcgatatcgtacgtatcatggaaactcgcccgctttcagctacaaaacgtttccgtcttgtagaagttgttgaagaagcggtcatcatc

SEQ ID NO: 252 - protein, 86 aa, Streptococcus pneumoniae
  ribosomal protein S17 (rpsQ); Cellular location: cytoplasm; Similar to strain R6 sequence 15902242 (1.E-44)
MERNNRKVLVGRVVSDKMDKTITVVVETKRNHPVYGKRINYSKKYKAHDENNVAKEGDIVRIMETRPLSATKRFRLVEVVEEAVII

SEQ ID NO: 253 - DNA, 366 bp, Streptococcus pneumoniae
atgattcaaacagaaactcgtttgaaagtcgcagacaacagcggtgctcgcgaaatcttgactatcaaagttcttggtggttcaggacgtaaatttgcaaacatcggtgatgttatcgtggcatctgtaaaacaagctactcctggtggtgcggttaaaaaaggtgacgttgttaaagcagttatcgttcgtactaaatcaggtgctcgtcgtgctgatggttcatacatcaaatttgacgaaaacgcagcagttatcatccgtgaagacaaaactcctcgcggaacacgtatctttggcccagttgcacgtgaattgcgtgaaggtggcttcatgaagatcgtgtcacttgctccagaagtactt

SEQ ID NO: 254 - protein, 122 aa, Streptococcus pneumoniae
  ribosomal protein L14 (rplN); Cellular location: cytoplasm; Similar to strain R6 sequence 15902243 (1.E-63)
MIQTETRLKVADNSGAREILTIKVLGGSGRKFANIGDVIVASVKQATPGGAVKKGDVVKAVIVRTKSGARRADGSYIKFDENAAVIIREDKTPRGTRIFGPVARELREGGFMKIVSLAPEVL

SEQ ID NO: 255 - DNA, 303 bp, Streptococcus pneumoniae
atgtttgtaaaaaaaggcgacaaagttcgcgtaatcgctggtaaagataagggaacagaagctgttgtccttactgcccttccaaaagtaaacaaagttatcgttgaaggtgttaacattgttaagaaacaccaacgtccaactaacgagcttcctcaaggtggtatcatcgagaaagaagcagctatccacgtatcaaacgttcaagttttggacaaaaatggtgtagctggtcgtgttggatacaaatttgtagacggtaaaaaagttcgctacaacaaaaaatcaggcgaagtgcttgat

SEQ ID NO: 256 - protein, 101 aa, Streptococcus pneumoniae
  ribosomal protein L24 (rplX); Cellular location: cytoplasm; Similar to strain R6 sequence 15902244 (2.E-53)
MFVKKGDKVRVIAGKDKGTEAVVLTALPKVNKVIVEGVNIVKKHQRPTNELPQGGIIEKEAAIHVSNVQVLDKNGVAGRVGYKFVDGKKVRYNKKSGEVLD

SEQ ID NO: 257 - DNA, 540 bp, Streptococcus pneumoniae
atggcaaatcgtttaaaagaaaaatatcttaatgaagtagttcctgctttgacagaacaattcaactactcatcagtgatggctgtgcctaaagtagataagattgttttgaacatgggtgttggtgaagctgtatcaaacgctaaaagccttgaaaaagctgctgaagaattggcacttatctcaggtcaaaaaccacttatcactaaagctaaaaaatcaatcgccggcttccgtcttcgtgaaggtgttgcgatcggtgcaaaagttacccttcgtggtgaacgtatgtacgaattcttggataaattggtatcagtttcacttccacgtgtacgtgacttccacggtgtcccaacaaaatcatttgatggacgcgggaactacacacttggtgtgaaagaacaattaatcttcccagaaatcaacttcgatgacgttgacaaaactcgtggtcttgacatcgttatcgtaacaactgctaacactgacgaagagtcacgtgcattgcttacaggccttggaatgccttttgcaaaa

SEQ ID NO: 258 - protein, 180 aa, Streptococcus pneumoniae
  ribosomal protein L5 (rplE); Cellular location: cytoplasm; Similar to strain R6 sequence 15902245 (8.E-98)
MANRLKEKYLNEVVPALTEQFNYSSVMAVPKVDKIVLNMGVGEAVSNAKSLEKAAEELALISGQKPLITKAKKSIAGFRLREGVAIGAKVTLRGERMYEFLDKLVSVSLPRVRDFHGVPTKSFDGRGNYTLGVKEQLIFPEINFDDVDKTRGLDIVIVTTANTDEESRALLTGLGMPFAK

SEQ ID NO: 259 - DNA, 267 bp, Streptococcus pneumoniae
atggctaaaaaatcaatggtagctagagaggctaaacgccaaaaaattgttgaccgttatgctgaaaaacgtgctgcattaaaggcggcaggggactacgaaggtttatctaaattacctcgcaacgcctcaccgactcgtttacataatcgttgtagggttacggggcgcccacattcagtttaccgcaaatttggtctgagtcgtatcgcttttcgcgaacttgcgcataaaggtcaaattcctggtgtaacaaaagcatcttgg

SEQ ID NO: 260 - protein, 89 aa, Streptococcus pneumoniae
  ribosomal protein S14 (rpsN); Cellular location: cytoplasm; Similar to strain R6 sequence 15902246 (8.E-48)
MAKKSMVAREAKRQKIVDRYAEKRAALKAAGDYEGLSKLPRNASPTRLHNRCRVTGRPHSVYRKFGLSRIAFRELAHKGQIPGVTKASW

SEQ ID NO: 261 - DNA, 120 bp, Streptococcus pneumoniae
gtgaaaaagataaactttcctagaaactttagtttcttcgtcaagtttcctatttttacttggagttttgacgctcttgatatcttaaattaccaagatgcttttgttacaccaggaatt

SEQ ID NO: 262 - protein, 40 aa, Streptococcus pneumoniae
  hypothetical protein; Cellular location: cytoplasm
MKKINFPRNFSFFVKFPIFTWSFDALDILNYQDAFVTPGI

SEQ ID NO: 263 - DNA, 396 bp, Streptococcus pneumoniae
atggttatgactgacccaatcgcagacttcctaactcgtattcgtaatgctaaccaagctaaacacgaagtacttgaagtacctgcatcaaacatcaaaaaagggattgctgaaatccttaaacgcgaaggttttgtaaaaaacgttgaaatcattgaagatgacaaacaaggcgtcatccgtgtatttcttaaatacggaccaaatggtgagaaagttatcactaacttgaaacgtgtttctaaaccaggacttcgtgtctacaaaaaacgtgaagaccttccaaaagttcttaacggacttggaattgccatcctttcaacttctgaaggtttgcttactgataaagaagcacgccaaaagaatgttggtggtgaggttatcgcttacgtttgg

SEQ ID NO: 264 - protein, 132 aa, Streptococcus pneumoniae
  ribosomal protein S8 (rpsH); Cellular location: cytoplasm; Similar to strain R6 sequence 15902247 (3.E-71)
MVMTDPIADFLTRIRNANQAKHEVLEVPASNIKKGIAEILKREGFVKNVEIIEDDKQGVIRVFLKYGPNGEKVITNLKRVSKPGLRVYKKREDLPKVLNGLGIAILSTSEGLLTDKEARQKNVGGEVIAYVW

SEQ ID NO: 265 - DNA, 534 bp, Streptococcus pneumoniae
atgtcacgtattggtaataaagttatcgtgttgcctgctggtgttgaactcgctaacaatgacaacgttgtaactgtaaaaggatctaaaggagaacttactcgtgagttctcaaaagatattgaaatccgtgtggaaggtactgaaataactcttcaccgtccaaacgattcaaaagaaatgaaaactatccacggaactactcgtgcccttttgaacaacatggttgttggtgtatcagaaggattcaagaaagaacttgaaatgcgtggggttggttaccgtgcacagcttcaaggatctaaacttgttttggctgttggtaaatctcatccagacgaagttgaagctccagaaggaattacttttgaacttccaaacccaacaacaatcgttgttagcggaatttcaaaagaagtagttggtcaaacagctgcttacgtacgtagccttcgttcaccagaaccatataaaggtaaaggtatccgttacgttggtgaattcgttcgccgtaaagaaggtaaaacaggtaaa

SEQ ID NO: 266 - protein, 178 aa, Streptococcus pneumoniae
  ribosomal protein L6 (rplF); Cellular location: cytoplasm; Similar to strain R6 sequence 15902248 (1.E-97)
MSRIGNKVIVLPAGVELANNDNVVTVKGSKGELTREFSKDIEIRVEGTEITLHRPNDSKEMKTIHGTTRALLNNMVVGVSEGFKKELEMRGVGYRAQLQGSKLVLAVGKSHPDEVEAPEGITFELPNPTTIVVSGISKEVVGQTAAYVRSLRSPEPYKGKGIRYVGEFVRRKEGKTGK

SEQ ID NO: 267 - DNA, 354 bp, Streptococcus pneumoniae
gtgatttcaaaaccagataaaaacaaactccgccaaaaacgccaccgtcgcgttcgcggaaaactctctggaactgctgatcgcccacgtttgaacgtattccgttctaatacaggcatctacgctcaagtgattgatgacgtagcgggtgtaacgctcgcaagtgcttcaactcttgataaagaagtttcaaaaggaactaaaactgaacaagccgttgctgtcggtaaactcgttgcagaacgtgcaaacgctaaaggtatttcagaagtggtgttcgaccgcggtggatatctatatcacggacgtgtgaaagctttggctgatgcagctcgtgaaaacggattgaaattc

SEQ ID NO: 268 - protein, 118 aa, Streptococcus pneumoniae
  ribosomal protein L18 (rplR); Cellular location: cytoplasm; Similar to strain R6 sequence 15902249 (2.E-62)
MISKPDKNKLRQKRHRRVRGKLSGTADRPRLNVFRSNTGIYAQVIDDVAGVTLASASTLDKEVSKGTKTEQAVAVGKLVAERANAKGISEVVFDRGGYLYHGRVKALADAARENGLKF

SEQ ID NO: 269 - DNA, 492 bp, Streptococcus pneumoniae
atggcatttaaagacaatgcagttgaattagaagaacgcgtagttgctgtcaaccgtgttacaaaagttgttaaaggtggacgtcgtcttcgtttcgcagctcttgttgttgttggtgaccacaatggtcgcgtaggatttggtactggtaaagctcaagaagttccagaagcaatccgtaaagcagtagatgatgctaagaaaaacttgatcgaagttcctatggttggaacaacaatcccacacgaagttctttcagaattcggtggagctaaagtattgttgaaacctgctgtagaaggttctggagttgccgctggtggtgcagttcgtgccgttgtggaattggcaggtgtggcagatattacatctaaatcacttggttctaacactccaatcaacattgttcgtgcaactgttgaaggtttgaaacaattgaaacgcgctgaagaaattgctgcccttcgtggtatttcagtttctgatttggca

SEQ ID NO: 270 - protein, 164 aa, Streptococcus pneumoniae
  ribosomal protein S5 (rpsE); Cellular location: cytoplasm; Similar to strain R6 sequence 15902250 (2.E-86)
MAFKDNAVELEERVVAVNRVTKVVKGGRRLRFAALVVVGDHNGRVGFGTGKAQEVPEAIRKAVDDAKKNLIEVPMVGTTIPHEVLSEFGGAKVLLKPAVEGSGVAAGGAVRAVVELAGVADITSKSLGSNTPINIVRATVEGLKQLKRAEEIAALRGISVSDLA

SEQ ID NO: 271 - DNA, 222 bp, Streptococcus pneumoniae
gtggtatttcagtttctgatttggcataagaaaggggataaaatggctcaaattaaaattactttgactaagtctccaatcggacgcattccatcacaacgtaaaactgttgtagcacttggacttggcaaattgaacagctctgttattaaagaagataacgctgctatccgtggtatgatcacagcagtatctcacttagtaacagttgaagaagtaaac

SEQ ID NO: 272 - protein, 74 aa, Streptococcus pneumoniae
  ribosomal protein L30 (rpmD); Cellular location: cytoplasm; Similar to strain R6 sequence 15902251 (3.E-28)
MVFQFLIWHKKGDKMAQIKITLTKSPIGRIPSQRKTVVALGLGKLNSSVIKEDNAAIRGMITAVSHLVTVEEVN

SEQ ID NO: 273 - DNA, 438 bp, Streptococcus pneumoniae
atgaaacttcatgaattgaaacctgcagaaggttctcgtaaagtacgtaaccgcgttggtcgtggtacttcatcaggtaacggtaaaacatctggtcgtggtcaaaaaggtcaaaaagctcgtagcggtggcggagttcgccttggttttgaaggtggacaaactccattgttccgtcgtcttccaaaacgtggattcactaacatcaacgctaaagaatacgcaattgtgaaccttgaccaattgaacgtctttgaagatggtgctgaagtaactccagttgttcttatcgaagcaggaattgttaaagctgaaaagtcaggtattaaaattcttggtaacggtgagttgactaagaaattgactgtgaaagcagctaaattctctaaatcagctgaagaagctatcactgctaaaggtggttcagtagaagtcatc

SEQ ID NO: 274 - protein, 146 aa, Streptococcus pneumoniae
  ribosomal protein L15 (rplO); Cellular location: cytoplasm; Similar to strain R6 sequence 15902252 (1.E-78)
MKLHELKPAEGSRKVRNRVGRGTSSGNGKTSGRGQKGQKARSGGGVRLGFEGGQTPLFRRLPKRGFTNINAKEYAIVNLDQLNVFEDGAEVTPVVLIEAGIVKAEKSGIKILGNGELTKKLTVKAAKFSKSAEEAITAKGGSVEVI

SEQ ID NO: 275 - DNA, 1308 bp, Streptococcus pneumoniae
atgttttttaaattattaagagaagctcttaaagtcaagcaggttcgatcaaaaattttatttacaatttttatcgttttggtctttcgtatcggaactagcattacagttcctggtgtgaatgccaatagcttgaatgctttaagtggattatccttcttaaacatgttgagcttggtgtcggggaatgccctaaaaaacttttcgatttttgccctaggagttagtccctatatcaccgcttctattgttgtccaactcttgcaaatggatattttacccaagtttgtagagtggggtaaacaaggggaagtaggtcgaagaaaattgaatcaagctactcgttatattgctctagttctcgcttttgtgcaatctatcgggattacagctggttttaataccttggctggagctcaattgattaaaactgctttaactccacaagtttttctgacgattggtatcatcttaacagctggtagtatgattgtcacttggttgggtgagcaaattacagataagggatacggaaacggtgtttccatgattatctttgccgggattgtttcctcaattccagagatgattcagggcatctatgtggactactttgtgaacgtcccaagtagccgtatcacttcatctatcattttcgtaatcattttgattattactgtattgttgattatttactttacaacttatgttcaacaagcagaatacaaaattccaatccaatatactaaggttgcacaaggtgctccatctagctcttaccttccgttaaaagtaaaccctgctggagttatccctgttatctttgccagttcgattactgcagcgcctgcggctattcttcagtttttgagtgccacaggtcatgattgggcttgggtaagggtagcacaagagatgttggcaactacttctccaactggtattgccatgtatgctttgttgattattctctttacattcttctatacgtttgtacagattaatcctgaaaaagcagcagagagcctacaaaagagtggtgcctatatccatggagttcgtcctggtaaaggtacagaagaatatatgtctaaacttcttcgtcgtcttgcaactgttggttccctcttccttggtgtgatttccattttaccgattgcagctaaagatgtatttggtctttctgatgttgttgcctttggtggaacaagtctcttgatcattatctctacaggtatcgaaggaatcaagcaattggaaggttacctattgaaacgtaagtatgttggtttcatggacagaacagaa

SEQ ID NO: 276 - protein, 436 aa, Streptococcus pneumoniae
  preprotein translocase, SecY subunit (secY); Cellular location: membrane; Similar to strain R6 sequence 15902253 (0.E+01)
MFFKLLREALKVKQVRSKILFTIFIVLVFRIGTSITVPGVNANSLNALSGLSFLNMLSLVSGNALKNFSIFALGVSPYITASIVVQLLQMDILPKFVEWGKQGEVGRRKLNQATRYIALVLAFVQSIGITAGFNTLAGAQLIKTALTPQVFLTIGIILTAGSMIVTWLGEQITDKGYGNGVSMIIFAGIVSSIPEMIQGIYVDYFVNVPSSRITSSIIFVIILIITVLLIIYFTTYVQQAEYKIPIQYTKVAQGAPSSSYLPLKVNPAGVIPVIFASSITAAPAAILQFLSATGHDWAWVRVAQEMLATTSPTGIAMYALLIILFTFFYTFVQINPEKAAESLQKSGAYIHGVRPGKGTEEYMSKLLRRLATVGSLFLGVISILPIAAKDVFGLSDVVAFGGTSLLIIISTGIEGIKQLEGYLLKRKYVGFMDRTE

SEQ ID NO: 277 - DNA, 636 bp, Streptococcus pneumoniae
atgaatcttttgattatgggcttacctggtgcaggtaagggaactcaagcagcaaaaatcgtagaacaattccatgttgcacatatctcaacaggtgatatgttccgcgctgcaatggcaaatcaaactgaaatgggtgttcttgctaagtcatatattgacaagggtgaattggttcctgacgaagttacaaatggaatcgtaaaagaacgcctttcacaagatgatattaaagaaacaggattcttattggatggttacccacgtacaattgaacaagctcatgccttggacaaaacattggctgaacttggcattgaactagaaggtgttatcaatattgaagtgaaccctgacagccttttggaacgtttgagtgggcgtatcatccaccgcgtaactggagaaactttccacaaggtctttaacccaccagttgactataaagaagaagattactaccaacgtgaagatgataagcctgagacagtaaaacgtcgtttggatgttaatattgctcaaggagaaccaatcattgctcactaccgtgccaaaggtttggttcatgacatcgaaggtaatcaagatatcaatgatgtcttctcagatattgaaaaagtattgacaaatttgaaa

SEQ ID NO: 278 - protein, 212 aa, Streptococcus pneumoniae
  adenylate kinase (adk); Feature of note: secreted; Similar to strain R6 sequence 15902254 (e-120)
MNLLIMGLPGAGKGTQAAKIVEQFHVAHISTGDMFRAAMANQTEMGVLAKSYIDKGELVPDEVTNGIVKERLSQDDIKETGFLLDGYPRTIEQAHALDKTLAELGIELEGVINIEVNPDSLLERLSGRIIHRVTGETFHKVFNPPVDYKEEDYYQREDDKPETVKRRLDVNIAQGEPIIAHYRAKGLVHDIEGNQDINDVFSDIEKVLTNLK

SEQ ID NO: 279 - DNA, 270 bp, Streptococcus pneumoniae
ttgttgtctctgtgtctagaggcatcgaatcgaaatttatggaggtgcttttgcgtggcaaaagacgatgtgattgaagttgaaggcaaagtagttgatacaatgccgaatgcaatgtttacggttgaacttgaaaatggacatcagattttagcaacagtttctggtaaaattcgtaaaaactatattcgtattttagcgggagatcgtgttactgtcgaaatgagtccatatgacttgacacgtggacgtatcacttaccgctttaaa

SEQ ID NO: 280 - protein, 90 aa, Streptococcus pneumoniae
  translation initiation factor IF-1 (infA); Cellular location: cytoplasm; Similar to strain R6 sequence 15902255 (1.E-36)
MLSLCLEASNRNLWRCFCVAKDDVIEVEGKVVDTMPNAMFTVELENGHQILATVSGKIRKNYIRILAGDRVTVEMSPYDLTRGRITYRFK

SEQ ID NO: 281 - DNA, 114 bp, Streptococcus pneumoniae
atgaaagtaagaccatcggtcaaaccaatttgcgaatactgtaaagttattcgtcgtaatggtcgtgttatggtaatttgcccagcaaatccaaaacacaaacaacgtcaagga

SEQ ID NO: 282 - protein, 38 aa, Streptococcus pneumoniae
  ribosomal protein L36 (rpmJ); Cellular location: cytoplasm; Similar to strain R6 sequence 15902256 (3.E-19)
MKVRPSVKPICEYCKVIRRNGRVMVICPANPKHKQRQG

SEQ ID NO: 283 - DNA, 363 bp, Streptococcus pneumoniae
atggctcgtattgctggagttgatattccaaatgacaaacgcgtagtaatctcattgacttatgtttatggtatcggacttgcaacatctaagaaaattttggctgctgctggaatctcagaagatgttcgtgtacgtgatcttacatcagatcaagaagatgctatccgtcgtgaagtggatgcaatcaaagttgaaggtgaccttcgtcgtgaagtaaacttgaacatcaaacgtttgatggaaatcggttcataccgtggtatccgtcaccgtcgtggacttcctgtccgtggacaaaacactaaaaacaacgcccgcactcgtaaaggtaaagctgttgcgattgctggtaagaaaaaa

SEQ ID NO: 284 - protein, 121 aa, Streptococcus pneumoniae
  ribosomal protein S13 (rpsM); Cellular location: cytoplasm; Similar to strain R6 sequence 15902257 (2.E-63)
MARIAGVDIPNDKRVVISLTYVYGIGLATSKKILAAAGISEDVRVRDLTSDQEDAIRREVDAIKVEGDLRREVNLNIKRLMEIGSYRGIRHRRGLPVRGQNTKNNARTRKGKAVAIAGKKK

SEQ ID NO: 285 - DNA, 381 bp, Streptococcus pneumoniae
ttggctaaaccaacacgtaaacgtcgtgtgaaaaagaatatcgaatctggtattgctcatattcacgctacatttaataacactattgttatgattactgatgtgcatggtaatgcaattgcttggtcatcagctggtgctcttggtttcaaaggttctcgtaaatctacaccattcgctgctcaaatggcttctgaagctgctgctaaatctgcacaagaacacggtcttaaatcagttgaagttactgtaaaaggtccaggttctggtcgtgagtcagctattcgtgcgcttgctgccgctggtcttgaagtaacagcaattcgtgatgtgactccagtgccacacaatggtgctcgtcctccaaaacgtcgccgtgta

SEQ ID NO: 286 - protein, 127 aa, Streptococcus pneumoniae
  ribosomal protein S11 (rpsK); Cellular location: cytoplasm; Similar to strain R6 sequence 15902258 (2.E-68)
MAKPTRKRRVKKNIESGIAHIHATFNNTIVMITDVHGNAIAWSSAGALGFKGSRKSTPFAAQMASEAAAKSAQEHGLKSVEVTVKGPGSGRESAIRALAAAGLEVTAIRDVTPVPHNGARPPKRRRV

SEQ ID NO: 287 - DNA, 933 bp, Streptococcus pneumoniae
atgatcgagtttgaaaaaccaaatataacaaaaattgatgaaaataaagattatggcaagtttgtaatcgaaccacttgaacgtggctacggtacaactcttggtaactctcttcgtcgtgtacttctagcttctctaccaggagcagctgtgacatctatcaacattgatggtgtgttacatgagtttgacacagttccaggtgttcgtgaagacgtgatgcaaatcattctgaacattaaaggaattgcagtgaaatcgtacgttgaagacgaaaaaatcatcgaactggatgttgaaggtcctgctgaagtaacagctggtgacattttgacagatagcgatattgaaattgtaaatccagatcattatctctttacaatcggtgaaggttcttctctaaaagcgactatgactgttaacagtggtcgtggatatgtacctgctgatgaaaataaaaaggataatgcaccagttggaacacttgctgtagattctatttatacaccagttacaaaagtcaactatcaagtggaacctgctcgtgtaggtagcaatgatggtttcgacaaattaacccttgaaatcttgacaaatggaacaattattccagaagatgctttagggctttcagcacgtattttgacagaacatcttgatttgtttacaaatcttactgagattgctaagtcaactgaagtgatgaaagaagctgatactgaatctgacgaccgtattttagatcgtacgattgaggaactggacttgtctgtgcgttcatacaactgtttaaaacgtgccggtatcaatactgtgcatgatttgacagaaaaatctgaagcagagatgatgaaagtacgaaatcttggacgcaagagtttggaagaagtgaaactcaaactcattgatttgggtcttggattaaaagataaa

SEQ ID NO: 288 - protein, 311 aa, Streptococcus pneumoniae
  DNA-directed RNA polymerase, alpha subunit (rpoA); Cellular location: cytoplasm; Similar to strain R6 sequence 15902259 (e-175)
MIEFEKPNITKIDENKDYGKFVIEPLERGYGTTLGNSLRRVLLASLPGAAVTSINIDGVLHEFDTVPGVREDVMQIILNIKGIAVKSYVEDEKIIELDVEGPAEVTAGDILTDSDIEIVNPDHYLFTIGEGSSLKATMTVNSGRGYVPADENKKDNAPVGTLAVDSIYTPVTKVNYQVEPARVGSNDGFDKLTLEILTNGTIIPEDALGLSARILTEHLDLFTNLTEIAKSTEVMKEADTESDDRILDRTIEELDLSVRSYNCLKRAGINTVHDLTEKSEAEMMKVRNLGRKSLEEVKLKLIDLGLGLKDK

SEQ ID NO: 289 - DNA, 384 bp, Streptococcus pneumoniae
atggcttaccgtaaactaggacgcactagctcacaacgtaaagcaatgcttcgcgatttgacaactgaccttttgatcaacgaatcaatcgtgacaactgaagctcgtgctaaagaaatccgtaaaactgttgaaaaaatgattactctaggtaaacgtggtgatttgcatgcacgtcgtcaagcagctgctttcgtacgtaatgaaatcgcatctgaaaactatgatgaagcaactgataagtacacttctactacagcacttcaaaaattgttctcagaaatcgcacctcgttatgctgaacgtaacggtggatacactcgtatccttaaaactgaatcacgtcgtggtgatgcagcgccaatggcgatcatcgaattagta

SEQ ID NO: 290 - protein, 128 aa, Streptococcus pneumoniae
  ribosomal protein L17 (rplQ); Cellular location: cytoplasm; Similar to strain R6 sequence 15902260 (1.E-66)
MAYRKLGRTSSQRKAMLRDLTTDLLINESIVTTEARAKEIRKTVEKMITLGKRGDLHARRQAAAFVRNEIASENYDEATDKYTSTTALQKLFSEIAPRYAERNGGYTRILKTESRRGDAAPMAIIELV

SEQ ID NO: 291 - DNA, 264 bp, Streptococcus pneumoniae
atgaaagccattataactgttgttggtaaagataaatctggaattgttgcaggtgtttctggtaaaattgcagaattaggattgaatattgacgatatctctcaaactgtcttggatgaatattttacgatgatggctgttgtatctagtgatgaaaagcaagattttacctatcttcgtaatgaatttgaagcttttgggcaaactttgaatgtaaaaatcaatattcagagtgcagcgattttcgaagctatgtataatatc

SEQ ID NO: 292 - protein, 88 aa, Streptococcus pneumoniae
  ACT domain protein; Cellular location: cytoplasm; Similar to strain R6 sequence 15902261 (1.E-44)
MKAIITVVGKDKSGIVAGVSGKIAELGLNIDDISQTVLDEYFTMMAVVSSDEKQDFTYLRNEFEAFGQTLNVKINIQSAAIFEAMYNI

SEQ ID NO: 293 - DNA, 1335 bp, Streptococcus pneumoniae
atggatattagacaagttactgaaaccatcgccatgattgaggagcaaaacttcgatattagaaccattaccatggggatttctcttttggactgtatcgatccagatatcaatcgtgctgcggagaaaatctatcaaaaaattacgacaaaggcggctaatttagtagctgttggtgatgaaattgcggctgagttgggaattcctatcgttaataagcgtgtatcggtgacacctatttctctgattggggcagcgacagatgcgacggactacgtggttctggcaaaagcgcttgataaggctgcgaaagagattggtgtggactttattggtggtttttctgccttagtacaaaaaggttatcaaaagggagatgagattctcatcaattccattcctcgcgctttggctgagacggataaggtctgctcgtcagtcaatatcggctcaaccaagtctggtattaatatgacggctgtggcagatatgggacgaattatcaaggaaacagcaaatctttcagatatgggagtggccaagttggttgtattcgctaatgctgttgaggacaatccatttatggcgggtgcctttcatggtgttggggaagcagatgttatcatcaatgtcggagtttctggtcctggtgttgtgaaacgtgctttggaaaaagttcgtggacagagctttgatgtagtagccgaaacagttaagaaaactgcctttaaaatcactcgtatcggtcaattggttggtcaaatggccagtgagagactgggtgtggagtttggtattgtggacttgagtttggcaccaacccctgcggttggagactctgtggcacgtgtccttgaggaaatggggctagaaacagttggcacgcatggaacgacggctgccttggccctcttgaacgaccaagttaaaaagggtggagtgatggcctgcaaccaagtcggtggtttatctggtgcctttatccctgtttctgaggatgaaggaatgattgctgcagtgcaaaatggctctcttaatttagaaaaactagaagctatgacggctatctgttctgttggattggatatgattgccatcccagaagatacgcctgctgaaactattgcggctatgattgcggatgaagcagcaatcggtgttatcaacatgaaaacaacagctgttcgtatcattcccaaaggaaaagaaggcgatatgattgagtttggtggtctattaggaactgcacccgttatgaaggttaatggggcttcgtctgtcgacttcatctctcgcggtggacaaatcccagcaccaattcatagttttaaaaat

SEQ ID NO: 294 - protein, 445 aa, Streptococcus pneumoniae
  conserved hypothetical protein; Cellular location: membrane; Similar to strain R6 sequence 15902262 (0.E+01)
MDIRQVTETIAMIEEQNFDIRTITMGISLLDCIDPDINRAAEKIYQKITTKAANLVAVGDEIAAELGIPIVNKRVSVTPISLIGAATDATDYVVLAKALDKAAKEIGVDFIGGFSALVQKGYQKGDEILINSIPRALAETDKVCSSVNIGSTKSGINMTAVADMGRIIKETANLSDMGVAKLVVFANAVEDNPFMAGAFHGVGEADVIINVGVSGPGVVKRALEKVRGQSFDVVAETVKKTAFKITRIGQLVGQMASERLGVEFGIVDLSLAPTPAVGDSVARVLEEMGLETVGTHGTTAALALLNDQVKKGGVMACNQVGGLSGAFIPVSEDEGMIAAVQNGSLNLEKLEAMTAICSVGLDMIAIPEDTPAETIAAMIADEAAIGVINMKTTAVRIIPKGKEGDMIEFGGLLGTAPVMKVNGASSVDFISRGGQIPAPIHSFKN

SEQ ID NO: 295 - DNA, 690 bp, Streptococcus pneumoniae
atggtaaaagtacgattgtatttggtacgtcatggcaagaccatgtttaacacgattggtcgcgcgcaaggttggagcgatactcccttaactgctgaaggtgaacgagggattcaagagttaggaatcggtttgcgagaatctgatctacagtttgagcgtgcttattcgagtgattctggtcgtaccattcagaccatgggaattatccttgaagaacttggcttgcagggggaaatcccttatcgcatggacaagcgtatcagagaatggtgtttcggtagttttgatggagcctatgatggcgatcttttcatgggcattattcctcgtatctttaatgtggaccacgttcaccaattgtcttatgctgaactggctgagggcttggtagaggtcgatacagctggttgggctgaaggctgggaaaaactcagtggccgaatcaaggaaggctttgaaatgattgcaaaagaaatggaagatcaaggtggaggtaacgcccttgttgtcagccatggaatgactattggaaccattgtttatctgattaatggcatgcatccgcatggtctggataatggtagcgtgacaatccttgaatatgaggacggccagtttagggttgaagttgtcggtgaccgtagttaccgagagctaggacgtgagaagatggaagaaggctctatt

SEQ ID NO: 296 - protein, 230 aa, Streptococcus pneumoniae
  phosphoglycerate mutase family protein; Cellular location: membrane; Similar to strain R6 sequence 15902263 (e-133)
MVKVRLYLVRHGKTMFNTIGRAQGWSDTPLTAEGERGIQELGIGLRESDLQFERAYSSDSGRTIQTMGIILEELGLQGEIPYRMDKRIREWCFGSFDGAYDGDLFMGIIPRIFNVDHVHQLSYAELAEGLVEVDTAGWAEGWEKLSGRIKEGFEMIAKEMEDQGGGNALVVSHGMTIGTIVYLINGMHPHGLDNGSVTILEYEDGQFRVEVVGDRSYRELGREKMEEGSI

SEQ ID NO: 297 - DNA, 192 bp, Streptococcus pneumoniae
atgatttcaaaactctctacttctatcctcctctacaatgtcaaaacaagaacaatgactgtagctatttatacagaggttctcagaggaaattacggtgtagccgcaaccttgtcaactatcctgactgttctaacagtaggttccttgctcttgtttatgaaaatctctaaaagcaatagcattacactt

SEQ ID NO: 298 - protein, 64 aa, Streptococcus pneumoniae
  permease BitF-related
MISKLSTSILLYNVKTRTMTVAIYTEVLRGNYGVAATLSTILTVLTVGSLLLFMKISKSNSITL

SEQ ID NO: 299 - DNA, 831 bp, Streptococcus pneumoniae
ttgcttgtatttatgagagcattctcagactttggaacgcctatgttgattggcgaagggtatcggactttccctgtcctgatttatacccaatttattagcgaggttggaggaaattctgcttttgcaattatggcgattatcattgccttggcaattttccttatccaaaaacacattgcaaaccgctacagtttcagcatgaatctgctccatccaattgagcctaaaaaaactacaaaaggaaaaatggctgccatttatgcaacagtctacggaattatctttatctctgttttacctcaaatctacttaatttatacctctttcctaaaaacatcaggtatggtatctgttaaaggttattctccaaacagttacaaggtagctttccatcgtatgggatctgctattttcaataccattcgtatccctttgattgccttagttctagttgttctatttgcgacatttatctcctacctagccgttagaaaacggaatttgtttacaaacttaattgacagcctcagtatggtaccttatattgtaccaggaaccgttctagggattgccttcatttcttccttcaatactggtctatttggaagtggatttcttatgattacagggactgctttcatcttgattatgtctctatctgccagaagattaccttatactattcgctcatctgttgctagcttacaacaaatagcaccaagtattgaagaagctgctgaaagcttaggaagtagtcgtctcaatacctttgctaagattacaactccaatgatgctatctggtatcatttctggagccatcttatct

SEQ ID NO: 300 - protein, 277 aa, Streptococcus pneumoniae
  iron ABC transporter, permease protein
MLVFMRAFSDFGTPMLIGEGYRTFPVLIYTQFISEVGGNSAFAIMAIIIALAIFLIQKHIANRYSFSMNLLHPIEPKKTTKGKMAAIYATVYGIIFISVLPQIYLIYTSFLKTSGMVSVKGYSPNSYKVAFHRMGSAIFNTIRIPLIALVLVVLFATFISYLAVRKRNLFTNLIDSLSMVPYIVPGTVLGIAFISSFNTGLFGSGFLMITGTAFILIMSLSARRLPYTIRSSVASLQQIAPSIEEAAESLGSSRLNTFAKITTPMMLSGIISGAILS

SEQ ID NO: 301 - DNA, 129 bp, Streptococcus pneumoniae
atgaacagtattgacaattctctacttgaagcagctgaaagcatggggtccttcggatttaaacctatcgtaacggttgttttacctctcctagttccaaccttactagcagctccttgcttgtattta

SEQ ID NO: 302 - protein, 43 aa, Streptococcus pneumoniae
  hypothetical protein
MNSIDNSLLEAAESMGSFGFKPIVTVVLPLLVPTLLAAPCLYL

SEQ ID NO: 303 - DNA, 90 bp, Streptococcus pneumoniae
ttggacagtttcctctttcttcctctttcttacctatcctatctttctcgtttatcctatcgttaccgtgctcaagcaagcacttataca

SEQ ID NO: 304 - protein, 30 aa, Streptococcus pneumoniae
  hypothetical protein
MDSFLFLPLSYLSYLSRLSYRYRAQASTYT

SEQ ID NO: 305 - DNA, 423 bp, Streptococcus pneumoniae
atggaacgtaaaaaactaaatatttggacagtttcctctttcttcctctttcttacctatcctatctttctcgtttatcctatcgttaccgtgctcaagcaagcacttatacatgaaggacaattctcactagctaattttgtcactttctttagtaaagcctactactctgagacactagtcaacagtttcaaggtttccattaccgctactatcacttccttagttgtaggaaccctattagcttatctcttctctatgtatgacttcaaggggaagaaatttctacaaatattgattatcattgcttccatgtcagctcctttcgtaggagcctactcctgggttctcttgctaggacgaaatgaggtcatcactaaatttttgacaaatgccctttatcttccagctatcgatatttat

SEQ ID NO: 306 - protein, 141 aa, Streptococcus pneumoniae
  iron ABC transporter, permease protein POINT MUTATION, FRAMESHIFT
MERKKLNIWTVSSFFLFLTYPIFLVYPIVTVLKQALIHEGQFSLANFVTFFSKAYYSETLVNSFKVSITATITSLVVGTLLAYLFSMYDFKGKKFLQILIIIASMSAPFVGAYSWVLLLGRNEVITKFLTNALYLPAIDIY

SEQ ID NO: 307 - DNA, 1089 bp, Streptococcus pneumoniae
atgagtgagatcaaaattattaacgccaaaaaaatctaccacgatgtccctgttattgagaatttgaacattacaattccaaaaggaagtctctttacccttcttggagcttcaggatgtgggaaaacgacccttcttcgtatgattgcaggtttcaacagtatcgaaggtggagaattttacttcgatgatacaaaaatcaataatatggaacccagcaaacgcaatatcgggatggttttccaaaactacgctattttcccacatttgactgtccgagacaacgttgcttttggtcttatgcaaaagaaggttccaaaagaagaattgattcaacagaccaacaagtatcttgaactcatgcaaattgctcaatatgcggatcgaaagcccgataaactcagtggtggacaacaacaacgtgtcaccttggcatgcgccttagcggttaatccaagtgttctcctcatggacgagccacttagtaatctggaggccaaacttcgcttggatatgcgtcaagccatccgagaaatccaacacgaagtgggaattacaactgtttatgtaacccacgaccaagaagaagccatggctatttcagaccaaattgctgttatgaaagatggggtgatccaacaaatcggccgaccaaaagaactctatcataaaccagctaatgagtttgtggcaacctttatcggacgcacaaatattatccctgccaatcttgaaaaacggagcgacggcgcttatatcgtcttttcagatggctatgcccttcgaatgccagctcttgatcaggttgaggagcaagctattcatgtaagcattcgtcccgaagagtttatcaaagatgaatctggagatattgaaggaactattagagatagcgtctatcttggactaaatacggattatttcattgagacaggttttgcctcaaaaattcaagttagtgaagaatcaacttttgaagaagatctacaaaaaggcaatcgtattcgtctacgaatcaatacgcaaaaattaaacatcttttctgcagatggttcccaaaacctgataaaaggagtcaaccatggaacg

SEQ ID NO: 308 - protein, 363 aa, Streptococcus pneumoniae
  iron ABC transporter, ATP-binding protein; Cellular location: membrane; Similar to strain R6 sequence 15902266 (0.E+01)
MSEIKIINAKKIYHDVPVIENLNITIPKGSLFTLLGASGCGKTTLLRMIAGFNSIEGGEFYFDDTKINNMEPSKRNIGMVFQNYAIFPHLTVRDNVAFGLMQKKVPKEELIQQTNKYLELMQIAQYADRKPDKLSGGQQQRVTLACALAVNPSVLLMDEPLSNLEAKLRLDMRQAIREIQHEVGITTVYVTHDQEEAMAISDQIAVMKDGVIQQIGRPKELYHKPANEFVATFIGRTNIIPANLEKRSDGAYIVFSDGYALRMPALDQVEEQAIHVSIRPEEFIKDESGDIEGTIRDSVYLGLNTDYFIETGFASKIQVSEESTFEEDLQKGNRIRLRINTQKLNIFSADGSQNLIKGVNHGT

SEQ ID NO: 309 - DNA, 1014 bp, Streptococcus pneumoniae
atgaaaaagaaatggatgtattatgctgcttgttcttctaatgaatctgccgatgacagttcatctgataaaggagacggcggttcgctagtcgtttattcaccaaactcagagggcttaattggagcaactattcctgcctttgaagaaaaatatggtatcaaagtagaactgattcaagctggtactggagaacttttcaaaaaactagagtcagaaaaagaagttcctgtagctgatgttatctttggtggttcttatacacaatatactacccacggagaactctttgaaaactatacttcaaaagaaaatgataatgttatcaaagaatatcaaaacacaactggctactctactccttatacactagatggtagtgttttaatcgtcaaccctgatttaactaaaggcatgaacatcgaaggatataacgatcttttcaaacctgaactaaaaggaaaaatcgcaactgctgacccagcaaactcttctagcgcctttgctcaattaacaaatatgctacaagctcaaggtggttacaaagatgataaggcttggtcttatgtaaaagatcttttcacacttattgatggtaaaatcggttcaagttcatctagtgtctataaagtagtcgctgatggagaaatggctgttggtctctcttatgaagatccagcagttaaactcttaaatgacggagctaacattaaggtagtctatccaaaagaaggaaccgtcttcctacctgctagtgctgctatcgttaaaaaatctaaaaatatggaaaatgccaagaaatttatcgattttattatctctcaagaagtacaagatacacttggtacaaccactactaaccgtcctgttcgtaaaaatgctaaaacaagcgaaaacatgaaaccaattgacaaaatcaaaacactcactgaagattatgattatgtcatcaagaataaatcagatatcgttaagaaatacaacgaagtctttacagatatccaatctaaacag

SEQ ID NO: 310 - protein, 338 aa, Streptococcus pneumoniae
  iron ABC transporter, iron-binding protein; Cellular location: cytoplasm; Similar to strain R6 sequence 15902267 (9.E-64)
MKKKWMYYAACSSNESADDSSSDKGDGGSLVVYSPNSEGLIGATIPAFEEKYGIKVELIQAGTGELFKKLESEKEVPVADVIFGGSYTQYTTHGELFENYTSKENDNVIKEYQNTTGYSTPYTLDGSVLIVNPDLTKGMNIEGYNDLFKPELKGKIATADPANSSSAFAQLTNMLQAQGGYKDDKAWSYVKDLFTLIDGKIGSSSSSVYKVVADGEMAVGLSYEDPAVKLLNDGANIKVVYPKEGTVFLPASAAIVKKSKNMENAKKFIDFIISQEVQDTLGTTTTNRPVRKNAKTSENMKPIDKIKTLTEDYDYVIKNKSDIVKKYNEVFTDIQSKQ

SEQ ID NO: 311 - DNA, 105 bp, Streptococcus pneumoniae
atgtctcattcctttaaaaaatctctccaaaaagaaattctccatagaagctctatcgcagcctttgtgacctcacgcgcattctccgatacagtatcaccgatt

SEQ ID NO: 312 - protein, 35 aa, Streptococcus pneumoniae
  hypothetical protein; Cellular location: cytoplasm
MSHSFKKSLQKEILHRSSIAAFVTSRAFSDTVSPI

SEQ ID NO: 313 - DNA, 774 bp, Streptococcus pneumoniae
atggaaatatctaaaggaattatttttaatattcaacacttttcaattcatgacggtccgggtattcgtacaactgtttttttaaaaggatgtcctctgcgctgtccatggtgttctaatcctgaatctcaaagaatgaaacctgaaaaaatgaaagatgctcaacgagagaaattcaccttagtcggtgaagaaaagactgtagaagaaattattacagaggtattaaaagacaaagaattttacgaagaatccggtggaggtttaactttatcaggaggtgaaatatttgctcagtttgaatttgctaaagccatcttaaaatcagctaaagaacatcacatacacactgccattgaaactactgcctttgttgatcatgaaaaatttattgatttaattcaatatgtggattttatctacacagacctaaaacattataattctataaaacataaaaaagtgactggggtttttaatcaaatgattattaaaaacattcattatgctttttcacaaaataaaactatcgttttaagaatcccagttattcctaattttaacaatagtttagaggatgcagaaaaattcgctactctatttaactcattaaatatcgaccaagttcaactactcccttttcatcaatttggtgaaaacaaatatcgtttattaaatcggaaatatgaaatggatggaatcaacgcacttcatcctgaagatcttattgattatcaaaaggtatttctgaaccaccatattaattgttatttc

SEQ ID NO: 314 - protein, 258 aa, Streptococcus pneumoniae
  pyruvate formate-lyase-activating enzyme, putative; Cellular location: cytoplasm; Similar to strain R6 sequence 15902270 (e-152)
MEISKGIIFNIQHFSIHDGPGIRTTVFLKGCPLRCPWCSNPESQRMKPEKMKDAQREKFTLVGEEKTVEEIITEVLKDKEFYEESGGGLTLSGGEIFAQFEFAKAILKSAKEHHIHTAIETTAFVDHEKFIDLIQYVDFIYTDLKHYNSIKHKKVTGVFNQMIIKNIHYAFSQNKTIVLRIPVIPNFNNSLEDAEKFATLFNSLNIDQVQLLPFHQFGENKYRLLNRKYEMDGINALHPEDLIDYQKVFLNHHINCYF

SEQ ID NO: 315 - DNA, 744 bp, Streptococcus pneumoniae
atgaaaagattggaacaaattattaaattagtatcagaatatgaaaagatcgacgttaatacattatcggaaaaattaaatgtatcgaaagtaacgattagaaaagatttagataaattagagtcaaaaggtttattacacagagagcatggatatgctgtattaaatagtggagatgacttaaatgtacgtttgtcaattaattatgaaactaagagaaaaattgttcaggaagcagtaaaattggtgtcagataatgaaacaataatgatagaatctggatcgacctgtgctttacttgctgaggaaatttgcaagcaaaaaagaaatgttacgattgtaacaaattcgttttttatagcaaattttgtgagagcttatgattcatgtcgtgttattgttcttggtggtgagtttcagaaagattcacaggtgactgtaggacctttattaaaagaaatgatacagacttttcatgtgtgtcaagcttttgttgggacagatggttacgataaagagatgggctttaccggaaaagatttaatgcgcagtgaggtagttcaatatatttcagcagtgtcggataaagtcattgtcctaactgactcaagtaaatttgataaaagaggtacagtaagaagatttgctttaagtcaagtctatgaagtaataacagacgaaaaactttctaaacaaaatatagctacattagaaaatgctgggataatggttaaggtagtttcg

SEQ ID NO: 316 - protein, 248 aa, Streptococcus pneumoniae
  transcriptional regulator, DeoR family; Cellular location: cytoplasm; Similar to strain R6 sequence 15902271 (e-134)
MKRLEQIIKLVSEYEKIDVNTLSEKLNVSKVTIRKDLDKLESKGLLHREHGYAVLNSGDDLNVRLSINYETKRKIVQEAVKLVSDNETIMIESGSTCALLAEEICKQKRNVTIVTNSFFIANFVRAYDSCRVIVLGGEFQKDSQVTVGPLLKEMIQTFHVCQAFVGTDGYDKEMGFTGKDLMRSEVVQYISAVSDKVIVLTDSSKFDKRGTVRRFALSQVYEVITDEKLSKQNIATLENAGIMVKVVS

SEQ ID NO: 317 - DNA, 978 bp, Streptococcus pneumoniae
atgaatcaagataggaataaactgctttctaaaattgcttatctgtattatattgaaaacttaaatcagtcacaaatagcagcaaaattaggaatttatagaacctctattagtagaatgttaacagaagcaaggaatgtaggaattgttaaaattgaaatagagaattttgataccaatatgtttaagttggaaaattatgtaaaagaaaaatacagtttggaaagtttagaaattattccaaatgaatttgatgatactccaacaattttatctgaaagaatttctcaagttgcagcaggcgtccttaggaatctaattgatgataatatgaaaattggcttttcttgggggaaaagtttaagtaatttagtagatttaattcacagtaaaagtgtccgaaatgttcacttctatcctctagcaggtggtcctagtcacatacacgctaaataccatgtgaatacactgatttatgaaatgtctagaaaatttcatggagagtgtacatttatgaatgcaacgattgtgcaagaaaataaattgttagcagatggtattttgcaatcaagatattttgaaaatttgaaaaatagttggaaagatttagatatagctgtagtcggaattggtgattttagcaataaagggaaacatcaatggttagacatgcttacagaggatgactttaaagaattgaccaaagttaaaactgtaggagaaatttgttgtcgattttttgattcaaaaggtaaagaagtctatgaaaacttacaggaaagaacgatagcaatctctttggaagatttaaaaaatattcctcaaagtttagctgttgcttacggtgatacgaaagtatcttcgattctttctgtcttgcgtgctaatttagtaaatcatttgattacagacaaaaatacaattttaaaagttttggaagaagatggggatttgacttttagagagattctaggtgag

SEQ ID NO: 318 - protein, 326 aa, Streptococcus pneumoniae
  transcriptional regulator; Cellular location: cytoplasm; Similar to strain R6 sequence 15902272 (0.E+01)
MNQDRNKLLSKIAYLYYIENLNQSQIAAKLGIYRTSISRMLTEARNVGIVKIEIENFDTNMFKLENYVKEKYSLESLEIIPNEFDDTPTILSERISQVAAGVLRNLIDDNMKIGFSWGKSLSNLVDLIHSKSVRNVHFYPLAGGPSHIHAKYHVNTLIYEMSRKFHGECTFMNATIVQENKLLADGILQSRYFENLKNSWKDLDIAVVGIGDFSNKGKHQWLDMLTEDDFKELTKVKTVGEICCRFFDSKGKEVYENLQERTIAISLEDLKNIPQSLAVAYGDTKVSSILSVLRANLVNHLITDKNTILKVLEEDGDLTFREILGE

SEQ ID NO: 319 - DNA, 318 bp, Streptococcus pneumoniae
atggaaatgattgttccagatcaaattatcatgggtttaattttatatgctggtgatgcgaaacaacatatttataaagcgttagattacataaaaaatggtacatgtgaacggtgtgaagaagaaatacagttagctgatgcagccttattagaagctcataatctacaaacaaaatttttggcacaggaagcgtctggtacaaagacagaaattacagctctctttgttcattcacaagatcatctcatgaccagtatgacggagattaatttaatcaaagaaattattagtttgagaaaagaacttcataaaaaa

SEQ ID NO: 320 - protein, 106 aa, Streptococcus pneumoniae
  PTS system, IIA component; Cellular location: cytoplasm; Similar to strain R6 sequence 15902273 (2.E-56)
MEMIVPDQIIMGLILYAGDAKQHIYKALDYIKNGTCERCEEEIQLADAALLEAHNLQTKFLAQEASGTKTEITALFVHSQDHLMTSMTEINLIKEIISLRKELHKK

SEQ ID NO: 321 - DNA, 306 bp, Streptococcus pneumoniae
atggtgaagattggtttgttttgtgcagcaggtttttctactggtatgcttgtaaataatatgaaaattgcagcgcaatctagtggagttgaggcagaaatagaggcgttttctcagtctaaattagcggattatgcgccaaatatagatgttgcactattgggtccacaagttgcttatacattagataaatcaaaagaaatttgtgataagtgtgatgttccgatagctgttattccgatgatggactatggtatgttagatgggaaaaaagtattagatttggccctatctttgattagtggg

SEQ ID NO: 322 - protein, 102 aa, Streptococcus pneumoniae
  PTS system, IIB component; Cellular location: outside; Similar to strain R6 sequence 15902274 (2.E-53)
MVKIGLFCAAGFSTGMLVNNMKIAAQSSGVEAEIEAFSQSKLADYAPNIDVALLGPQVAYTLDKSKEICDKCDVPIAVIPMMDYGMLDGKKVLDLALSLISG

SEQ ID NO: 323 - DNA, 1320 bp, Streptococcus pneumoniae
gtgggtaagaaaaggagatttattatgtcaaagatggatgttcagaaaatcattgcaccgatgatgaagtttgtgaatatgcgtggcattatagctctaaaagatgggatgttagcaattttgccattgacagtagttggtagtttgttcttgattatgggacaattgccgttcgaaggattaaataagagcattgctagtgtttttggagctaattggacagagccgtttatgcaagtatattcaggaacttttgctattatgggtctaatttcttgtttttcaattgcctattcttatgctaagaatagcggagtagaggctttaccagctggagttctatctgtatctgcattctttattttgctaagatcatcttatatccctaaacaaggtgaggcgattggggacgctattagtaaagtttggtttggaggccaaggaattatcggtgctatcattataggtttggtagtaggaagtatttataccttctttataaagagaaaaattgttattaagatgccagaacaagttccacaagctattgccaaacagtttgaagcaatgattccagcatttgtaattttcttatcttctatgattgtatatattttagcgaagtcattgactaatggcggaacattcatagaaatgatttattctgctattcaagttccgttgcaaggtttaactggatctttgtatggtgctattggaattgcattctttatatcatttttgtggtggtttggtgttcatgggcaatcggtagtaaatggagtagtgacagctctgcttttatctaatcttgatgctaataaagctatgttagcctctgctaatctatcattagaaaatggtgcacatattgttactcaacaatttttagattcatttttaattctatcaggttcagggattacgtttggtcttgtagttgccatgctttttgcagcaaaatcaaaacaataccaagccttaggaaaagttgcagcttttccagcaatatttaacgtaaatgagccagttgtatttggatttccgattgtcatgaatccagttatgtttgtacctttcattcttgttcctgtacttgcagctgtgatagtatatggagctattgcaacaggtttcatgcagccattctcaggggtaacattgccttggagtacaccagctattttatcaggatttttggtgggtggatggcaaggagttattactcagctggtgatattagcgatgtctacattggtttattttccattctttaaagtacaggatcgtttagcttaccaaaatgaaatcaaacaatct

SEQ ID NO: 324 - protein, 440 aa, Streptococcus pneumoniae
  PTS system, IIC component; Cellular location: membrane; Similar to strain R6 sequence 15902275 (0.E+01)
MGKKRRFIMSKMDVQKIIAPMMKFVNMRGIIALKDGMLAILPLTVVGSLFLIMGQLPFEGLNKSIASVFGANWTEPFMQVYSGTFAIMGLISCFSIAYSYAKNSGVEALPAGVLSVSAFFILLRSSYIPKQGEAIGDAISKVWFGGQGIIGAIIIGLVVGSIYTFFIKRKIVIKMPEQVPQAIAKQFEAMIPAFVIFLSSMIVYILAKSLTNGGTFIEMIYSAIQVPLQGLTGSLYGAIGIAFFISFLWWFGVHGQSVVNGVVTALLLSNLDANKAMLASANLSLENGAHIVTQQFLDSFLILSGSGITFGLVVAMLFAAKSKQYQALGKVAAFPAIFNVNEPVVFGFPIVMNPVMFVPFILVPVLAAVIVYGAIATGFMQPFSGVTLPWSTPAILSGFLVGGWQGVITQLVILAMSTLVYFPFFKVQDRLAYQNEIKQS

SEQ ID NO: 325 - DNA, 2436 bp, Streptococcus pneumoniae
atggtaaatacagaagtagcaagaacaacaatcaagacagaatattttggcagccttactgaaaggatgaacaaatatcgagaagatgttttaaataaaaaaccttatattgatgctgagagagcagttctagcaacacgcgcctatgaacgatacaaggaacaacctaatgtcctaaaacgtgcatatatgctgaaagaaattttggaaaatatgactatctatattgaagaagaatctatgattgcgggaaatcaagcttcttccaataaagatgctcctatttttccggaatatacgctagaatttgttctcaatgagttggatctttttgaaaagcgtgatggagatgttttctatattacagaagaaacaaaagaacaacttagaagtattgctccgttttgggaaaataataatttacgtgctagagctggtgccttattacctgaagaagtgtctgtttatatggaaacaggattcttcggtatggaaggtaagatgaattctggagatgctcacttagcagttaactatcagaaacttttgcaatttggtttaagaggttttgaagagcgggctcgtaaagcaaaagtagctctagatttaacagatccagcaagtattgataaatatcatttttacgactctatatttatcgtaatcgatgctattaaagtatatgcaaagcgctttgttgctcttgctaaaagtttagccgaaaatgcaaatcctaaacgtaagaaagaattacttgagattgcagatatttgctctagagtcccatatgaaccggcaactacttttgcagaagctattcaatcagtttggtttattcaatgtattttacaaattgaatctaatggccactctctttcatatggccgttttgatcaatatatgtatccatatatgaaggctgatttagaaagtggtaaagaaacagaagatagcattgttgaacgtctgacaaatctttggattaagacaattacaattaataaggttcgcagtcaatcacatacattttcttcagcaggaagtcctttatatcaaaatgttacaattggtggacagactcgagataagaaggatgctgttaacccattatcttatttggtattaaaatcagttgcacaaacccatctaccgcaacctaatctaactgtacgttaccatgcaggtttagatgctcgtttcatgaatgagtgtattgaagtgatgaaacttggttttggtatgcctgcatttaataatgatgagattattattccttcttttattgcaaaaggagtattggaagatgatgcttatgattacagtgccattggatgtgttgaaacggcagttccagggaaatggggctatcgttgcacaggtatgagttatatgaacttccctaaggttctacttatcacgatgaatgatggaattgatccggcttcgggtaaacggtttgcaccaagctttggtcgttttaaggatatgaagaacttttctgaattagaaaatgcttgggataaaacactaagatatttgacacgaatgagtgttattgttgaaaattctattgatttatcattggaacgagaagttcctgatattctatgttcagcattgactgatgattgtattggtcgtggaaaacaccttaaagaaggtggagcagtatatgattatatatcaggattgcaagttggaattgcaaatttgtcggattcattagctgcaattaaaaaattggtgtttgaggaagaacgtataagcccaagtcagctttggcatgcactggaaacagattatgccggagaagaaggtaaggtcattcaagaaatgttgattcatgatgcacctaagtatggtaatgatgatgattatgctgacaaattggttactgctgcttatgacatttatgttgatgaaattgctaaatatcctaatacacgttatggaagagggcctattggaggaattcgttattcaggaacatcttctatctcagccaacgtagggcagggacgtggaacattagcaactccagatggacgcaacgcgggtacaccgttagcagagggttgttcaccatcacataatatggatcaacacggccctacatctgttttaaaatctgtttcaaaattaccaacagatgaaatcgtaggtggggttctcttaaatcagaaagtaaatcctcaaacgttagccaaagaagaagataaattaaaactaattgctttgttacgaacattctttaatcgtttacatgggtaccatattcaatacaatgttgtttccagagagacgctgattgacgctcagaaacatcctgaaaaacacagagacttaattgttcgtgttgcaggatactctgcattcttcaatgttctttctaaggcaacccaagatgacattataggacgtactgagcatactttg

SEQ ID NO: 326 - protein, 812 aa, Streptococcus pneumoniae
  formate acetyltransferase, putative ( ); Cellular location: cytoplasm; Similar to strain R6 sequence 15902276 (0.E+01)
MVNTEVARTTIKTEYFGSLTERMNKYREDVLNKKPYIDAERAVLATRAYERYKEQPNVLKRAYMLKEILENMTIYIEEESMIAGNQASSNKDAPIFPEYTLEFVLNELDLFEKRDGDVFYITEETKEQLRSIAPFWENNNLRARAGALLPEEVSVYMETGFFGMEGKMNSGDAHLAVNYQKLLQFGLRGFEERARKAKVALDLTDPASIDKYHFYDSIFIVIDAIKVYAKRFVALAKSLAENANPKRKKELLEIADICSRVPYEPATTFAEAIQSVWFIQCILQIESNGHSLSYGRFDQYMYPYMKADLESGKETEDSIVERLTNLWIKTITINKVRSQSHTFSSAGSPLYQNVTIGGQTRDKKDAVNPLSYLVLKSVAQTHLPQPNLTVRYHAGLDARFMNECIEVMKLGFGMPAFNNDEIIIPSFIAKGVLEDDAYDYSAIGCVETAVPGKWGYRCTGMSYMNFPKVLLITMNDGIDPASGKRFAPSFGRFKDMKNFSELENAWDKTLRYLTRMSVIVENSIDLSLEREVPDILCSALTDDCIGRGKHLKEGGAVYDYISGLQVGIANLSDSLAAIKKLVFEEERISPSQLWHALETDYAGEEGKVIQEMLIHDAPKYGNDDDYADKLVTAAYDIYVDEIAKYPNTRYGRGPIGGIRYSGTSSISANVGQGRGTLATPDGRNAGTPLAEGCSPSHNMDQHGPTSVLKSVSKLPTDEIVGGVLLNQKVNPQTLAKEEDKLKLIALLRTFFNRLHGYHIQYNVVSRETLIDAQKHPEKHRDLIVRVAGYSAFFNVLSKATQDDIIGRTEHTL

SEQ ID NO: 327 - DNA, 666 bp, Streptococcus pneumoniae
atggaatttatgcttgacacattaaatttagatgagattaaaaagtggtctgaaattttgccgctagctggggtaacttcaaatcccactattgcaaaaagagagggttctattaatttttttgaacgaatcaaagatgtaagagaattgattggctctacaccctctattcatgttcaggtgatttctcaagattttgaaggcatcttaaaggatgctcataaaattcgaagacaagcaggagatgatatatttatcaaagtacctgttactccagctggattacgtgcaataaaggcgctaaaaaaagagggctaccatatcactgcaacagctatttatacagttattcagggattattagctatcgaagcaggagcggattacctagctccatattataatagaatggaaaatctgaacattgattcaaattctgtcattcgtcaattagctcttgctattgatagacagaactctcctagtaagattttagctgcatcctttaaaaatgtagcacaagtaaataatgctttagctgcaggtgcgcatgctgttacagcaggagcggatgtttttgaatcagctttcgccatgccatctatccaaaaggcggttgatgatttttctgacgattggtttgttattcaaaatagtcgttccatt

SEQ ID NO: 328 - protein, 222 aa, Streptococcus pneumoniae
  transaldolase family protein; Cellular location: cytoplasm; Similar to strain R6 sequence 15902277 (e-121)
MEFMLDTLNLDEIKKWSEILPLAGVTSNPTIAKREGSINFFERIKDVRELIGSTPSIHVQVISQDFEGILKDAHKIRRQAGDDIFIKVPVTPAGLRAIKALKKEGYHITATAIYTVIQGLLAIEAGADYLAPYYNRMENLNIDSNSVIRQLALAIDRQNSPSKILAASFKNVAQVNNALAAGAHAVTAGADVFESAFAMPSIQKAVDDFSDDWFVIQNSRSI

SEQ ID NO: 329 - DNA, 1086 bp, Streptococcus pneumoniae
atgagaatttttgctagtccttctagatatattcagggggaaaatgccttgtttgaaaatgccaaatcaattttggatttgggaaattgccctattctattatgcgatcagttggtttatgatattgttggaaaacgatttgaagattacctacataggtatggtttccatattgttctggcgctatttaatggtgaagcttctgacaatgaaatcaatcgagttgttgccttggctgagaaagaaaattgtgatagtattatcggtcttggtgggggaaagacgattgatagcgcaaaagctattgcagatttgattgaaaagcctgttattattgctccaacaattgcatcgaccgacgcacctgtatctgctttatctgttatttatacagatgaaggtgcatttgatcattatctattttattctaaaaatccagatttagttttggttgatacaaaagttatttcacaagcccctaagcgtttattagcgtctggtattgcagatggtttagcaacttgggttgaggcgcgtgcggttatgcaggcaaatggaaaaactatgttgggacaacagcaaacattggctggagttgcaattgcgaagaaatgtgaagaaacgctgtttgcagatggtttacaggctatggcagcttgtgaagctaaagtggtgacaccagcattagaaaatattgttgaagctaatactttattgagtggtctaggttttgaaagtggaggattagctgcggcgcatgcaattcataatggttttactgcattgacaggtgacattcatcatttaacacatggtgaaaaagtagcttatggaactttagtacaactattattggaaaatagacctaaagaagaacttgataagtatattgagttttacaaaaaaattggtatgccaacaactctaaaagaaatgcatttggatcaagttggatatgatgatttaataaaagttggtaaacaagcaactatggagggtgagacaattcatcagatgccgtttaagatttcgccttcagatgttgctcaagctattatcgctgtagatgcctatgtaaattcaaaa

SEQ ID NO: 330 - protein, 362 aa, Streptococcus pneumoniae
  glycerol dehydrogenase (gldA); Cellular location: cytoplasm; Similar to strain R6 sequence 15902278 (0.E+01)
MRIFASPSRYIQGENALFENAKSILDLGNCPILLCDQLVYDIVGKRFEDYLHRYGFHIVLALFNGEASDNEINRVVALAEKENCDSIIGLGGGKTIDSAKAIADLIEKPVIIAPTIASTDAPVSALSVIYTDEGAFDHYLFYSKNPDLVLVDTKVISQAPKRLLASGIADGLATWVEARAVMQANGKTMLGQQQTLAGVAIAKKCEETLFADGLQAMAACEAKVVTPALENIVEANTLLSGLGFESGGLAAAHAIHNGFTALTGDIHHLTHGEKVAYGTLVQLLLENRPKEELDKYIEFYKKIGMPTTLKEMHLDQVGYDDLIKVGKQATMEGETIHQMPFKISPSDVAQAIIAVDAYVNSK

SEQ ID NO: 331 - DNA, 2499 bp, Streptococcus pneumoniae
atgagtttttacaatcataaagaaattgagcctaagtggcagggctactgggcagaacatcatacatttaagacaggaacagatacatcaaaacctaagttttatgcgcttgatatgttcccttatccgtctggagctggtctgcacgtaggacacccagaaggttatactgcaaccgatatcctcagtcgttacaaacgtgcgcaaggctacaatgtccttcacccaatgggttgggatgcttttggtttgcctgcagagcaatacgctatggatactggtaatgacccagcagaatttacagcggaaaacattgccaacttcaaacgtcaaattaatgcgcttggattttcttatgactgggatcgtgaagtcaacacaacagatccaaactactacaagtggactcaatggattttcaccaagctttacgaaaaaggcttggcctatgaagctgaagtgccagtaaactgggttgaggaattgggaactgccattgccaatgaagaagtgcttcctgacggaacttctgagcgtggaggctatccagttgtccgcaaaccaatgcgccaatggatgctcaaaatcacggcttacgcagagcgcttgctcaatgacttagatgaactagattggtcagagtctatcaaggatatgcaacgcaactggattggtaaatcaactggtgccaatgtaactttcaaagtaaaaggaacagacaaggaatttacagtctttactactcgtccggacacacttttcggtgcgactttcactgtcttggctcctgaacatgaattagtagacgctatcacaagttcagagcaagcagaagctgtagcagactataaacaccaagccagccttaagtctgacttggctcgtacagaccttgctaaagaaaaaacaggggtttggactggtgcttatgccatcaaccctgtcaatggtaaggaaatgccaatctggattgcagactatgtccttgctagttatggaacaggtgcggttatggctgtgcctgcccacgaccaacgtgactgggaatttgccaaacaatttgaccttccaatcgtcgaagtacttgaaggtggaaatgtcgaagaagctgcctacacagaggatggcctgcatgtcaattcagacttcctagatggattgaacaaagaagacgctattgccaagattgtggcttggttggaagaaaaaggctgtggtcaggagaaggttacctaccgtctccgcgactggctctttagccgtcaacgttactggggtgagccaattccaatcattcattgggaagatggaacttcaacagctgttcctgaaactgaattgccgcttgtcttgcctgtaaccaaggatatccgtccttcaggtactggtgaaagtccactagctaacttgacagattggcttgaagtgactcgtgaagatggtgtcaaaggtcgtcgtgaaaccaacactatgccacaatgggctggttcaagctggtactacctccgctatattgacccgcacaatactgagaaattggctgatgaggacctcctcaaacaatggttgccagtagatatctacgtgggtggtgcggaacatgctgtacttcacttgctttatgctcgtttctggcataaattcctctatgacctcggtgttgttccgactaaggaaccattccaaaaactctttaaccaagggatgattttgggaacaagctaccgtgaccaccgtggtgctcttgtggcaaccgacaaggttgaaaaacgtgatggttccttcttccatgtagaaacaggggaagagttggagcaagcgccagccaagatgtctaaatcgctcaagaacgttgttaacccagacgatgtggtggaacaatacggtgccgatacccttcgtgtttatgaaatgtttatgggaccactcgatgcttcgattgcttggtcagaagaaggtttggaaggaagccgtaagttccttgaccgagtttaccgtttgattacaagtaaagaaatccttgcggaaaacaatggtgctcttgacaaggtttacaacgaaacagtcaaagctgttactgagcaaattgagtctctcaaattcaacacagctattgcccaacttatggtctttgtcaatgctgctaacaaggaagataagctttatgttgactatgccaaaggctttattcaattgattgcaccatttgcacctcacttggcagaagaactctggcaaacagtcgcagaaacaggtgagtcaatctcttatgtagcttggccaacttgggacgaaagcaaattggttgaagatgaaattgaaattgtcgtccaaatcaaaggaaaagttcgtgccaaactcatggttgctaaagatctatcacgtgaagaattacaagaaatcgctttagctgatgaaaaagtcaaagcagaaattgacggtaaggaaatcgtgaaagtaattgcggtaccgaataaactcgttaatatcgtcgttaaa

SEQ ID NO: 332 - protein, 833 aa, Streptococcus pneumoniae
  leucyl-tRNA synthetase (leuS); Cellular location: cytoplasm; Similar to strain R6 sequence 15902279 (0.E+01)
MSFYNHKEIEPKWQGYWAEHHTFKTGTDTSKPKFYALDMFPYPSGAGLHVGHPEGYTATDILSRYKRAQGYNVLHPMGWDAFGLPAEQYAMDTGNDPAEFTAENIANFKRQINALGFSYDWDREVNTTDPNYYKWTQWIFTKLYEKGLAYEAEVPVNWVEELGTAIANEEVLPDGTSERGGYPVVRKPMRQWMLKITAYAERLLNDLDELDWSESIKDMQRNWIGKSTGANVTFKVKGTDKEFTVFTTRPDTLFGATFTVLAPEHELVDAITSSEQAEAVADYKHQASLKSDLARTDLAKEKTGVWTGAYAINPVNGKEMPIWIADYVLASYGTGAVMAVPAHDQRDWEFAKQFDLPIVEVLEGGNVEEAAYTEDGLHVNSDFLDGLNKEDAIAKIVAWLEEKGCGQEKVTYRLRDWLFSRQRYWGEPIPIIHWEDGTSTAVPETELPLVLPVTKDIRPSGTGESPLANLTDWLEVTREDGVKGRRETNTMPQWAGSSWYYLRYIDPHNTEKLADEDLLKQWLPVDIYVGGAEHAVLHLLYARFWHKFLYDLGVVPTKEPFQKLFNQGMILGTSYRDHRGALVATDKVEKRDGSFFHVETGEELEQAPAKMSKSLKNVVNPDDVVEQYGADTLRVYEMFMGPLDASIAWSEEGLEGSRKFLDRVYRLITSKEILAENNGALDKVYNETVKAVTEQIESLKFNTAIAQLMVFVNAANKEDKLYVDYAKGFIQLIAPFAPHLAEELWQTVAETGESISYVAWPTWDESKLVEDEIEIVVQIKGKVRAKLMVAKDLSREELQEIALADEKVKAEIDGKEIVKVIAVPNKLVNIVVK

SEQ ID NO: 333 - DNA, 693 bp, Streptococcus pneumoniae
atgccagtaaatgaatatggtcaaatgattggggagtcaatggaagcttatactccaggtgaattgccttcttttgatttcttagaagggcgttatgctaggatagaggctctttcagtggaaaagcatgcggaggatttattagctgtttatggccctgatacgcctcgggagatgtggacctacctctttcaggagtcagtagcagacatggaggaactggtcagccttttaaatcagatgttggctcgtaaggaccgtttttattatgcaatcatagacaaggcaactggtaaggctttgggaactttttccctcatgcgaattgatcagaataaccgagtaatagaagtgggagctgtcactttttctccagagctcagggggacacggataggaacagaagcccagtatctcttggcttgctatgtctttgaggagcttaactatcgtcgctatgagtggaaatgcgatgctcttaacctgccatccagacgagcagcggaacgtttgggatttatttatgaaggaaccttccgtcaggcagtggtttataaggggcgtacaagagatacggattggttgtctatgattgataaggactggcctcaagtcaaagctcgattggaaatatggttgcgtcctgaaaactttgataaaaatggacgacagcacaagagcttgagagaactt

SEQ ID NO: 334 - protein, 231 aa, Streptococcus pneumoniae
  acetyltransferase, GNAT family; Cellular location: cytoplasm; Similar to strain R6 sequence 15902280 (e-126)
MPVNEYGQMIGESMEAYTPGELPSFDFLEGRYARIEALSVEKHAEDLLAVYGPDTPREMWTYLFQESVADMEELVSLLNQMLARKDRFYYAIIDKATGKALGTFSLMRIDQNNRVIEVGAVTFSPELRGTRIGTEAQYLLACYVFEELNYRRYEWKCDALNLPSRRAAERLGFIYEGTFRQAVVYKGRTRDTDWLSMIDKDWPQVKARLEIWLRPENFDKNGRQHKSLREL

SEQ ID NO: 335 - DNA, 414 bp, Streptococcus pneumoniae
atgattactattaaaaagcaagaaattgtcaagctagaggatgttttgcatctctatcaggctgtcggttggacaaactatacccatcaaacagagatgctggagcaggccttatctcattcattagtaatttatctggcacttgatggtgatgctgtggtgggcttgattcgtttggttggagatggtttttcatcagtttttgtacaggatttgattgttttgcctagctatcagcgtcaagggattggtagctccttgatgaaagaggctttaggaaattttaaagaggcctatcaagtccagctggcgacagaagagacagaaaaaaacgtgggattttatcgttctatgggctttgaaatcttatccacctatgactgtacaggaatgatttggataaacagagaaaaa

SEQ ID NO: 336 - protein, 138 aa, Streptococcus pneumoniae
  acetyltransferase, GNAT family; Cellular location: membrane; Similar to strain R6 sequence 15902281 (9.E-67)
MITIKKQEIVKLEDVLHLYQAVGWTNYTHQTEMLEQALSHSLVIYLALDGDAVVGLIRLVGDGFSSVFVQDLIVLPSYQRQGIGSSLMKEALGNFKEAYQVQLATEETEKNVGFYRSMGFEILSTYDCTGMIWINREK

SEQ ID NO: 337 - DNA, 411 bp, Streptococcus pneumoniae
atgtcaaaactgctagataagatattatcacgcgaaaatatgctggaagcctacaatcaagtaaaatccaataaaggctcagctgggattgatggaatgactatcgaagagatggataattatctcagacaaaactggcgcttgactaaggaactgataaaacagagaaaatataagcctcaaccagttcttagagttgagatacctaaaccagacggaggcatccgtcaactaggaattccaacagttatggatagaatgattcaacaggccattgtccaagtcatgagccccatttgtgaaccccatttctcagatacgagttatggtttcagaccaaataggtcatgtgaaaaagccatcatgaagctcttagaatacttaaatgacggctatgagtggatagtggat

SEQ ID NO: 338 - protein, 137 aa, Streptococcus pneumoniae
  group II intron, maturase FRAMESHIFT
MSKLLDKILSRENMLEAYNQVKSNKGSAGIDGMTIEEMDNYLRQNWRLTKELIKQRKYKPQPVLRVEIPKPDGGIRQLGIPTVMDRMIQQAIVQVMSPICEPHFSDTSYGFRPNRSCEKAIMKLLEYLNDGYEWIVD

SEQ ID NO: 339 - DNA, 447 bp, Streptococcus pneumoniae
gtggatagtggattagacctagagaaatttttcgatacagttcctcaagatagattgatgtccttagtacataacattatcgaagacggagatacggaatccttgattcgtaagtatcttcattcaggtgttatcattaatggtcaacgttataaaacactagttggtacaccacagggaggaaatttatctcctctcttatccaatatcatgcttaatgaattggacaaggaattagaaaagaggggacttcgatttgtgcgctacgcagatgattgtgtgattacggtcggaagcgaggcagcctctaagcgtgtgatgtattcagtcagtcgttttattgagaaacggctaggtttgaaagtaaacatgaccaagagagttgaaatatctaggttttgggttctggaaattatcagatggttggaaaagccgtccacatcaaga

SEQ ID NO: 340 - protein, 149 aa, Streptococcus pneumoniae
  maturase-related protein
MDSGLDLEKFFDTVPQDRLMSLVHNIIEDGDTESLIRKYLHSGVIINGQRYKTLVGTPQGGNLSPLLSNIMLNELDKELEKRGLRFVRYADDCVITVGSEAASKRVMYSVSRFIEKRLGLKVNMTKRVEISRFWVLEIIRWLEKPSTSR

SEQ ID NO: 341 - DNA, 384 bp, Streptococcus pneumoniae
ttgaagaaactaacacagaggaaatggagtatagacctaacaagacgtattgagcaactgaatttgtctattcgaggatggataaactattgctcattgggaaatatgaaaagtatagtcgccagcatagatgagcgcttgcgtactcgcctacgagtgattatctggaagcaatggaagaagaaatcgagacgattatggggattgcttaagttaggagttcctaaatggatagcagataaggtatctggctggggcgaccattatcaattagtagctcagaagtcggtacttaaacgtgctatatcaaaaccagtcctggaaaaacgtggactggtttcgtgtttggattattaccttgaacgacatgcgttaaaagttagt

SEQ ID NO: 342 - protein, 128 aa, Streptococcus pneumoniae
  maturase-related protein-related
MKKLTQRKWSIDLTRRIEQLNLSIRGWINYCSLGNMKSIVASIDERLRTRLRVIIWKQWKKKSRRLWGLLKLGVPKWIADKVSGWGDHYQLVAQKSVLKRAISKPVLEKRGLVSCLDYYLERHALKVS

SEQ ID NO: 343 - DNA, 90 bp, Streptococcus pneumoniae
atgatggaattagtactcaaaactattatcggaccaattgtggtcggtgtcgttcttcgtatagtcgataaatggctaaacaaggacaaa

SEQ ID NO: 344 - protein, 30 aa, Streptococcus pneumoniae
  hypothetical protein; Cellular location: membrane
MMELVLKTIIGPIVVGVVLRIVDKWLNKDK

SEQ ID NO: 345 - DNA, 996 bp, Streptococcus pneumoniae
atgagtagaattttagataatgagatgatgggtgatgaggagttagtagaacgcacgctccgtcctcagtatttacgtgaatatattggtcaggataaggttaaggatcaacttcagatctttatcgaagccgctaaaatgcgggatgaagcgctggatcatgtgctcttatttggccctccagggcttgggaaaacaaccatggcttttgtcattgccaatgaactgggagtcaatctcaagcaaacgtctggtcctgttatcgaaaaagcgggtgatttggtagcgattttgaatgatttagagcctggagatgtcctctttattgacgagattcatcgcttacccatgtcagtggaagaagtgctttatagtgccatggaggacttctacatcgatattatgattggggctggtgaaggcagtcgcagtgttcatttggagttgcctccttttaccttgattggtgcgacgactcgggctggtatgctctcaaatccactacgggcacgttttgggattacaggtcatatggagtattatgctcatgctgacttgacagaaattgtcgagcggacggcagatatttttgagatggaaatcacccatgaggcagcatctgagttggccctacgtagtcgtggaacccctcgtattgccaatcgtctcctcaagcgcgtgcgcgattttgcccagataatggggaatggggttatcgatgatgttattaccgataaggctttgactatgctggatgttgaccatgaaggtttggactatgtggatcaaaaaatccttcgcaccatgattgagatgtacagtggaggacctgttggtctaggaactctttctgtgaatatcgccgaagagcgtgagacagttgaagacatgtatgagccttacttgattcaaaaaggttttatcatgcggacacggtctggacgggtggcgactgctaaggcatatgagcacttaggttatgaatacagtgaaaaa

SEQ ID NO: 346 - protein, 332 aa, Streptococcus pneumoniae
  Holliday junction DNA helicase RuvB (ruvB); Cellular location: cytoplasm; Similar to strain R6 sequence 15902282 (0.E+01)
MSRILDNEMMGDEELVERTLRPQYLREYIGQDKVKDQLQIFIEAAKMRDEALDHVLLFGPPGLGKTTMAFVIANELGVNLKQTSGPVIEKAGDLVAILNDLEPGDVLFIDEIHRLPMSVEEVLYSAMEDFYIDIMIGAGEGSRSVHLELPPFTLIGATTRAGMLSNPLRARFGITGHMEYYAHADLTEIVERTADIFEMEITHEAASELALRSRGTPRIANRLLKRVRDFAQIMGNGVIDDVITDKALTMLDVDHEGLDYVDQKILRTMIEMYSGGPVGLGTLSVNIAEERETVEDMYEPYLIQKGFIMRTRSGRVATAKAYEHLGYEYSEK

SEQ ID NO: 347 - DNA, 570 bp, Streptococcus pneumoniae
atgaatacagtgaaaaataagcaagaaatcttagaggcttttagagaaagtccagatatgatggccattctgacgatcatccgagaccttggtttgaaagactcgtggttggcagcaggttctgtcagaaatttcatctggaatcttttgtcagacaaatccccttttgatcatgaaacagatatagatgtgattttctttgatccagatttttcttatgaggaaaccttattactggagaaaaagctgagagaggattttcctcagtaccagtgggaattgaaaaatcaggtctatatgcatcagcacagtcctcacactgcttcctataccagttctcgtgatgctatgagtaagtatccagaacggtgtacggcagttggactgcgcttgaatgaagaattagattttgaactctatgtaccttatggtttggaggatattttgaattttcaagttcgtccaactcctcatttcttagaaaatgaagaccgaatggaactctatcaaacacgtttatccaagaaaaattggcaggagaaatggaaaaatttgatttttaaaaatact

SEQ ID NO: 348 - protein, 190 aa, Streptococcus pneumoniae
  conserved hypothetical protein; Cellular location: cytoplasm; Similar to strain R6 sequence 15902283 (e-110)
MNTVKNKQEILEAFRESPDMMAILTIIRDLGLKDSWLAAGSVRNFIWNLLSDKSPFDHETDIDVIFFDPDFSYEETLLLEKKLREDFPQYQWELKNQVYMHQHSPHTASYTSSRDAMSKYPERCTAVGLRLNEELDFELYVPYGLEDILNFQVRPTPHFLENEDRMELYQTRLSKKNWQEKWKNLIFKNT

SEQ ID NO: 349 - DNA, 774 bp, Streptococcus pneumoniae
ttgaataggaataagatcatgtttggattttttaagaaagataaggctgtggaagtagaggttccgacacaggttcctgctcatatcggcatcatcatggatggcaatggccgttgggctaaaaaacgtatgcaaccgcgagtttttggacataaggcgggcatggaagcattgcaaaccgtgaccaaggcagccaacaaactgggcgtcaaggttattacggtctatgctttttctacggaaaactggacccgtccagatcaggaagtcaagtttatcatgaacttgccagtagagttttatgataattatgtcccggaactacatgcgaataatgttaagattcaaatgattggggagacagaccgcctgcctaagcaaacctttgaagctttaaccaaggctgaggaattgactaagaacaacacaggattgattcttaattttgctcttaactatggtggacgtgctgagattacacaggcgcttaagttgatttcccaggatgttttagatgccaaaatcaacccaggtgacatcacagaggaattgattggtaactatctctttactcagcatttgcctaaggacttacgagacccagacttgattatccgtactagtggagaattacgtttgagcaatttccttccatggcagggagcctatagtgagctttattttacggacaccttatggcctgattttgacgaagcggccttgcaggaagctattcttgcctataatcgtcgtcatcgccgatttggaggagtt

SEQ ID NO: 350 - protein, 258 aa, Streptococcus pneumoniae
  undecaprenyl diphosphate synthase (uppS); Cellular location: cytoplasm; Similar to strain R6 sequence 15902284 (e-147)
MNRNKIMFGFFKKDKAVEVEVPTQVPAHIGIIMDGNGRWAKKRMQPRVFGHKAGMEALQTVTKAANKLGVKVITVYAFSTENWTRPDQEVKFIMNLPVEFYDNYVPELHANNVKIQMIGETDRLPKQTFEALTKAEELTKNNTGLILNFALNYGGRAEITQALKLISQDVLDAKINPGDITEELIGNYLFTQHLPKDLRDPDLIIRTSGELRLSNFLPWQGAYSELYFTDTLWPDFDEAALQEAILAYNRRHRRFGGV

SEQ ID NO: 351 - DNA, 801 bp, Streptococcus pneumoniae
atgacccaggatttacagaaaagaaccttgtttgcagggattgccctggctattttcctaccaattttaatgattgggggcctcttgcttcagatagcaatcggaatcatagccatgctagccatgcatgaacttttgaagatgagaggtctagagaccatgacgatggagggcctcttgaccctctttgcaacctttgcattgaccattcccttggagaattacctgacttttttgccagttgatgggaatgtggttgcctatagtgttttgatttcaatcatgttaggaacgaccgtttttagcaagtcttatacgattgaggatgcggttttccctcttgctatgagcttctacgtgggctttggatttaatgctttactagatgctcgtgttgcaggtttggacaaggctctcttagccttgtgtatcgtctgggcgacagacagtggtgcctatcttgttgggatgaactatgggaaacgaaagttagcaccaagggtatcgcctaataaaacccttgagggtgccttgggtggtattttaggagcaattttagtaaccattatccttatgatagttgacagtacagttgctcttccatatggaatttacaagatgtcagtctttgctattttctttagcattgctggacaatttggtgatttactagaaagttcgatcaaacgtcattttggtgttaaggattctgggaaatttatccctggacatggtggtgttttggatcgtttcgatagtatgttgcttgtatttccaatcatgcacttatttggactcttt

SEQ ID NO: 352 - protein, 267 aa, Streptococcus pneumoniae
  phosphatidate cytidylyltransferase; Cellular location: membrane; Similar to strain R6 sequence 15902285 (e-146)
MTQDLQKRTLFAGIALAIFLPILMIGGLLLQIAIGIIAMLAMHELLKMRGLETMTMEGLLTLFATFALTIPLENYLTFLPVDGNVVAYSVLISIMLGTTVFSKSYTIEDAVFPLAMSFYVGFGFNALLDARVAGLDKALLALCIVWATDSGAYLVGMNYGKRKLAPRVSPNKTLEGALGGILGAILVTIILMIVDSTVALPYGIYKMSVFAIFFSIAGQFGDLLESSIKRHFGVKDSGKFIPGHGGVLDRFDSMLLVFPIMHLFGLF

SEQ ID NO: 353 - DNA, 1257 bp, Streptococcus pneumoniae
atgctcggaattttaacctttattctggttttcgggattattgtagtggtgcacgagttcggtcacttctactttgccaagaaatcagggattttagtacgtgaatttgccatcggtatgggacctaaaatttttgctcacattggcaaggatggaacggcctataccattcgaatcttgcctctgggtggctatgtccgcatggccggttggggtgatgatacaactgaaatcaagacaggaacgcctgttagtttgacacttgctgatgatggtaaggttaaacgcatcaatctctcaggtaaaaaattggatcaaacagccctccctatgcaggtgacccagtttgattttgaagacaagctctttatcaaaggattggttctggaagaagaaaaaacatttgcagtggatcacgatgcaacggttgtggaagcagatggtactgaggttcggattgcacctttagatgttcaatatcaaaatgcgactatctggggcaaactgattaccaattttgcaggtcctatgaacaattttatcttaggtgtcgttgttttttgggttttaatctttatgcagggtggtgtcagagatgttgataccaatcagttccatatcatgccccaaggtgccttggccaaggtaggagtaccagaaatggcacaaattaccaagattggctcacatgaggttagcaactgggaaagcttgatccaagctgtggaaacagaaaccaaagataagacggcaccgactttggatgtgactatttctgaaaaggggagtgacaaacaagtcactgttacacccaaagatagtcaaggtcgttaccttctaggtgttcaaccgggggttaagtcagattttctatccatgtttgtaggtggttttacaactgctgctgactcagctctccgaattctctcagctctgaaaaatctgattttccaaccagatttgaacaagttgggtggacctgttgctatctttaaggcaagtagtgatgctgctaaaaatggaattgaaaatatcttgtacttcttggcaatgatttccatcaatattgggatttttaatcttattccgattccagccttggatggtggtaagattgtgctcaatatcctagaagccatccgccgcaaaccattgaaacaagaaattgaaacctatgtcaccttggccggagtggtcatcatggttgtcttgatgattgctgtgacttggaatgacattatgcgactcttttttaga

SEQ ID NO: 354 - protein, 419 aa, Streptococcus pneumoniae
  eep protein (eep); Cellular location: membrane; Similar to strain R6 sequence 15902286 (0.E+01)
MLGILTFILVFGIIVVVHEFGHFYFAKKSGILVREFAIGMGPKIFAHIGKDGTAYTIRILPLGGYVRMAGWGDDTTEIKTGTPVSLTLADDGKVKRINLSGKKLDQTALPMQVTQFDFEDKLFIKGLVLEEEKTFAVDHDATVVEADGTEVRIAPLDVQYQNATIWGKLITNFAGPMNNFILGVVVFWVLIFMQGGVRDVDTNQFHIMPQGALAKVGVPEMAQITKIGSHEVSNWESLIQAVETETKDKTAPTLDVTISEKGSDKQVTVTPKDSQGRYLLGVQPGVKSDFLSMFVGGFTTAADSALRILSALKNLIFQPDLNKLGGPVAIFKASSDAAKNGIENILYFLAMISINIGIFNLIPIPALDGGKIVLNILEAIRRKPLKQEIETYVTLAGVVIMVVLMIAVTWNDIMRLFFR

SEQ ID NO: 355 - DNA, 1851 bp, Streptococcus pneumoniae
atgaaacaaagtaaaatgcctatcccaacgcttcgcgaaatgccaagcgatgctcaagttatcagccatgctcttatgttgcgtgctggttatgttcgccaagtttcagcaggtgtttattcttatctaccacttgccaaccgtgtgattgaaaaagctaaaaacatcatgcgccaagaattcgaaaagattggtgctgttgagatgttggctccagcccttcttagtgcagaattgtggcgtgaatcaggtcgttacgaaacctatggtgaagacctttacaaactaaaaaaccgtgaaaaatcagactttatcttaggtccaactcacgaagaaacctttacagctattgtccgtgattctgttaaatcttacaagcaattgccactcaacctttatcaaattcagcccaagtatcgtgatgaaaaacgcccgcgtaatggacttcttcgtacacgtgagtttatcatgaaggatgcttatagtttccacgctaactatgatagtttggatagtgtttatgatgagtacaaagcagcctatgagcgtattttcactcgtagtggtttagacttcaaggctattattggtgacggtggagccatgggtggtaaggatagccaagaatttatggccattacatctgctcgtacagaccttgaccgctgggttgtcttggacaagtcagttgcctcatttgacgaaattcctgcagaagtgcaagaagaaatcaaggcagaattgctcaaatggatagtctctggtgaagataccattgcttactcaagtgagtctagctatgcagctaacttagaaatggcaacaaacgagtacaaaccaagcaaccgtgttgtcgctgaagaagaagttactcgtgttgcaacgccagatgttaaatcaattgatgaagttgcagccttcctcaatgttccagaagaacaaacgattaaaaccctcttctacattgcagatggtgagcttgttgcagcccttctagttggaaatgaccaactcaacgaagtcaagttgaaaaatcacttgggagcagatttctttgacgttgctagcgaagaagaagtggcgaatgttgttcaagcaggatttggttcacttggaccagttggtttgccagagaatattaaaattattgcagatcgtaaggtacaagatgttcgcaatgcagttgtcggtgctaacgaagatgactaccacttgactggtgtgaacccaggccgtgattttactgcagaatatgtggatatccgtgaagttcgtgagggtgaaatttccccagatggacaaggtgtccttaactttgcgcgtggtattgagatcggtcatattttcaaactcggaactcgctattcagcaagcatgggagcagatgtcttggatgaaaatggtcgtgctgtgccaatcatcatgggatgttacggtatcggtgtcagccgtcttctttcagcagtgatggagcaacacgctcgcctctttgttaacaaaacgccaaaaggtgaataccgttacgcttggggaatcaatttccctaaagaattggcaccatttgatgtgcatttgattactgtcaatgtcaaggatgaagaagcgcaagccttgacagaaaaacttgaagcaagcttgatgggagctggttatgaagtcttgacagatgaccgtaacgaacgtgtcggtgttaaatttagcgatagtgacttgattggtcttccaatccgtatcactgttggtaaaaaagcggccgatggcattgtagaagttaagatcaaggcaactggtgacaccattgaggttcatgcagataacgtgcttgaaacgcttgaaatcctaagcaagaaa

SEQ ID NO: 356 - protein, 617 aa, Streptococcus pneumoniae
  prolyl-tRNA synthetase (proS); Cellular location: membrane; Similar to strain R6 sequence 15902287 (0.E+01)
MKQSKMPIPTLREMPSDAQVISHALMLRAGYVRQVSAGVYSYLPLANRVIEKAKNIMRQEFEKIGAVEMLAPALLSAELWRESGRYETYGEDLYKLKNREKSDFILGPTHEETFTAIVRDSVKSYKQLPLNLYQIQPKYRDEKRPRNGLLRTREFIMKDAYSFHANYDSLDSVYDEYKAAYERIFTRSGLDFKAIIGDGGAMGGKDSQEFMAITSARTDLDRWVVLDKSVASFDEIPAEVQEEIKAELLKWIVSGEDTIAYSSESSYAANLEMATNEYKPSNRVVAEEEVTRVATPDVKSIDEVAAFLNVPEEQTIKTLFYIADGELVAALLVGNDQLNEVKLKNHLGADFFDVASEEEVANVVQAGFGSLGPVGLPENIKIIADRKVQDVRNAVVGANEDDYHLTGVNPGRDFTAEYVDIREVREGEISPDGQGVLNFARGIEIGHIFKLGTRYSASMGADVLDENGRAVPIIMGCYGIGVSRLLSAVMEQHARLFVNKTPKGEYRYAWGINFPKELAPFDVHLITVNVKDEEAQALTEKLEASLMGAGYEVLTDDRNERVGVKFSDSDLIGLPIRITVGKKAADGIVEVKIKATGDTIEVHADNVLETLEILSKK

SEQ ID NO: 357 - DNA, 1377 bp, Streptococcus pneumoniae
atgctaagatttccaaaggattttgtctggggatcctctacttctggaccgcagacagaaggacgtgtagctggtgacggtaagggagacaatctctgggattactggttccaagtggagccaaatcgttactataatgggattggttcagataagacatcgactttttatgaaaattgggagcgggatattgagcttttgttagagactggtcacacagcctttcggacttctattcagtggtcacggatttttccacaaggctgtggaaaagtcaacactcaaggtgtggatttttatcgtaaggtctttgaggctattaaggctaaaggaattcgtctgttagtcaatctctatcattttgatttaccttttgcccttcaagaggatggtgatggttgggaaaataaggcgacagtctcagcctatgaagactatgctcgtttttgttttgagacttatggagatttagtggatcaatggattacctttaacgagcccatcgttcctgtagaatttggttatttttatgatgcccattatccacataaggtggatgcagaggcagctgttaaggtagcctatcatacacaattggccagcagccgggctgttaaggcttgccatgaacttttgcctgattccaagattgggattgtcctcaacttgacaccggcttatccacgtagccagcatcctgctgatgtcaaggcagctcgtattgcggccctttttcaggcccaatctttcttagatccatctgtcttggggacttatccacaggagttggtagaaatcttgcatgaacacggtcttttacctgatgctacagaggaagagttggaactcattcgtgataatacggtggacttccttggtgtgaactactatcaacctttgcgtgttatggctcctcgatttgctaagcatccagagagtccactcttaccagaacatttttacgagccttatgtgatgcctggacgtaaaatcaattctcaccgtggttgggagatttatgagcaagggatttatgacatcgcccaaaatatcaaggaaaattatggcaatattgagtggatgttgactgagaatggtatgggtgttgaaggggaagaaaaattccgtcaagatggaatgattcaagatgattaccgtattgactttgtaaaaggtcatcttcgtgaacttcaccgtgccattgaagatggtgccaactgtaagggctacttgatttggacctttattgactgctggtcatggctcaacagctataaaaatcgctatggtttggtcgaattagacttggaaacgcaagaacgtcgtctgaagaaatcaggccactggttcaaagaattaagcgataataatggattt

SEQ ID NO: 358 - protein, 459 aa, Streptococcus pneumoniae
  glycosyl hydrolase, family 1; Cellular location: cytoplasm; Similar to strain R6 sequence 15902288 (0.E+01)
MLRFPKDFVWGSSTSGPQTEGRVAGDGKGDNLWDYWFQVEPNRYYNGIGSDKTSTFYENWERDIELLLETGHTAFRTSIQWSRIFPQGCGKVNTQGVDFYRKVFEAIKAKGIRLLVNLYHFDLPFALQEDGDGWENKATVSAYEDYARFCFETYGDLVDQWITFNEPIVPVEFGYFYDAHYPHKVDAEAAVKVAYHTQLASSRAVKACHELLPDSKIGIVLNLTPAYPRSQHPADVKAARIAALFQAQSFLDPSVLGTYPQELVEILHEHGLLPDATEEELELIRDNTVDFLGVNYYQPLRVMAPRFAKHPESPLLPEHFYEPYVMPGRKINSHRGWEIYEQGIYDIAQNIKENYGNIEWMLTENGMGVEGEEKFRQDGMIQDDYRIDFVKGHLRELHRAIEDGANCKGYLIWTFIDCWSWLNSYKNRYGLVELDLETQERRLKKSGHWFKELSDNNGF

SEQ ID NO: 359 - DNA, 1806 bp, Streptococcus pneumoniae
atgtgtggaattgttggtgttgttggaaacacaaatgcaactgatattttgattcaagggcttgaaaagcttgaataccgtggctatgattctgcgggaatttttgtcctagatggtgctgataaccatttggtgaaggcggttggtcgtattgcagaattgtctgccaagacagctggtgttgagggaacaactggtatcggacatactcgttgggctactcacggaaaaccaactgaggacaatgctcacccacaccgctctgagacggaacgttttgtcttggtgcataatggggtgattgagaactatcttgaaatcaaggaagaataccttgcaggtcaccacttcaaggggcagacagatactgaaatagccgttcatttgattggaaaatttgcggaagaagaagggctctcagttcttgaagccttcaaaaaagcccttcacatcatccgtggttcttatgcctttgccttggttgactcacaagatcctgaagtcatctacgtagctaaaaataaatcaccacttttgattggtcttggagaaggctataacatggtctgctcagacgccatggctatgattcgtgaaactaaccaatacatggaaatccatgaccaagagttggtaatcgtcaaggctgatagtgtggaagttcaagactatgatggaaatcgtcgtgagcgtgctagctacactgctgaacttgacttgtcagatatcggtaagggaacttacccttactacatgctcaaggaaattgacgagcaaccaactgttatgcggaaactcatccaagcctacacagatgaggctggtcaagttgtcgtagacccagatatcattaaggctgttcaagacgcagaccgcatctacatccttgcagctggaacatcttaccatgcaggatttgcttctaagaaaatgttggaagaattgacagatacaccagttgaacttggaatctcatctgagtggggctacggtatgccacttctcagcaagaaaccactcttcatctttatcagccaatctggtgaaacagcggatagtcgtcaagttttggtcaaggctaatgaaatgggaattccaagcttaacagtgacaaacgttccaggttcaaccctctcacgtgaagccaactataccatgctccttcacgcaggtcctgaaattgccgtggcatcaactaaagcctatacagcgcaaatcgcagcccttgccttccttgcaaaagcagtcggagaagcaaatggtaatgctaaagcgcaagcctttgacctggttcatgaattgtcaatcgtagctcagtctatcgaatcaactctttcagagaaagaaaccattgaagtcaaggttcgtgaacttcttgaaacaactcgtaacgccttttacatcggacgtggtcaagattactacgtagccatggaagcaagtctcaaactcaaagagatttcttatatccagtgtgaaggctttgctgcaggagaactcaagcacggaaccattgccttgattgaagaaggaacgcctgttttggctctcttgtcagatccagttcttgccaatcatactcgtggaaatatccaagaggtcgcagcccgtggtgccaaagtcctcactatcgcagaagagaatgtagccaaagataccgacgatatcgtccttacgaccgtacatccatacctctcaccaatttcaatggtcgtaccaacgcaattagtcgcttactttgcaaccctccaccgtggcctcgatgtggacaaaccacgtaaccttgccaagtcagtaacggtagaa

SEQ ID NO: 360 - protein, 602 aa, Streptococcus pneumoniae
  glucosamine--fructose-6-phosphate aminotransferase, isomerizing (glmS); Cellular location: cytoplasm; Similar to strain R6 sequence 15902289 (0.E+01)
MCGIVGVVGNTNATDILIQGLEKLEYRGYDSAGIFVLDGADNHLVKAVGRIAELSAKTAGVEGTTGIGHTRWATHGKPTEDNAHPHRSETERFVLVHNGVIENYLEIKEEYLAGHHFKGQTDTEIAVHLIGKFAEEEGLSVLEAFKKALHIIRGSYAFALVDSQDPEVIYVAKNKSPLLIGLGEGYNMVCSDAMAMIRETNQYMEIHDQELVIVKADSVEVQDYDGNRRERASYTAELDLSDIGKGTYPYYMLKEIDEQPTVMRKLIQAYTDEAGQVVVDPDIIKAVQDADRIYILAAGTSYHAGFASKKMLEELTDTPVELGISSEWGYGMPLLSKKPLFIFISQSGETADSRQVLVKANEMGIPSLTVTNVPGSTLSREANYTMLLHAGPEIAVASTKAYTAQIAALAFLAKAVGEANGNAKAQAFDLVHELSIVAQSIESTLSEKETIEVKVRELLETTRNAFYIGRGQDYYVAMEASLKLKEISYIQCEGFAAGELKHGTIALIEEGTPVLALLSDPVLANHTRGNIQEVAARGAKVLTIAEENVAKDTDDIVLTTVHPYLSPISMVVPTQLVAYFATLHRGLDVDKPRNLAKSVTVE

SEQ ID NO: 361 - DNA, 1047 bp, Streptococcus pneumoniae
atggtagaattgggaatttcaacatttggggaaataacggagcttgaagggactggacaaacttacagtcatgctgaacgcattcgccagttggtggcagagattgagctggctgacaaggttggtttggatgtatatgggattggtgagcaccatcgggcggattttgcagtatcagccccagagattgttctggccgctggggcagtcaataccaagaaaatccgtttgaccagtgcagtcagcattctgtcaagcatggacccgattcgtttgttccaacagtatgccactatcgatgctttgtcaaatggacgatcggagattatggctggaaggggctctttcacggaatctttccctctgtttggttatgacttgaaagactacgactctctttttgatgagaaattagacttgcttcagttagtcaatgaaaagaccaagttagactggcaaggtcgattgactcaaacgattgctggtaaagaagtttatcctcgtccagttcaggacaaattgcccttgtggatagctacaggtggtcatgtcgaatcaacagtgaagattgctcaggctggtctaccgattgtatatgctattattggtggtaatccacgttattttaaaaagttgattcaggcttatcgtgagattggaagcgaagcgggccatgctgacaaagacttgaaagtgggagcccattcttgggggtggattgcggaagatggtgagcaggcggtgaaagattatttccatccgactaagcaagtggtggatgctatttccaaagaccgtccgcactggcaggaattgcgttatgagcaatatttggagcaggtagggccaaatggcgccatgtttgttggcaatccagatcaggtggccgaaaaattgattcgcatgatagaggatttaggattggaccgcttcatgcttcatctaccgcttggttctatgcctcatgaccaggttctgagagctattgaactcttcggaacacaagttgcacccaaagtacgagcttattttgctatgaaagaggct

SEQ ID NO: 362 - protein, 349 aa, Streptococcus pneumoniae
  oxidoreductase, putative; Cellular location: cytoplasm; Similar to strain R6 sequence 15902290 (0.E+01)
MVELGISTFGEITELEGTGQTYSHAERIRQLVAEIELADKVGLDVYGIGEHHRADFAVSAPEIVLAAGAVNTKKIRLTSAVSILSSMDPIRLFQQYATIDALSNGRSEIMAGRGSFTESFPLFGYDLKDYDSLFDEKLDLLQLVNEKTKLDWQGRLTQTIAGKEVYPRPVQDKLPLWIATGGHVESTVKIAQAGLPIVYAIIGGNPRYFKKLIQAYREIGSEAGHADKDLKVGAHSWGWIAEDGEQAVKDYFHPTKQVVDAISKDRPHWQELRYEQYLEQVGPNGAMFVGNPDQVAEKLIRMIEDLGLDRFMLHLPLGSMPHDQVLRAIELFGTQVAPKVRAYFAMKEA

SEQ ID NO: 363 - DNA, 3840 bp, Streptococcus pneumoniae
atgagaaaaacaccatctcacactgagaaaaaaatggtctacagcatccgttccctcaaaaatggaactggttctgtccttatcggcgcaagccttgtcttgcttgccatggctacaccaactatctcatccgacgaaagtacaccaaccactaacgaacccaacaacagaaatacaaccacccttgcccaacctcttactgatacagcagctggctctggtaagaacgaaagtgatatttcttcacctggaaatgcaaacgcttccctagagaaaacagaagaaaaacctgctgcaagcccagccgatccagcaccacaaactggacaagatcgttcaagtgagccaactacttctactagtccagtaacaactgaaactaaggcagaagagcccatcgaagataactacttccgtatccatgtcaaaaaacttcctgaagaaaacaaggatgctcaaggactatggacttgggacgatgttgaaaaaccatctgaaaactggccaaacggagctttgtccttcaaggatgccaagaaagatgactacggctattacctagatgtcaaattaaagggagaacaagccaagaaaattagcttcctcatcaacaatacagctggaaaaaatctaaccggcgataaatctgtagaaaaactagttccaaaaatgaacgaagcttggttagaccaagattacaaggttttctcttacgagccacagcctgcaggaactgttcgcgtcaactactaccgcacagatggcaactatgacaagaaatctctctggtactggggagatgtgaaaaatccaagtagcgctcaatggcctgacggaacagactttacggctacaggcaaatatggccgctatatcgacattcctcttaatgaagccgcaagagaatttggatttttattactagatgagagcaaacaaggagacgacgtgaaaatccgtaaagaaaattataagttcacagatttgaaaaatcatagccaaattttcctaaaagacgatgatgaatcgatttacacaaatccatactatgtccatgatatccgtatgacaggagcccaacacgtaggcacttctagcattgaaagtagcttttcaacacttgtcggtgctaaaaaagaagatatcctcaaacactccaacatcactaatcacctaggaaacaaggtaactattaccgatgttgcaatcgatgaagctggtaagaaagtgacctacagcggagatttctctgacacaaaacatccttatactgttagctacaattccgaccaattcactaccaaaacaagctggcgcctgaaagatgagacatacagctatgatggcaaactgggagctgacctaaaagaagaaggaaaacaagttgatttgaccctttggtcaccaagtgctgataaggtttctgttgttgtctacgacaagaatgaccctgacaaagtagttggaactgtcgctcttgaaaaaggggaaagaggaacttggaaacaaactctagacagcacaaacaaactcggaatcacagatttcactggctactattatcaataccaaatcgagcgtcaaggtaaaactgttcttgcactcgatccttacgctaaatctcttgctgcttggaatagcgacgattccaagattgacgatgcccataaagtggctaaagccgcctttgtagatccagctaaactcggacctcaagacttgacttatggtaagattcacaatttcaagactcgtgaagacgccgttatctacgaagctcatgtgcgtgatttcacttcagatcctgccattgcaaaagacttgaccaaaccatttgggacttttgaagccttcattgaaaaactagactatctcaaagacttgggtgtaacccatatccagctccttccagtcttgtcttactactttgtcaatgaattgaaaaaccatgaacgcttgtctgactacgcttcaagcaacagcaactacaactggggatatgaccctcaaaactacttctccttgactggtatgtactcaagcgatcctaagaatccagaaaaacgaatcgcagaatttaaaaacctcatcaacgaaatccacaaacgtggtatgggagctatcctagatgtcgtttataaccacacagccaaagtcgatctctttgaagatttggaaccaaactactaccactttatggatgccgatggcacacctcgaactagctttggtggtggacgcttggggacaacccaccatatgaccaaacggctcctaattgactctatcaaatacctagttgatacctacaaagtggatggcttccgtttcgatatgatgggagaccatgacgccgcttctatcgaagaagcttacaaggctgcacgcgccctcaatccaaacctcatcatgcttggtgaaggttggagaacctatgccggtgatgaaaacatgcctactaaagctgctgaccaagattggatgaaacataccgatactgtcgctgtcttttcagatgacatccgtaacaacctcaaatctggttatccaaacgaaggtcaacctgcctttatcacaggtggcaagcgtgatgtcaacaccatctttaaaaatctcattgctcaaccaactaactttgaagctgacagccctggagatgtcatccaatacatcgcagcccatgataacttgaccctctttgacatcattgcccagtctatcaaaaaagacccaagcaaggctgagaactatgctgaaatccaccgtcgtttacgacttggaaatctcatggtcttgacagctcaaggaactccatttatccactccggtcaggaatatggacgtactaaacaattccgtgacccagcctacaagactccagtagcagaggataaggttccaaacaaatctcacttgttgcgtgataaggacggcaacccatttgactatccttacttcatccatgactcttacgattctagtgatgcagtcaacaagtttgactggactaaggctacagatggtaaagcttatcctgaaaatgtcaagagccgtgactatatgaaaggtttgattgcccttcgtcaatctacagatgccttccgacttaagagtcttcaagatatcaaagaccgtgtccacctcatcactgtcccaggccaaaatggtgtggaaaaagaggatgtagtgattggctaccaaatcactgctccaaacggcgatatctacgcagtctttgtcaatgcggatgaaaaagctcgcgaatttaatttgggaactgcctttgcacatctaagaaatgcggaagttttggcagatgaaaaccaagcaggaccagtcggaattgccaacccgaaaggacttgaatggactgaaaaaggcttgaaattgaatgcccttacagctactgttcttcgagtctctcaaaatggaactagccatgagtcaactgcagaagagaaaccagactcaaccccttccaagcctgaacatcaaaatgaagcttctcaccctgcacatcaagacccagctccagaagctagacctgattctactaaaccagatgccaaagtagctgatgcggaaaataaacctagccaagctacagctgattcacaagctgaacaaccagcacaagaagcacaagcatcatctgtaaaagaagcggttcgaaacgaatcggtagaaaactctagcaaggaaaatatacctgcaaccccagataaacaagctgaacttccaaatacaggaatcaaaaacgaaaacaaactcctatttgcaggaatcagcctccttgcgctccttggtctcggtttcttactaaaaaataaaaaagagaac

SEQ ID NO: 364 - protein, 1280 aa, Streptococcus pneumoniae
  alkaline amylopullulanase, putative; Cellular location: Peptidoglycan-bound (LPXTG); Similar to strain R6 sequence 15902291 (0.E+01)
MRKTPSHTEKKMVYSIRSLKNGTGSVLIGASLVLLAMATPTISSDESTPTTNEPNNRNTTTLAQPLTDTAAGSGKNESDISSPGNANASLEKTEEKPAASPADPAPQTGQDRSSEPTTSTSPVTTETKAEEPIEDNYFRIHVKKLPEENKDAQGLWTWDDVEKPSENWPNGALSFKDAKKDDYGYYLDVKLKGEQAKKISFLINNTAGKNLTGDKSVEKLVPKMNEAWLDQDYKVFSYEPQPAGTVRVNYYRTDGNYDKKSLWYWGDVKNPSSAQWPDGTDFTATGKYGRYIDIPLNEAAREFGFLLLDESKQGDDVKIRKENYKFTDLKNHSQIFLKDDDESIYTNPYYVHDIRMTGAQHVGTSSIESSFSTLVGAKKEDILKHSNITNHLGNKVTITDVAIDEAGKKVTYSGDFSDTKHPYTVSYNSDQFTTKTSWRLKDETYSYDGKLGADLKEEGKQVDLTLWSPSADKVSVVVYDKNDPDKVVGTVALEKGERGTWKQTLDSTNKLGITDFTGYYYQYQIERQGKTVLALDPYAKSLAAWNSDDSKIDDAHKVAKAAFVDPAKLGPQDLTYGKIHNFKTREDAVIYEAHVRDFTSDPAIAKDLTKPFGTFEAFIEKLDYLKDLGVTHIQLLPVLSYYFVNELKNHERLSDYASSNSNYNWGYDPQNYFSLTGMYSSDPKNPEKRIAEFKNLINEIHKRGMGAILDVVYNHTAKVDLFEDLEPNYYHFMDADGTPRTSFGGGRLGTTHHMTKRLLIDSIKYLVDTYKVDGFRFDMMGDHDAASIEEAYKAARALNPNLIMLGEGWRTYAGDENMPTKAADQDWMKHTDTVAVFSDDIRNNLKSGYPNEGQPAFITGGKRDVNTIFKNLIAQPTNFEADSPGDVIQYIAAHDNLTLFDIIAQSIKKDPSKAENYAEIHRRLRLGNLMVLTAQGTPFIHSGQEYGRTKQFRDPAYKTPVAEDKVPNKSHLLRDKDGNPFDYPYFIHDSYDSSDAVNKFDWTKATDGKAYPENVKSRDYMKGLIALRQSTDAFRLKSLQDIKDRVHLITVPGQNGVEKEDVVIGYQITAPNGDIYAVFVNADEKAREFNLGTAFAHLRNAEVLADENQAGPVGIANPKGLEWTEKGLKLNALTATVLRVSQNGTSHESTAEEKPDSTPSKPEHQNEASHPAHQDPAPEARPDSTKPDAKVADAENKPSQATADSQAEQPAQEAQASSVKEAVRNESVENSSKENIPATPDKQAELPNTGIKNENKLLFAGISLLALLGLGFLLKNKKEN

SEQ ID NO: 365 - DNA, 93 bp, Streptococcus pneumoniae
gtgttctcagctatttttattcagaaattgatctctaacattaccaataaaaaagaaaaatatcttgacaagcaagggaaaattttgttacaa

SEQ ID NO: 366 - protein, 31 aa, Streptococcus pneumoniae
  hypothetical protein; Cellular location: cytoplasm
MFSAIFIQKLISNITNKKEKYLDKQGKILLQ

SEQ ID NO: 367 - DNA, 90 bp, Streptococcus pneumoniae
atgttgcaaaagtacacacagatgatatctgtcaccaagtgtatcatcaccaaaaataaaaaaacacaggagaatgtagatgcctacaat

SEQ ID NO: 368 - protein, 30 aa, Streptococcus pneumoniae
  hypothetical protein; Cellular location: cytoplasm
MLQKYTQMISVTKCIITKNKKTQENVDAYN

SEQ ID NO: 369 - DNA, 411 bp, Streptococcus pneumoniae
atgcctacaattaaccaattggttcgcaaaccgcgtaaatcaaaagtagaaaaatctaaatcaccagctttgaacgttggttacaatagtcataaaaaagttcaaacaaacgtttcttcaccacaaaaacgtggtgttgcaactcgtgttggaacaatgacacctaaaaaacctaactcagcccttcgtaaattcgctcgtgtacgtttgagcaaccttatcgaagttactgcctacatcccaggtatcggacacaacttgcaagagcacagcgtggtgcttcttcgcggtggacgtgtaaaagaccttccaggggtacgttaccatatcgtccgtggtgcacttgatactgcaggtgttaacgatcgtaaacaaggccgttctaaatacggtactaaacgtccaaaagca

SEQ ID NO: 370 - protein, 137 aa, Streptococcus pneumoniae
  ribosomal protein S12 (rpsL); Cellular location: cytoplasm; Similar to strain R6 sequence 15902292 (2.E-75)
MPTINQLVRKPRKSKVEKSKSPALNVGYNSHKKVQTNVSSPQKRGVATRVGTMTPKKPNSALRKFARVRLSNLIEVTAYIPGIGHNLQEHSVVLLRGGRVKDLPGVRYHIVRGALDTAGVNDRKQGRSKYGTKRPKA

SEQ ID NO: 371 - DNA, 468 bp, Streptococcus pneumoniae
atgagtcgtaaaaatagagctccaaaacgtgacgtattgccagatccgctatacaattcacaactagttactcgtcttatcaaccgcgttatgcttgatggtaaacgtggtactgctgcttcaatcgtttacggtgcttttgagcaaatcaaagaagctactggcaacgatgcacttgaagtatttgaaacagctatggaaaacatcatgcctgtacttgaagtacgtgcacgtcgtgttggtggttctaactaccaagtcccagttaaagttcgtccagaacgtcgtacaacacttggacttcgttggttggtaacaatcgctcgtcttcgtggtgaacacacaatgcaagaccgtcttgcaaaagaaatcttggatgctgctaacaacactggtgcagcagttaagaaacgtgaagatactcaccgtatggctgaagctaaccgtgcattcgcacacttccgttgg

SEQ ID NO: 372 - protein, 156 aa, Streptococcus pneumoniae
  ribosomal protein S7 (rpsG); Cellular location: cytoplasm; Similar to strain R6 sequence 15902293 (6.E-86)
MSRKNRAPKRDVLPDPLYNSQLVTRLINRVMLDGKRGTAASIVYGAFEQIKEATGNDALEVFETAMENIMPVLEVRARRVGGSNYQVPVKVRPERRTTLGLRWLVTIARLRGEHTMQDRLAKEILDAANNTGAAVKKREDTHRMAEANRAFAHFRW

SEQ ID NO: 373 - DNA, 2079 bp, Streptococcus pneumoniae
atggcacgcgaattttcacttgaaaaaactcgtaatatcggtatcatggctcacgtcgatgccggtaaaacaacaactactgagcgtattctttactacactggtaaaatccacaaaatcggtgaaactcacgaaggtgcgtcacaaatggactggatggagcaagagcaagaacgtggtatcacgatcacatctgctgcgacgacagctcaatggaacaaccaccgcgtaaacatcatcgacacaccaggacacgtggacttcacaatcgaagtacaacgttctcttcgtgtattggatggtgcggttaccgttcttgactcacaatcaggtgttgagcctcaaactgaaacagtttggcgtcaagcaactgagtacggagttccacgtatcgtatttgccaacaaaatggacaaaatcggtgctgacttcctttactctgtaagcacacttcacgatcgtcttcaagcaaatgcacacccaatccaattgccaatcggttctgaagatgacttccgtggtatcattgacttgatcaagatgaaagctgaaatctatactaacgaccttggtacggatatccttgaagaagacatcccagctgaataccttgaccaagctcaagaataccgtgaaaaattgattgaagcagttgctgaaactgacgaagaattgatgatgaaatacctcgaaggtgaagaaatcactaacgaagaattgaaagctggtatccgtaaagcgactatcaacgttgaattcttcccagtattgtgtggttcagccttcaaaaacaaaggtgttcaattgatgcttgatgcggttatcgactaccttccaagcccacttgacatcccagcaatcaaaggtattaacccagatacagacgctgaagaaattcgtccagcatctgacgaagagccatttgcagctcttgccttcaagatcatgactgacccattcgtaggtcgtttgacattcttccgtgtttactcaggtgttcttcaatcaggttcatacgtattgaatacttctaaaggtaaacgtgaacgtatcggacgtatccttcaaatgcacgctaacagccgtcaagaaatcgacactgtttactcaggtgatatcgctgctgccgttggtttgaaagatactacaactggtgactcattgacagatgaaaaagctaaaatcatccttgagtcaatcaacgttccagaaccagttatccaattgatggttgagccaaaatctaaagctgaccaagacaagatgggtatcgcccttcaaaaattggctgaagaagatccaacattccgcgttgaaacaaacgttgaaactggtgaaacagttatctcaggtatgggtgaacttcaccttgacgtccttgttgatcgtatgcgtcgtgagttcaaagttgaagcgaacgtaggtgctcctcaagtatcttaccgtgaaacattccgcgcttctactcaagcacgtggattcttcaaacgtcagtctggtggtaaaggtcaattcggtgatgtatggattgaatttactccaaacgaagaaggtaaaggattcgaattcgaaaacgcaatcgtcggtggtgtggttcctcgtgaatttatcccagcggttgaaaaaggtttggtagaatctatggctaacggtgttcttgcaggttacccaatggttgacgttaaagctaagctttatgatggttcatatcacgatgtcgactcatctgaaactgccttcaagattgcggcttcactttcccttaaagaagctgctaaatcagcacaaccagctatccttgaaccaatgatgcttgtaacaatcactgttccagaagaaaaccttggtgatgttatgggtcacgtaactgctcgtcgtggacgtgtagatggtatggaagcacacggtaacagccaaatcgttcgtgcttacgttccacttgctgaaatgttcggttacgcaacagttcttcgttctgcatctcaaggacgtggtacattcatgatggtatttgaccactacgaagatgtacctaagtcagtacaagaagaaattattaagaaaaataaaggtgaagac

SEQ ID NO: 374 - protein, 693 aa, Streptococcus pneumoniae
  translation elongation factor G (fusA); Cellular location: cytoplasm; Similar to strain R6 sequence 15902294 (0.E+01)
MAREFSLEKTRNIGIMAHVDAGKTTTTERILYYTGKIHKIGETHEGASQMDWMEQEQERGITITSAATTAQWNNHRVNIIDTPGHVDFTIEVQRSLRVLDGAVTVLDSQSGVEPQTETVWRQATEYGVPRIVFANKMDKIGADFLYSVSTLHDRLQANAHPIQLPIGSEDDFRGIIDLIKMKAEIYTNDLGTDILEEDIPAEYLDQAQEYREKLIEAVAETDEELMMKYLEGEEITNEELKAGIRKATINVEFFPVLCGSAFKNKGVQLMLDAVIDYLPSPLDIPAIKGINPDTDAEEIRPASDEEPFAALAFKIMTDPFVGRLTFFRVYSGVLQSGSYVLNTSKGKRERIGRILQMHANSRQEIDTVYSGDIAAAVGLKDTTTGDSLTDEKAKIILESINVPEPVIQLMVEPKSKADQDKMGIALQKLAEEDPTFRVETNVETGETVISGMGELHLDVLVDRMRREFKVEANVGAPQVSYRETFRASTQARGFFKRQSGGKGQFGDVWIEFTPNEEGKGFEFENAIVGGVVPREFIPAVEKGLVESMANGVLAGYPMVDVKAKLYDGSYHDVDSSETAFKIAASLSLKEAAKSAQPAILEPMMLVTITVPEENLGDVMGHVTARRGRVDGMEAHGNSQIVRAYVPLAEMFGYATVLRSASQGRGTFMMVFDHYEDVPKSVQEEIIKKNKGED

SEQ ID NO: 375 - DNA, 4389 bp, Streptococcus pneumoniae
atgtcaaatagttttgaaattttgatgaatcaattggggatgcctgctgaaatgagacaggctcctgctttagcacaggccaatattgagcgagttgtggttcataaaattagtaaggtatgggagtttcatttcgtattttctaatattttaccgattgaaatctttttagaattaaagaaaggtttgagcgaagaattttctaagacaggcaataaagctgtttttgaaattaaggctcggtctcaagaattttcaaatcagctcttgcagtcctactatagggaggctttctctgaaggtccatgtgctagtcaaggttttaagtccctttatcaaaatttgcaagttcgtgctgagggtaatcagctatttattgaaggatctgaagcgattgataaggaacattttaagaagaatcatcttcctaatttagccaaacaacttgaaaagtttggttttccaacttttaactgtcaagtcgagaagaatgatgtcctgacccaagagcaggaagaggcctttcatgctgaaaatgagcagattgttcaagctgccaatgaggaagcgctccgtgctatggaacaactggagcagatggcacctcctccagcggaagagaaaccagcctttgattttcaagcgaaaaaagctgcagctaaacccaagctggataaggcggagattactcctatgatcgaagtgacgacagaggaaaatcgtctggtatttgaaggggttgtttttgatgtggagcaaaaagtgactagaacaggtcgtgttttaatcaactttaaaatgacggactatacttcaagtttttctatgcaaaagtgggttaaaaacgaggaagaggcccagaagtttgacctcatcaagaagaattcttggctccgagttcgagggaatgtggagatgaataacttcacacgcgatttgactatgaacgtacaggatctgcaggaagttgttcactatgagcggaaggatttgatgccagaaggtgagcgtcgggttgagtttcatgctcatactaacatgtcgactatggatgctttgccagaggtcgaagagattgttgcaacagctgctaagtggggacacaaggcggttgctatcacggaccatgggaatgtccagtcctttccacatggctataaggcggctaagaaagcgggaatccagctgatctatgggatggaagccaatatcgtggaggaccgtgtccctatcgtctataacgaagtggagatggacttgtcagaagcaacctacgtggtctttgacgtggaaacgacgggactttcagctatctataatgacttgattcaggttgcggcttctaagatgtacaaggggaatgttattgctgaatttgatgaatttatcaatcctgggcatcccttgtcagcctttactacagagttaactggaattacagatgatcatgtcaaaaatgccaaaccactagaacaagttttgcaagaattccaagaattttgcaaggatacggtcctagttgcccacaatgctacctttgacgttggctttatgaatgctaattatgagcggcatgatcttccaaagattagtcagccagttattgatacgctggagtttgctagaaacctctatcctgagtataaacgccatggtttggggcctttgaccaagcgttttggtgtggccttggaacatcaccacatggccaactacgatgcggaagcgactggtcgtctgcttttcatctttatcaaagaggtagcagaaaaacatggtgtgaccgatttagctagactcaacattgatctaatcagtccagattcttacaaaaaagctcggatcaagcatgcgaccatctatgtcaagaatcaggtaggtctaaaaaatatctttaagctggtttccttgtctaataccaagtattttgaaggagtgccacggattccgagaacggttctagatgcccatcgagagggcttgattttaggttcagcctgttcagagggtgaagtttttgacgtggtcgtttctcaaggtgtggatgcggcggttgaggtggccaagtattatgattttatcgaggtcatgccaccggctatctatgcacccttgattgccaaagagcaggtcaaggatatggaggaactccagaccattatcaagagtttgatagaggttggagaccgccttggcaagcctgttctggctacgggaaatgttcactatatcgaaccggaagaagagatttatcgtgaaattatcgtccgtagtttgggacagggtgcgatgattaatcgaactatcggtcatggtgaacatgcccaaccagcaccacttccaaaggctcattttcgaacgactaatgagatgttggatgaatttgcctttttgggagaggaactggctcgtaaactggttattgaaaacaccaatgccttggcagaaatatttgaatccgttgaagtcgttaagggtgacttgtatacgcctttcatcgacaaggctgaagaaacagttgctgagttgacctataagaaagcttttgagatttatggaaatccgctgccagatattgttgatttgcggattgaaaaagaattaacatccatactggggaatggatttgctgtgatttatctggcatcgcagatgctggtgcaacgttctaatgaacggggttatttggttggttctcgtgggtctgtcggatctagtttcgttgcgaccatgattgggattacggaggtcaatcctctctctcctcactatgtctgtggtcagtgtcagtacagtgagtttatcacagatggttcgtacggttcaggatttgatatgccccataaggactgtccaaactgtggtcacaaactcagtaaaaacggacaggatattccgtttgagaccttccttggttttgatggggataaggttcctgatattgacttgaacttctcgggagaagatcagcctagcgcccacttggatgtgcgtgatatctttggtgaagaatatgccttccgtgcgggaacggttggtacggtagctgccaagactgcctatggatttgtcaaaggttacgagcgagattatggcaagttttatcgtgatgcagaagtagaacgcctcgctcaaggagcggcgggtgtcaagcggacaacaggccaacacccggggggaatcgttgttattccgaactacatggatgtctacgattttacgcctgtccagtatccagcagatgatgtcacggctgaatggcagaccactcactttaacttccacgatatcgatgagaacgtcctcaaactcgatgtactgggacatgatgatccgactatgattcgaaaacttcaggatttgtctggtattgaccctaataaaattcctatggatgacgaaggcgtgatggcactcttttctgggactgatgtgctaggggtaacacctgaacaaattggaacgcctacgggtatgttggggattccagagtttggaacaaatttcgtacgtggaatggtagacgaaacccatccgacaacctttgcggaattgcttcagctgtctggtctgtcccacggtactgatgtttggttggggaatgctcaggatctgattaagcaaggaatagcggacctatcgactgttatcggttgtcgggacgacatcatggtttacctcatgcatgcgggtctggaacctaagatggcctttaccattatggaacgggtacgtaagggtttgtggctaaagatttcagaagaggagagaaatggctatatcgaagcaatgaaggctaataaggtgccagagtggtatatcgaatcctgtgggaaaattaagtacatgttccctaaggcccatgcggcagcctacgttatgatggccttgcgtgtagcttacttcaaggttcaccatcctatttattactactgtgcttacttctccattcgtgctaaggcttttgatatcaagaccatgggtgcgggcttggaggtcatcaagcgcagaatggaagaaatctctgaaaaacggaagaacaatgaagcctctaatgtggaaatcgatctctatacaactcttgagattgtcaatgagatgtgggaacgaggtttcaagtttggtaaattagatctctactgtagtcaggcgacagagttcctcatcgacggggatacccttatcccaccatttgtagcaatggatggtctgggagagaacgttgccaagcaactggtgcgggcgcgtgaagagggagaattcctctctaaaacagaactacgcaagcgtggtggactctcatcaaccttggttgaaaagatggatgagatgggtattcttggaaatatgccagaggataaccagttgagtttgtttgatgagttgttt

SEQ ID NO: 376 - protein, 1463 aa, Streptococcus pneumoniae
  DNA polymerase III, alpha subunit, Gram-positive type; Cellular location: membrane; Similar to strain R6 sequence 15902295 (0.E+01)
MSNSFEILMNQLGMPAEMRQAPALAQANIERVVVHKISKVWEFHFVFSNILPIEIFLELKKGLSEEFSKTGNKAVFEIKARSQEFSNQLLQSYYREAFSEGPCASQGFKSLYQNLQVRAEGNQLFIEGSEAIDKEHFKKNHLPNLAKQLEKFGFPTFNCQVEKNDVLTQEQEEAFHAENEQIVQAANEEALRAMEQLEQMAPPPAEEKPAFDFQAKKAAAKPKLDKAEITPMIEVTTEENRLVFEGVVFDVEQKVTRTGRVLINFKMTDYTSSFSMQKWVKNEEEAQKFDLIKKNSWLRVRGNVEMNNFTRDLTMNVQDLQEVVHYERKDLMPEGERRVEFHAHTNMSTMDALPEVEEIVATAAKWGHKAVAITDHGNVQSFPHGYKAAKKAGIQLIYGMEANIVEDRVPIVYNEVEMDLSEATYVVFDVETTGLSAIYNDLIQVAASKMYKGNVIAEFDEFINPGHPLSAFTTELTGITDDHVKNAKPLEQVLQEFQEFCKDTVLVAHNATFDVGFMNANYERHDLPKISQPVIDTLEFARNLYPEYKRHGLGPLTKRFGVALEHHHMANYDAEATGRLLFIFIKEVAEKHGVTDLARLNIDLISPDSYKKARIKHATIYVKNQVGLKNIFKLVSLSNTKYFEGVPRIPRTVLDAHREGLILGSACSEGEVFDVVVSQGVDAAVEVAKYYDFIEVMPPAIYAPLIAKEQVKDMEELQTIIKSLIEVGDRLGKPVLATGNVHYIEPEEEIYREIIVRSLGQGAMINRTIGHGEHAQPAPLPKAHFRTTNEMLDEFAFLGEELARKLVIENTNALAEIFESVEVVKGDLYTPFIDKAEETVAELTYKKAFEIYGNPLPDIVDLRIEKELTSILGNGFAVIYLASQMLVQRSNERGYLVGSRGSVGSSFVATMIGITEVNPLSPHYVCGQCQYSEFITDGSYGSGFDMPHKDCPNCGHKLSKNGQDIPFETFLGFDGDKVPDIDLNFSGEDQPSAHLDVRDIFGEEYAFRAGTVGTVAAKTAYGFVKGYERDYGKFYRDAEVERLAQGAAGVKRTTGQHPGGIVVIPNYMDVYDFTPVQYPADDVTAEWQTTHFNFHDIDENVLKLDVLGHDDPTMIRKLQDLSGIDPNKIPMDDEGVMALFSGTDVLGVTPEQIGTPTGMLGIPEFGTNFVRGMVDETHPTTFAELLQLSGLSHGTDVWLGNAQDLIKQGIADLSTVIGCRDDIMVYLMHAGLEPKMAFTIMERVRKGLWLKISEEERNGYIEAMKANKVPEWYIESCGKIKYMFPKAHAAAYVMMALRVAYFKVHHPIYYYCAYFSIRAKAFDIKTMGAGLEVIKRRMEEISEKRKNNEASNVEIDLYTTLEIVNEMWERGFKFGKLDLYCSQATEFLIDGDTLIPPFVAMDGLGENVAKQLVRAREEGEFLSKTELRKRGGLSSTLVEKMDEMGILGNMPEDNQLSLFDELF

SEQ ID NO: 377 - DNA, 261 bp, Streptococcus pneumoniae
atgtcaaagatgagtataagcatccgtctggatagtgaggttaaggagcaggcccaacaggtgtttagtaatctgggaatggatatgacaacagctattaatattttccttcgtcaggcaattcaatatcagggattaccttttgatgttagactagacgaaaatcggaagttgctccaagcgttaacggatttagaccaaaatcgtaatatgagccagtcttttgaatcagtctcagatttgatggaggacttacgtgct

SEQ ID NO: 378 - protein, 87 aa, Streptococcus pneumoniae
  conserved hypothetical protein; Cellular location: cytoplasm; Similar to strain R6 sequence 15902296 (4.E-43)
MSKMSISIRLDSEVKEQAQQVFSNLGMDMTTAINIFLRQAIQYQGLPFDVRLDENRKLLQALTDLDQNRNMSQSFESVSDLMEDLRA

SEQ ID NO: 379 - DNA, 276 bp, Streptococcus pneumoniae
gtgcttaagattcgttatcataaacagtttaaaaaagattttaagttggctatgaagcgtggtttgaaggcagaattattagaagaagttttgaattttctggttcaagaaaaagaacatcctgccagaaatcgtgatcattcattgacggcatccaagcattttcaaggagttcgtgaatgccatacccagccagattggcttttggtttataaagtagacaagtcggaattgattttaaatttgctgaggacaggcagtcacagtgatttattt

SEQ ID NO: 380 - protein, 92 aa, Streptococcus pneumoniae
  conserved hypothetical protein; Cellular location: cytoplasm; Similar to strain R6 sequence 15902297 (2.E-49)
MLKIRYHKQFKKDFKLAMKRGLKAELLEEVLNFLVQEKEHPARNRDHSLTASKHFQGVRECHTQPDWLLVYKVDKSELILNLLRTGSHSDLF

SEQ ID NO: 381 - DNA, 150 bp, Streptococcus pneumoniae
atgaaactaagaatatttgcggaagataagccggctaagaaggtatttgaatatcaattagaacttgctgatcgtacaattcttctatcgacagcactcttgtcaggtgctattgctttagcaggaatcttttctgctttgaaagaaaaa

SEQ ID NO: 382 - protein, 50 aa, Streptococcus pneumoniae
  hypothetical protein; Cellular location: membrane
MKLRIFAEDKPAKKVFEYQLELADRTILLSTALLSGAIALAGIFSALKEK

SEQ ID NO: 383 - DNA, 1239 bp, Streptococcus pneumoniae
atggttttaccaaattttaaagaaaatctagaaaaatatgcgaaattgttggttgcgaacggaattaacgtgcaacctggtcacactttggctctctctattgatgtggagcaacgtgaattggcacatctaatcgtgaaagaagcttatgccttgggtgcgcatgaggtcatcgttcagtggacagatgatgtgattaaccgtgagaaattcctccatgccccgatggagcgtttggacaatgtgccagaatacaagattgctgagatgaactatctcttggagaataaggctagccgtcttggagttcgttcatctgatccaggtgccttgaacggagtggacgctgacaagctttcagcttctgctaaagctatgggacttgccatgaagcctatgcgtatcgcaactcaatctaacaaggttagctggactgtagcagctgcagcaggacttgagtgggctaagaaagtcttcccaaatgctgcgagcgacgaagaagcagttgatttcctttgggaccaaattttcaaaacttgccgtgtctacgaagcagatcctgttaaggcttgggaggaacatgcagccattctcaagagcaaggccgatatgcttaataaggagcaattttcagcccttcactacacagcgccaggaacagatttaacacttggtttgccaaagaaccacgtttgggaatcagctggtgctgtcaatgcacagggcgaagaattcttgccaaatatgccaacagaagaggtcttcacagcgcctgacttccgtcgtgcagatggttatgtcacttctacaaaaccgcttagctacaacggaaatatcattgaaggcattaaggtgacctttaaggatggacaaatcgtagatatcactgctgagaagggtgatcaggttatgaaagaccttgtctttgaaaatgcgggtgcgcgtgccttgggtgaatgtgccttggtaccagatccaagtccaatttctcagtcaggcattaccttctttaacacccttttcgatgaaaatgcgtcaaaccacttggctatcggtgcagcctatgcgactagcgttgttgatggagcggagatgagcgaagaggagcttgaagctgcagggcttaaccgttcagatgttcacgtagactttatgattggttctaaccaaatggatatcgatggtattcgtgaggatggaacgcgggtacctcttttccgtaatgggaattgggcaaat

SEQ ID NO: 384 - protein, 413 aa, Streptococcus pneumoniae
  aminopeptidase PepS (pepS); Cellular location: cytoplasm; Similar to strain R6 sequence 15902298 (0.E+01)
MVLPNFKENLEKYAKLLVANGINVQPGHTLALSIDVEQRELAHLIVKEAYALGAHEVIVQWTDDVINREKFLHAPMERLDNVPEYKIAEMNYLLENKASRLGVRSSDPGALNGVDADKLSASAKAMGLAMKPMRIATQSNKVSWTVAAAAGLEWAKKVFPNAASDEEAVDFLWDQIFKTCRVYEADPVKAWEEHAAILKSKADMLNKEQFSALHYTAPGTDLTLGLPKNHVWESAGAVNAQGEEFLPNMPTEEVFTAPDFRRADGYVTSTKPLSYNGNIIEGIKVTFKDGQIVDITAEKGDQVMKDLVFENAGARALGECALVPDPSPISQSGITFFNTLFDENASNHLAIGAAYATSVVDGAEMSEEELEAAGLNRSDVHVDFMIGSNQMDIDGIREDGTRVPLFRNGNWAN

SEQ ID NO: 385 - DNA, 228 bp, Streptococcus pneumoniae
atgttaggaagtatgttcgttggtctcctagtgggatttttagcaggtgctatgaccaatcgtggagagcgaatgggatgttttggaaaaatgtttctcggttggatcggagcctttctaggtcacttgctctttggaacttgggggccagttttatcaggaacagctattatcccagcgattttaggagccatgattgttttagctattttttggagacgaggaagt

SEQ ID NO: 386 - protein, 76 aa, Streptococcus pneumoniae
  conserved hypothetical protein; Cellular location: membrane; Similar to strain R6 sequence 15902299 (4.E-41)
MLGSMFVGLLVGFLAGAMTNRGERMGCFGKMFLGWIGAFLGHLLFGTWGPVLSGTAIIPAILGAMIVLAIFWRRGS

SEQ ID NO: 387 - DNA, 150 bp, Streptococcus pneumoniae
atgttactgacttcgtcagttctatctgcaacctcaaaacagtgttttgagctgacttcgtcagttctatctgcaacctcaaagcagtgctttgagcatcctgcggctagtttcctagtttgctctttgattttcattgagtatcagatt

SEQ ID NO: 388 - protein, 50 aa, Streptococcus pneumoniae
  box element
MLLTSSVLSATSKQCFELTSSVLSATSKQCFEHPAASFLVCSLIFIEYQI

SEQ ID NO: 389 - DNA, 720 bp, Streptococcus pneumoniae
atgagattagataaatttttagttgcctgtgcggtgggaagtcggactgaggtcaaaaacttgctcaaggctgggcgcgtgactgtaaatggtaaaaaagaaaaatcagctaaattgcagattgatgaaaaaatagatgagattcgctttgatgggcaagtgttggagtatgaagagtttgtctactacatgatgaacaagcccaaaggagttatctcagcgactgaggatcccaagcacagaaccgttctggacttgttggatgacttggcgcggagtaaggaagttttcccagtaggacgcttggatattgacacgcatggtcttttgctcttgaccaatgatggtcagctggctcatgttcttctttcgcccaagcgtcatgtggacaagacttatctggcacaagtcaagggaatcatgacccaagaagatgtggagacatttgctgagggtattcctctcaaagactttacctgtcaacccgctatactggagcttgtatccatagatacagaaaagaatcaaagccaaatccgtgtgaccattgcagaagggaagtttcatcagatcaagcgtatggtgggctactgtggcaaggaagtggtggacttgcaacgattgactatgggaactttagtattagatgagaacctagaacgaggggaatggcgtcgcttgaccaaggaagaattagaaattctccgcgctaatattatt

SEQ ID NO: 390 - protein, 240 aa, Streptococcus pneumoniae
  ribosomal small subunit pseudouridine synthase A (rsuA); Cellular location: cytoplasm; Similar to strain R6 sequence 15902300 (e-131)
MRLDKFLVACAVGSRTEVKNLLKAGRVTVNGKKEKSAKLQIDEKIDEIRFDGQVLEYEEFVYYMMNKPKGVISATEDPKHRTVLDLLDDLARSKEVFPVGRLDIDTHGLLLLTNDGQLAHVLLSPKRHVDKTYLAQVKGIMTQEDVETFAEGIPLKDFTCQPAILELVSIDTEKNQSQIRVTIAEGKFHQIKRMVGYCGKEVVDLQRLTMGTLVLDENLERGEWRRLTKEELEILRANII

SEQ ID NO: 391 - DNA, 801 bp, Streptococcus pneumoniae
ttgcttcgtcaagatgctcaaatcttgcgtgacttgcttgtttctggtgcagatcaagcgactgttcaagctaagaaagaagacctcttgcaagaaatctttaactttcttgctatgtcattaggacttccaccacgcaagtttgactttgcttatcgcgataaagataacaactacaaaagtgaaaaaggaatcacaccacaagagttttacaagaaatatgtcaatcttcctttagaagactacgtttctgttatcaatgctccaactgctgataaaccttacggaaaatcttacacagttgagatgttggggaatgtggttggtagccgtgcagttcgctacatcaacgttccaatggagcgcttgaaagaattggcgattgcccaaatgcaagcaggtgagactgtttggtttggttctgatgtcggccagctcagcaaccgtaaggctggcatccttgcgacagatgtttatgactttgaatcaagcatggacattaaacttactcaagacaaggctggacgtttggactatagtgaaagcttgatgacccacgccatggtcttgacaggtgttgacttggacgaaaatggtaaatcaaccaagtggaaggttgaaaactcatggggagacaaggtcggtacagatggttactttgttgcctcagacgcttggatggacgaatacacataccaaatcgttgttcgtaaggaattgctgacagcagaagaacaagctgcctatggagcagaaccaatcgtacttgcaccatgggatccaatgggagccttggctgaa

SEQ ID NO: 392 - protein, 267 aa, Streptococcus pneumoniae
  aminopeptidase C, FRAMESHIFT (pepC); Cellular location: cytoplasm; Similar to strain R6 sequence 15902302 (0.E+01)
MLRQDAQILRDLLVSGADQATVQAKKEDLLQEIFNFLAMSLGLPPRKFDFAYRDKDNNYKSEKGITPQEFYKKYVNLPLEDYVSVINAPTADKPYGKSYTVEMLGNVVGSRAVRYINVPMERLKELAIAQMQAGETVWFGSDVGQLSNRKAGILATDVYDFESSMDIKLTQDKAGRLDYSESLMTHAMVLTGVDLDENGKSTKWKVENSWGDKVGTDGYFVASDAWMDEYTYQIVVRKELLTAEEQAAYGAEPIVLAPWDPMGALAE

SEQ ID NO: 393 - DNA, 909 bp, Streptococcus pneumoniae
atgactgaaaaacttcaattaactaaatcagatcgtaaaaaagtttggtggcgttcaaccttcttacaagggtcttggaactttgaacggatgcaaaacttgggctgggcttatacactcattccagctatcaaaaaactctatactaaaaaagaagatcaaatcgctgctcttgagcgtcaccttgagttcttcaacactcatccatacgtagctgctccagtcatgggggttactcttgcgcttgaagaagaacgtgctaacggtgtggaaatcgatgacgctgctatccaaggggttaaaatcggtatgatgggacctcttgctggtatcggtgacccagtattctggtttacagtacgcccaatccttggatctctcggtgcttcacttgcccttactggcaatatcttggggccactcctcttctttgttgcatggaacttgattcgtatgtcattcttgtggtatgttcaagagattggatacaaggctggatcagaaatcactaaagatatgtctggtggtatccttcaagatatcactaaaggagcttctatccttgggatgttcattcttgctgtccttgttcaacgctgggtaaatattaaatttgctttcgatgtttctaaagttcaactagatgaaaaggcttatatccattgggataaattgccagaagggtctaaaggtatccaagaagcattcgcacaagtaggacaaggattgtctcaaactcctgaaaaagttactactttccaacaaaacttggatatgttgattcctggattatcaggactactccttactttactttgcatgtacttacttaagaaaaaagtatctccaatcactattatccttgccctcttcgcagtgggtattgtggcacatgttcttcacatcatg

SEQ ID NO: 394 - protein, 303 aa, Streptococcus pneumoniae
  PTS system, mannose-specific IID component; Cellular location: membrane; Similar to strain R6 sequence 15902303 (e-175)
MTEKLQLTKSDRKKVWWRSTFLQGSWNFERMQNLGWAYTLIPAIKKLYTKKEDQIAALERHLEFFNTHPYVAAPVMGVTLALEEERANGVEIDDAAIQGVKIGMMGPLAGIGDPVFWFTVRPILGSLGASLALTGNILGPLLFFVAWNLIRMSFLWYVQEIGYKAGSEITKDMSGGILQDITKGASILGMFILAVLVQRWVNIKFAFDVSKVQLDEKAYIHWDKLPEGSKGIQEAFAQVGQGLSQTPEKVTTFQQNLDMLIPGLSGLLLTLLCMYLLKKKVSPITIILALFAVGIVAHVLHIM

SEQ ID NO: 395 - DNA, 801 bp, Streptococcus pneumoniae
atgtctattatttctatggttttagtagtcgttgtagccttctttgcaggtcttgaaggcatcctcgaccagttccaatttcaccaaccacttgtagcctgtacccttattgggcttgtaacaggtcacttggaagcagggattatcctcggtggatcgcttcaaatgattgcccttggttggtcaaatatcggtgctgctatcgctcctgatgctgcacttgcttctgtcgctgctgccattatcatggttcttggtggtgactttaccaagactggtatcggtgttgcccaagcggttgctatccctcttgctgtagctggacttttcttgacaatgattgttcgtacaatttcagttggtttggttcatactgcagatgctgccgctaaaaaaggtgacttcggcgctgtggagcgtgcgcatttcatcgcgctacttttccaaggacttcgtatcgcgcttcctgcagctcttctccttatggtaccaactgaaactgtacaaagtatccttagtgccatgccagactggctcaaagatggtatggctatcggtggtggtatggtcgttgccgttggttacgccatggttatcaacatgatggcaactcgtgaagtatggccattcttcgctcttggtttcgttctcgctgctgtgtcagatattactctaatcggattcggtgctatcggcgttgctatcgctcttatctaccttcacctttctaaaactggtggaaatggtggcggaggagccgcaacttctaacgacccaatcggcgatatcctagaagactac

SEQ ID NO: 396 - protein, 267 aa, Streptococcus pneumoniae
  PTS system, mannose-specific IIC component (manM); Cellular location: membrane; Similar to strain R6 sequence 15902304 (e-147)
MSIISMVLVVVVAFFAGLEGILDQFQFHQPLVACTLIGLVTGHLEAGIILGGSLQMIALGWSNIGAAIAPDAALASVAAAIIMVLGGDFTKTGIGVAQAVAIPLAVAGLFLTMIVRTISVGLVHTADAAAKKGDFGAVERAHFIALLFQGLRIALPAALLLMVPTETVQSILSAMPDWLKDGMAIGGGMVVAVGYAMVINMMATREVWPFFALGFVLAAVSDITLIGFGAIGVAIALIYLHLSKTGGNGGGGAATSNDPIGDILEDY

SEQ ID NO: 397 - DNA, 996 bp, Streptococcus pneumoniae
atgacaataatgagtatcggaatcattattgcgagccacggcgaatttgctgcgggtattcatcagtcaggatctatgatctttggtgaacaagaaaaggttcaagttgtgacctttatgccaaatgaaggtcctgatgatctatacgctaagtttaataacgctgttgctgcatttgacgcagaagatgaggttctagttttggctgacctttggagtggttctccatttaaccaagctagtcgcgtgatgggagaaaatcctgagcgtaagtttgccatcatcacaggacttaacttaccgatgttgattcaagcctacacagagcgcctcatggacgctgctgcaggtgtagaaaaagtcgctgctaatatcattaaagaagccaaagatggcatcaaagctcttccagaagagctaaatccagtcgaagaagttgcaagcgctgcagctgctccagttgcccaaactgctatcccagaaggaactgttatcggagacggtaaattgaaaatcaatcttgcccgtcttgacacacgtctacttcacggtcaggttgcaactgcttggactccagattcaaaagcaaatcgtatcatcgttgcttcagataacgtggctaaagacgaccttcgtaaagaattgattaaacaagcagctccaggtaatgtcaaggctaacgtggttccaattcaaaaactgattgagatttcaaaagacccacgttttggagaaacacatgcccttatcttgtttgaaacacctcaagatgcccttcgtgccatcgaaggcggcgtgccaatcaagactcttaatgttggttctatggctcactcaacaggtaaaacattggtcaataccgttttgtctatggacaaagaagacgttgctacatttgaaaaaatgcgtgacttgggtgttgaatttgatgtccgtaaagtaccaaatgattctaaaaaagatttgtttgacttgattaacaaagccaatgtcaaa

SEQ ID NO: 398 - protein, 332 aa, Streptococcus pneumoniae
  PTS system, mannose-specific IIAB components (manL); Cellular location: outside; Similar to strain R6 sequence 15902305 (0.E+01)
MTIMSIGIIIASHGEFAAGIHQSGSMIFGEQEKVQVVTFMPNEGPDDLYAKFNNAVAAFDAEDEVLVLADLWSGSPFNQASRVMGENPERKFAIITGLNLPMLIQAYTERLMDAAAGVEKVAANIIKEAKDGIKALPEELNPVEEVASAAAAPVAQTAIPEGTVIGDGKLKINLARLDTRLLHGQVATAWTPDSKANRIIVASDNVAKDDLRKELIKQAAPGNVKANVVPIQKLIEISKDPRFGETHALILFETPQDALRAIEGGVPIKTLNVGSMAHSTGKTLVNTVLSMDKEDVATFEKMRDLGVEFDVRKVPNDSKKDLFDLINKANVK

SEQ ID NO: 399 - DNA, 1017 bp, Streptococcus pneumoniae
atgaaagctgttgttgtaaatccagaaagcactggtgttgctattgaagaaaaagtactccgtccacttgaaactggggaagcacttgtagaagttgaatactgtggcgtttgccacaccgacctccacgttgctcatggtgactttggtcaagtcccaggacgtgttcttgggcacgaaggtatcggtatcgttaaagagattgctccagatgtgaaaagccttaaagtcggtgaccgcgtcagcgttgcttggttctttgaaggatgtggcacttgcgaatactgtacaactggtcgcgaaaccctttgccgtacagtgaaaaatgctggctactcagtagacggtggtatggctgaacaatgtatcgtaactgctgactatgctgtcaaagttcctgacggacttgatccagcccaagcttcttctatcacatgtgctggagtaacaacctataaagctatcaaagaagcaaaagttgaaccaggccaatgggttgttctttacggtgctggtggacttggtaacctcgctgttcaatacgctaaaaaagtattcaatgctcatgttatcgcagtcgatatcaacaatgacaaacttgcccttgcaaaagaagtaggcgctgacattgtgattaacggcctcgaagttgaagatgtagctggactcattaaagaaaaaactgatggaggagctcattcagctgtcgtaactgctgtgtctaaagttgccttcaaccaggctgttgactccattcgtgctggtggtcgcgtcgtcgctgttggtcttccttctgaaatgatggaactcagcatcgttaaaacagtcctcgatggaatccaagtcatcggttctcttgtcggaactcgtaaagacttagaagaagccttccaatttggtgcagaaggtctggtagtcccagttgttcaaaaacgtccagtagaagatgctgttgccattttcgacgaaatggaaaaaggccaaatccaaggacgtatggtactcgacttcacccac

SEQ ID NO: 400 - protein, 339 aa, Streptococcus pneumoniae
  alcohol dehydrogenase, zinc-containing; Cellular location: cytoplasm; Similar to strain R6 sequence 15902306 (0.E+01)
MKAVVVNPESTGVAIEEKVLRPLETGEALVEVEYCGVCHTDLHVAHGDFGQVPGRVLGHEGIGIVKEIAPDVKSLKVGDRVSVAWFFEGCGTCEYCTTGRETLCRTVKNAGYSVDGGMAEQCIVTADYAVKVPDGLDPAQASSITCAGVTTYKAIKEAKVEPGQWVVLYGAGGLGNLAVQYAKKVFNAHVIAVDINNDKLALAKEVGADIVINGLEVEDVAGLIKEKTDGGAHSAVVTAVSKVAFNQAVDSIRAGGRVVAVGLPSEMMELSIVKTVLDGIQVIGSLVGTRKDLEEAFQFGAEGLVVPVVQKRPVEDAVAIFDEMEKGQIQGRMVLDFTH

SEQ ID NO: 401 - DNA, 144 bp, Streptococcus pneumoniae
atgaagctgacgtggtttgaagagattttcgaagagtatgaccagcttgcaagctggtctttgtgctcttttcacagtctcatcaaccagttaatcgattgttctactttttgtctccaaaaccttggaaaaggctttcttttg

SEQ ID NO: 402 - protein, 48 aa, Streptococcus pneumoniae
  box element
MKLTWFEEIFEEYDQLASWSLCSFHSLINQLIDCSTFCLQNLGKGFLL

SEQ ID NO: 403 - DNA, 810 bp, Streptococcus pneumoniae
atgacgaaaaaaattattgcagttgacctggatggaaccctgctcaactcagacagtcaaatttctgactttaccaaaagaaccatcaaaaaagttgctgaaaaaggccatcaggttattattacgacaggtcgcccttaccgtatgtcaaaagatttttaccgtgaactgggcttagacactcctatgattaacttcaacggatcccttactcatttaccagaccaagtttgggattttgaaaagtgtttgactgtagacaaaaaatatctgctagatatggttcaacgttcagaggacattcaagccgattttatcgctggagaatatcgtaaaaaattctacattacaaatcccaatgaagaaattgccaatcccaaactatttggtgtagaagctttccagcctgaagatcaattccagcctgaattggtgaccaaggaccctaactgtatcctcttgcagactagagccagtgacaaatattccttggcaaaagaaatgaacgccttctaccagcatcaactttctatcaatacctggggaggtccgctcaatatccttgaatgtaccccaaaaggtgtcaacaaggcctttgctttggactacttgctcaagataatgaatcgtgacaaaaaagatttgattgcctttggagatgaacacaatgataccgaaatgctcgcttttgctgggaagggttatgccatgaaaaatgccaatccagagctactcccttatgcagatgagcaaatttcccttaccaacgaccaagatggggttgccaaaaccctacaagacttattctta

SEQ ID NO: 404 - protein, 270 aa, Streptococcus pneumoniae
  Cof family protein; Cellular location: cytoplasm; Similar to strain R6 sequence 15902307 (e-156)
MTKKIIAVDLDGTLLNSDSQISDFTKRTIKKVAEKGHQVIITTGRPYRMSKDFYRELGLDTPMINFNGSLTHLPDQVWDFEKCLTVDKKYLLDMVQRSEDIQADFIAGEYRKKFYITNPNEEIANPKLFGVEAFQPEDQFQPELVTKDPNCILLQTRASDKYSLAKEMNAFYQHQLSINTWGGPLNILECTPKGVNKAFALDYLLKIMNRDKKDLIAFGDEHNDTEMLAFAGKGYAMKNANPELLPYADEQISLTNDQDGVAKTLQDLFL

SEQ ID NO: 405 - DNA, 1470 bp, Streptococcus pneumoniae
atgataaatgatataattctattattgttcgtaaaaattaaaaggagattgatgatggacaaattatttaaactaaaagagaacggtacagacgttcgtacagaggttctcgctggtttaacaactttctttgcaatgagctatattctctttgtaaacccacaaatactttcacaaacaggaatgcctgctcagggcgtcttcctagcgacgattattggtgcagtagcgggtaccttgatgatggctttttatgctaacttaccttatgcccaagcgccaggtatgggactcaatgccttctttacctttacagttgtattcgggcttggttattcttggcaagaagccctagctatggtcttcatctgtgggattatttcattgattattaccttgacaaatgttcgtaaaatgatcattgaatcgattcccaatgctcttcgctcagctatttcagctggtatcggtgtcttccttgcctatgtagggattaagaatgctggacttttgaaattcacgattgatccaggcaactatactgttgtaggagaaggggctgacaaagctcaagcaacgattgcagcaaactcttcagcagttccaggattggtcagctttaataatccagctgttttagtggctcttgcaggacttgccattactatcttctttgtcatcaaagggattaaagggggaattattctctctatcttgacaacaactgttcttgctattgcagttggtttggttgatttgtctagtatcgattttgctaataaccatgttggtgcagcttttgaagatttgaagacaatctttggtgcagctcttggttcagaaggattgggagctttggtttcagatacagctcgcttgcctgaaactctgatggccattcttgccttctcattgacagatatttttgacacaattggtaccttgatcggtacaggtgaaaaagttggtatcgtagcgacaaatggtgaaaatcaccaatcagccaaattggataaggctctttactctgatttgattggaacgacagtcggtgccattgcaggtacttcaaacgtaacgacttatgttgagtctgctgctggtatcggtgcaggtggacgtactggtttgacagccttggttgtagctatctgttttgcgatttcaagcttctttagcccacttctagcgatcgtaccaacagcggctacagctccaatcttgattatcgttgggattatgatgcttggtagcttgaaaaatatccattgggatgatatgtctgaagcagttcctgccttcttcacatctatctttatgggattcagctactctatcactcaagggattgcagttggtttcttgacttacactttgactaagcttgttaaaggtcaagttaaagatgttcatgtcatgatttggattttggatgccttgtttatccttaactacatcagcatggcctta

SEQ ID NO: 406 - protein, 490 aa, Streptococcus pneumoniae
  xanthine/uracil permease family protein; Cellular location: membrane; Similar to strain R6 sequence 15902308 (0.E+01)
MINDIILLLFVKIKRRLMMDKLFKLKENGTDVRTEVLAGLTTFFAMSYILFVNPQILSQTGMPAQGVFLATIIGAVAGTLMMAFYANLPYAQAPGMGLNAFFTFTVVFGLGYSWQEALAMVFICGIISLIITLTNVRKMIIESIPNALRSAISAGIGVFLAYVGIKNAGLLKFTIDPGNYTVVGEGADKAQATIAANSSAVPGLVSFNNPAVLVALAGLAITIFFVIKGIKGGIILSILTTTVLAIAVGLVDLSSIDFANNHVGAAFEDLKTIFGAALGSEGLGALVSDTARLPETLMAILAFSLTDIFDTIGTLIGTGEKVGIVATNGENHQSAKLDKALYSDLIGTTVGAIAGTSNVTTYVESAAGIGAGGRTGLTALVVAICFAISSFFSPLLAIVPTAATAPILIIVGIMMLGSLKNIHWDDMSEAVPAFFTSIFMGFSYSITQGIAVGFLTYTLTKLVKGQVKDVHVMIWILDALFILNYISMAL

SEQ ID NO: 407 - DNA, 690 bp, Streptococcus pneumoniae
atgtggaaagaattgttgaatcgtgcaggctggattttggtctttttacttgccgtccttttatatcaggttcccctagtggttacctctattttgactttaaaagaagtagccctgctacagtcagggctgatagttgctggcctttcaattgtggttctggctctatttattatgggagctcgtaaaaccaagttagctagttttaatttttctttttttagagctaaagatttggcacgtttgggcttgagttatctagttattgtcgggtcaaatatacttggttccattttattgcaactgtcaaatgagacgacaacagctaaccagtctcagattaatgatatggttcaaaatagttcgttgatttccagtttcttcttgctagccttgcttgctccgatttgtgaggaaatcttgtgtcgtgggattgttcctaaaaagattttccgaggcaaggagaacttgggatttgtagtcggtacgattgtgtttgctttattgcatcaaccaagtaatttaccttctttattgatttatggaggtatgtcgacagttctatcttggacagcctacaagacccaacgtttggaaatgtcgatcttgcttcacatgattgttaatgggattgctttctgtttgttggctcttgtggtgattatgagtcggacattaggaatttctgtt

SEQ ID NO: 408 - protein, 230 aa, Streptococcus pneumoniae
  conserved hypothetical protein; Cellular location: membrane; Similar to strain R6 sequence 15902309 (e-124)
MWKELLNRAGWILVFLLAVLLYQVPLVVTSILTLKEVALLQSGLIVAGLSIVVLALFIMGARKTKLASFNFSFFRAKDLARLGLSYLVIVGSNILGSILLQLSNETTTANQSQINDMVQNSSLISSFFLLALLAPICEEILCRGIVPKKIFRGKENLGFVVGTIVFALLHQPSNLPSLLIYGGMSTVLSWTAYKTQRLEMSILLHMIVNGIAFCLLALVVIMSRTLGISV

SEQ ID NO: 409 - DNA, 972 bp, Streptococcus pneumoniae
atgatgaaaatccttgagggagtgaccgatatgtcaagtaaagccaatcatgcaaagacagttatttgcggaattatcaatgtaaccccagactccttttcggacggtggtcaattttttgctcttgagcaggcgctccagcaggctcgtaaattgatagcagaaggagccagtatgctagatatcggcggagaatcgactcggccgggaagtagctatgttgagatagaagaggaaatccagcgtgttgttccagtgatcaaagcgattcgcaaggaaagtgatgtcctcatctctattgatacttggaagagtcaagtagcagaggctgctttggctgctggtgccgatctagtcaatgatatcactggtcttatgggtgatgagaaaatggcttatgtggtagctgaagcgagagcgaaagtggtcatcatgtttaacccagttatggctcgacctcagcatcctagttcgcttatcttccctcattttggttttggtcaaacctttacagaaaaagagttagctgactttgaaacattgccaatcgaagacttgatggtggctttctttgaacgagcactagcgagagcggcagaagctggtattgcaccagaaaatatcctgttggatccaggaattggctttggtctgaccaagaaagaaaatctgcttcttttacgggacctggataaactacatcagaagggctatccaatctttctcggagtgtcgcgcaagcgatttgtcatcaatatcctagaggagaatggttttgaagtcaatcctgagacagagcttggtttccgaaatcgggacacggcttcggctcatgtaactagtatcgctgcgagacagggtgtagaagtggtgcgcgtgcatgacgtagctagtcacaggatggcagttgaaattgcctctgccattcgtctggctgatgaagcggaaaatttagatttaaaacaatataaa

SEQ ID NO: 410 - protein, 324 aa, Streptococcus pneumoniae
  dihydropteroate synthase; Similar to strain R6 sequence 15902310 (e-171)
MMKILEGVTDMSSKANHAKTVICGIINVTPDSFSDGGQFFALEQALQQARKLIAEGASMLDIGGESTRPGSSYVEIEEEIQRVVPVIKAIRKESDVLISIDTWKSQVAEAALAAGADLVNDITGLMGDEKMAYVVAEARAKVVIMFNPVMARPQHPSSLIFPHFGFGQTFTEKELADFETLPIEDLMVAFFERALARAAEAGIAPENILLDPGIGFGLTKKENLLLLRDLDKLHQKGYPIFLGVSRKRFVINILEENGFEVNPETELGFRNRDTASAHVTSIAARQGVEVVRVHDVASHRMAVEIASAIRLADEAENLDLKQYK

SEQ ID NO: 411 - DNA, 1320 bp, Streptococcus pneumoniae
atgaaagaaattgaaaacaatcagtggattgctaactaccggacggatcaaccgcattttggcttggaacgaatggtggaactgttagctttgcgtggcaatccccatctcaaactcaaggtcctccatatcggagggactaacggcaagggctcgactattgcttttttgaaaaagatgctagaaaagctagggttgagagttggcgtgtttagctcgccctatctcattcattacacagaccagattagcatcaatggggaatcgatctcagaagcgaggctagaagctctcatggcagactatcagtctttgctggagggagaagcggtcgccaatttacagggcacaaccgagtttgagattatcacagccctggcctatgactactttgcctcagagcaagtagatgtggccatcatggaagttggcatgggtggacttttggatagtaccaatgtctgtcagcccattttgacaggaattacaactattggcttggatcatgtggctctacttggtgacaccttggaggtcatagcagagcagaaggcaggtattatcaaacaagggatgcccttggtaacagggcgtattgctccagaagccttggctgtgattgaccgcattgcggaagggaaagatgcgccgagacttgcctacgggacagattatcaggttcgtcatcaagaaagtgtggtgacaggggaagtctttgactatacaagtgctgtcagacaaggtcgcttccagactagcctgcttggtttgtaccaaatagagaatgctgggatggccatagctttacttgatactttttgtcaagaagatggtcgagagctagcaagcaatgattttcttggtcaagccttggaagaaacaagttggccagggcgtttggaaatcgtgtcaagagatcccttgatgattttggatggagcccacaatccccatgctatcaaggccttgttggtaaccttgcaagaacgttttgcggattatcataaggaaatcctcttcacttgtatcaaaaccaaggccttggaggatatgttggacttgctgggagccatgccagttaccgagcttactctaacacattttgcggatagtcgggcgacggatgaaaacgtgctgaaagaggcagctaagtctagaaatctcagctaccaagattggcatgattttctagagcagaatttgacagataaaaaagaagagaaacaaacagttaggattgtcacaggttccttgtatttcttgagccaagtgagggcctatctgatggagaggaagaacgagaatggatacacaaaagat

SEQ ID NO: 412 - protein, 440 aa, Streptococcus pneumoniae
  dihydrofolate synthetase (folC); Cellular location: cytoplasm; Similar to strain R6 sequence 15902311 (0.E+01)
MKEIENNQWIANYRTDQPHFGLERMVELLALRGNPHLKLKVLHIGGTNGKGSTIAFLKKMLEKLGLRVGVFSSPYLIHYTDQISINGESISEARLEALMADYQSLLEGEAVANLQGTTEFEIITALAYDYFASEQVDVAIMEVGMGGLLDSTNVCQPILTGITTIGLDHVALLGDTLEVIAEQKAGIIKQGMPLVTGRIAPEALAVIDRIAEGKDAPRLAYGTDYQVRHQESVVTGEVFDYTSAVRQGRFQTSLLGLYQIENAGMAIALLDTFCQEDGRELASNDFLGQALEETSWPGRLEIVSRDPLMILDGAHNPHAIKALLVTLQERFADYHKEILFTCIKTKALEDMLDLLGAMPVTELTLTHFADSRATDENVLKEAAKSRNLSYQDWHDFLEQNLTDKKEEKQTVRIVTGSLYFLSQVRAYLMERKNENGYTKD

SEQ ID NO: 413 - DNA, 552 bp, Streptococcus pneumoniae
atggatacacaaaagattgaagcggctgtaaaaatgattatcgaggctgtaggagaggacgctaatcgcgagggcttgcaggaaacacctgctcgtgtagcccgtatgtatcaagagattttttcaggtcttggtcaaacagcagaggaacatttgtcaaaatcctttgaaattattgacgataatatggtggtagaaaaggatatctttttccataccatgtgtgaacaccacttcttgccattttatggtagagcgcacattgcctacattccagatggtcgtgtggcaggcttgtctaagctagcccgtacggttgaagtttattcgaaaaaaccacaaattcaagaacgtttgaatatcgaagtggccgatgccttgatggactatctaggtgctaaaggagcctttgttgtcattgaggcggaacatatgtgtatgagtatgcgtggtgttagaaaaccaggcactgcaaccttgacgacagtagctcgtggtctatttgaaacagataaggatctccgtgaccaagcttatcgtttaatggggcta

SEQ ID NO: 414 - protein, 184 aa, Streptococcus pneumoniae
  GTP cyclohydrolase I (folE); Cellular location: cytoplasm; Similar to strain R6 sequence 15902312 (e-103)
MDTQKIEAAVKMIIEAVGEDANREGLQETPARVARMYQEIFSGLGQTAEEHLSKSFEIIDDNMVVEKDIFFHTMCEHHFLPFYGRAHIAYIPDGRVAGLSKLARTVEVYSKKPQIQERLNIEVADALMDYLGAKGAFVVIEAEHMCMSMRGVRKPGTATLTTVARGLFETDKDLRDQAYRLMGL

SEQ ID NO: 415 - DNA, 810 bp, Streptococcus pneumoniae
atggatcaactgcagattaaggatttggaaatgtttgcctatcatggtctttttcctagtgagaaagaattggggcagaaatttgtcgtttcagccatcctatcctatgatatgaccaaggcagctacagacttggatttaacagcctctgtccattacggagaattgtgtcagcagtggacgacttggtttcaggaaacgagtgaagatttgattgaaacggtagcctataaactggtggaacgtacctttgagttttatcctcttgtccaagaaatgaagttggaactgaaaaaaccttgggcaccggtgcatttgtcactagatacttgctcggtaaccattcatcgccgcaagcaacgagcctttatcgccctaggaagcaatatgggagataaacaagcaaacttgaagcaagccattgacaaactgcgagctcgtggcatccatattctcaaagagtccagtgtcttagcgacggagccttggggtggagtggagcaggatagctttgccaatcaagtggttgaggtggaaacctggctaccagcacaagacttgttagaaaccttgttagccattgagtcagagctgggacgggtgagagaagtgcattggggacctcgtttgattgatttggacttgctctttgtggaggaccagatcctttatacagacgacctcatattgcctcatccttacatagcggaacgcctttttgtccttgagtccttacaggaaattgcgcctcattttatccatccgatattaaaacaaccgatccgcaacttgtatgatgctttgaaaaaa

SEQ ID NO: 416 - protein, 270 aa, Streptococcus pneumoniae
  bifunctional folate synthesis protein (sulD); Cellular location: cytoplasm; Similar to strain R6 sequence 15902313 (e-155)
MDQLQIKDLEMFAYHGLFPSEKELGQKFVVSAILSYDMTKAATDLDLTASVHYGELCQQWTTWFQETSEDLIETVAYKLVERTFEFYPLVQEMKLELKKPWAPVHLSLDTCSVTIHRRKQRAFIALGSNMGDKQANLKQAIDKLRARGIHILKESSVLATEPWGGVEQDSFANQVVEVETWLPAQDLLETLLAIESELGRVREVHWGPRLIDLDLLFVEDQILYTDDLILPHPYIAERLFVLESLQEIAPHFIHPILKQPIRNLYDALKK

SEQ ID NO: 417 - DNA, 369 bp, Streptococcus pneumoniae
ttgatttttaatcctatttgctgtatgataagggaaaagaaaggggacagagatatggcttttaccaatacccacatgcgatctgctagttttggtattgttaccagcttgcctgatgacatcattgactctttttggtatatcatcgaccatttcttaaaaaatgtctttgaattggaagaagaactcgagtttcaattgcttaataaccaaggaaagattaccttccacttttcaagtcaacacctccctacagccattgattttgactttaaccatcctttcgaccctcgttatcccccaagagtactggttttagacatggacggtagagaaactatcctcctcccagaagaaaatgacctattt

SEQ ID NO: 418 - protein, 123 aa, Streptococcus pneumoniae
  hypothetical protein; Cellular location: cytoplasm; Similar to strain R6 sequence 15902314 (6.E-71)
MIFNPICCMIREKKGDRDMAFTNTHMRSASFGIVTSLPDDIIDSFWYIIDHFLKNVFELEEELEFQLLNNQGKITFHFSSQHLPTAIDFDFNHPFDPRYPPRVLVLDMDGRETILLPEENDLF

SEQ ID NO: 419 - DNA, 444 bp, Streptococcus pneumoniae
atgaacaaaacaacatttatggctaaaccaggccaagttgaacgtaaatggtacgtagttgacgcaactgatgtaccacttggacgtctttctgcagtagttgctagcgtacttcgcggaaaaaacaaaccaacatttacaccacacactgatacaggtgacttcgtgattgttatcaatgctgaaaaagttaaattgactggtaaaaaagcaactgataaaatctactacactcactcaaaccacccaggtggattgaaacaaatctctgcaggtgaacttcgttctaaaaatgcagtacgtttgattgagaaatcagttaaaggtatgcttccacacaatacacttggacgcgctcaaggtatgaagttgaaagtatttgttggagctgagcacactcacgctgcacaacaaccagaagttcttgacatttcaggacttatc

SEQ ID NO: 420 - protein, 148 aa, Streptococcus pneumoniae
  ribosomal protein L13 (rplM); Cellular location: cytoplasm; Similar to strain R6 sequence 15902315 (2.E-82)
MNKTTFMAKPGQVERKWYVVDATDVPLGRLSAVVASVLRGKNKPTFTPHTDTGDFVIVINAEKVKLTGKKATDKIYYTHSNHPGGLKQISAGELRSKNAVRLIEKSVKGMLPHNTLGRAQGMKLKVFVGAEHTHAAQQPEVLDISGLI

SEQ ID NO: 421 - DNA, 390 bp, Streptococcus pneumoniae
atgtcacaagcacaatatgcaggtactggacgtcgtaaaaacgctgttgcacgcgttcgccttgttccaggaactggtaaaatcactgttaacaaaaaagatgttgaagagtacatcccacacgctgaccttcgtcttgtcatcaaccaaccattcgcagttacttcaactgtaggttcatacgacgttttcgttaacgttataggtggtggatacgctggtcaatcaggagctatccgtcacggtatcgctcgtgcccttcttcaagtagacccagacttccgcgattcattgaaacgcgcaggacttcttacacgtgactcacgtaaagttgaacgtaagaaaccaggtcttaagaaagctcgtaaagcatcacaatttagtaaacgt

SEQ ID NO: 422 - protein, 130 aa, Streptococcus pneumoniae
  ribosomal protein S9 (rpsI); Cellular location: cytoplasm; Similar to strain R6 sequence 15902316 (5.E-70)
MSQAQYAGTGRRKNAVARVRLVPGTGKITVNKKDVEEYIPHADLRLVINQPFAVTSTVGSYDVFVNVIGGGYAGQSGAIRHGIARALLQVDPDFRDSLKRAGLLTRDSRKVERKKPGLKKARKASQFSKR

SEQ ID NO: 423 - DNA, 129 bp, Streptococcus pneumoniae
atgagcttagaagccatttctgaagcattaactcatagcgataccgttacaactaagacttatgttaatacttcaaacatagttccattatctgctggacaagttgcctaccaacatcttaaaaataag

SEQ ID NO: 424 - protein, 43 aa, Streptococcus pneumoniae
  hypothetical protein; Cellular location: cytoplasm
MSLEAISEALTHSDTVTTKTYVNTSNIVPLSAGQVAYQHLKNK

SEQ ID NO: 425 - DNA, 147 bp, Streptococcus pneumoniae
ttgaacaaccttgataatatgcgttttattatggaaatatttgcttcattttctcctgaaatagagcttttgctatcctatttttctctatttctaatgatttacttcaacttcttacctcttgggaaaaacaacaaagatatgaac

SEQ ID NO: 426 - protein, 49 aa, Streptococcus pneumoniae
  hypothetical protein; Cellular location: membrane
MNNLDNMRFIMEIFASFSPEIELLLSYFSLFLMIYFNFLPLGKNNKDMN

SEQ ID NO: 427 - DNA, 1206 bp, Streptococcus pneumoniae
atgaactatatcaaaagaccacattatttagattttttaagaaaacatcgtgaccgaccaatcatcaaagttgtgagtggagttagacgagctggtaaatctgtgctttttcaactctataaagaggagttactagcaactggggtagacgaggatcagattatattcatcaatttcgaagatttgagttactatgatctgcgacattttcaaacattattcgcttatataaaagatcaattagttagcaagaaaacatactatatctttttagatgaaattcaatatgttgaaaaatttgaactggtagcagatagtctattcatcttagcaaatgtagacctctatttgactggatctaacgcctactttatgagtagccaattagcaacaaacttgactggtcggtatgttgagatagaggttcttcctttgtcatttgaagaatatctatcaggtcaatctctcacagagaatctgaatacaacagaaatttttaacaattatctctttagtgctttcccttacttattgcaaacatcatcttacgatgaaaaaattgactatctcagaggaatatataactccatactgttaaatgatattgtcactagattgggaaaaccaaatcctactattattgagcgcattgtccgaacccttctcagtagtacaggtagcttaatatcaacaaataagattcgcaataccctagtcagccaaaatgtttcaatatcccataatactttggaaaattatttgacaactttgacagatagtttacttttttattccgttccacgttttgatgtaaaaggtagagcattattgcaacgtttagaaaaatattatcccgttgatttaggtttacgacatctcttattaccagaccagaaagaagacattaggcatatcttggaaaatatggtatatttggaattgagacgtagatattcacaagtatatgttggtaatttagataagtatgaggttgattttgttgttgtaactgatcttggccactacgcttattatcaggtcagtgaaacaacacttgctccagaaacactagaaagagaacttagaccactagaagccattaaagatcaattccctaaatatctattaacaatggatacgattcagccaacagccaattacaatggaatcgagaagaaaagcattatagattggttactagaaaaa

SEQ ID NO: 428 - protein, 402 aa, Streptococcus pneumoniae
  conserved hypothetical protein; Cellular location: cytoplasm
MNYIKRPHYLDFLRKHRDRPIIKVVSGVRRAGKSVLFQLYKEELLATGVDEDQIIFINFEDLSYYDLRHFQTLFAYIKDQLVSKKTYYIFLDEIQYVEKFELVADSLFILANVDLYLTGSNAYFMSSQLATNLTGRYVEIEVLPLSFEEYLSGQSLTENLNTTEIFNNYLFSAFPYLLQTSSYDEKIDYLRGIYNSILLNDIVTRLGKPNPTIIERIVRTLLSSTGSLISTNKIRNTLVSQNVSISHNTLENYLTTLTDSLLFYSVPRFDVKGRALLQRLEKYYPVDLGLRHLLLPDQKEDIRHILENMVYLELRRRYSQVYVGNLDKYEVDFVVVTDLGHYAYYQVSETTLAPETLERELRPLEAIKDQFPKYLLTMDTIQPTANYNGIEKKSIIDWLLEK

SEQ ID NO: 429 - DNA, 345 bp, Streptococcus pneumoniae
atgtggtataatcttcttatggcatattcaatagattttcgtaaaaaagttctctcttattgtgagcgaacaggtagtataacagaagcatcacacgttttccaaatctcacgtaataccatttatggctggttaaagctaaaagagaaaacaggagagctaaaccaccaagtaaaaggaacaaaaccaagaaaagttgatagagatagacttaaaaactatcttactgacaatccagatgcttatttgactgaaatagcttctgaatttggctgtcatccaactaccatccactatgcgctcaaagctatgggctacactcgaaaaaaagaaccacacctacta

SEQ ID NO: 430 - protein, 115 aa, Streptococcus pneumoniae
  IS630-Spn1, transposase Orf1 FRAMESHIFT; Cellular location: cytoplasm; Similar to strain R6 sequence 15903081 (1.E-62)
MWYNLLMAYSIDFRKKVLSYCERTGSITEASHVFQISRNTIYGWLKLKEKTGELNHQVKGTKPRKVDRDRLKNYLTDNPDAYLTEIASEFGCHPTTIHYALKAMGYTRKKEPHLL

SEQ ID NO: 431 - DNA, 336 bp, Streptococcus pneumoniae
ttggttgcaggtctaacaaatggtgagttaatcgctccaatgacttacgaagagacgatgacgagcgacttttttgaagcttggtttcagaagtttctcttaccaacattaaccacaccatcggttattattatggataatgcaagattccatagaatggggaagctagaactcttgtgtgaagagtttgggtataaacttttacctcttcctccctactcacctgagtacaatcctattgagaaaacatgggctcatatcaaaaagcacctcaaaaaggtattaccaagttgcaataccttttatgaggctcttttgtcctgctcttgtttcaat

SEQ ID NO: 432 - protein, 112 aa, Streptococcus pneumoniae
  IS630-Spn1, transposase Orf2; Cellular location: cytoplasm; Similar to strain R6 sequence 15903081 (1.E-63)
MVAGLTNGELIAPMTYEETMTSDFFEAWFQKFLLPTLTTPSVIIMDNARFHRMGKLELLCEEFGYKLLPLPPYSPEYNPIEKTWAHIKKHLKKVLPSCNTFYEALLSCSCFN

SEQ ID NO: 433 - DNA, 90 bp, Streptococcus pneumoniae
ttgtttcaattgactataaatcgctataagaaaaaatcattttattggtataaagaagtgattgaaagtaatggcgaaacgttagataat

SEQ ID NO: 434 - protein, 30 aa, Streptococcus pneumoniae
  glycosyl hydrolase, family 1, truncation; Cellular location: cytoplasm; Similar to strain R6 sequence 15902318 (9.E-14)
MFQLTINRYKKKSFYWYKEVIESNGETLDN

SEQ ID NO: 435 - DNA, 363 bp, Streptococcus pneumoniae
ttgaaggatgattttggaggatataagatgacattgactattcatgtatattataaaggtgatggagatagtgcaataaagtttgcaagagaaatgcttgatagtggccttgttaaagaaattagaaatcaaaaaggtaacttgaaatacgaatattttttaccaattgaaaaagagggaactattctccttattgatcagtggataaatcaagaaactttagataaacattatcaatcaaagacaatgcagaaaatcttagatttaagaaaaaaatatcacttgcagatgcaagttgaacgttatatagaagatgattctgggatgccagaaagcgataagtcgtttatagacacagggaat

SEQ ID NO: 436 - protein, 121 aa, Streptococcus pneumoniae
  conserved domain protein; Cellular location: cytoplasm; Similar to strain R6 sequence 15902319 (3.E-66)
MKDDFGGYKMTLTIHVYYKGDGDSAIKFAREMLDSGLVKEIRNQKGNLKYEYFLPIEKEGTILLIDQWINQETLDKHYQSKTMQKILDLRKKYHLQMQVERYIEDDSGMPESDKSFIDTGN

SEQ ID NO: 437 - DNA, 1434 bp, Streptococcus pneumoniae
atgactacttttaaagatggatttttatggggtggtgctgttgctgctcatcaacttgaaggtggatggcaagaaggtggcaagggaattagtgttgctgatgttatgactgctggtcgtcatggagtagctcgtgaaattactttgggagttttagagggtaaatattatccaaatcatgaggcgatagatttttatcaccgttataaagaagatatagcactttttgctgaaatgggattcaagtgcttccgtacctctattgcatggacacgtatctttccaaaaggtgatgagttagagccgaatgaagaaggattacagttttatgataatctttttgatgaatgcttaaagaatggtattgaacctgtcatcactctatctcattttgaaatgccttatcacttagtgaccgaatatggtggttggaaaaataggaaattgattgatttctttgctcgttttgcagaagtcgtatttaaacgttacaaagataaggttaaatattggatgactttcaatgaaatcaataatcaagcgaattatcaggaagattttgcaccatttactaactcaggtattgtatatgaggaaggtgataatagagaagcaattatgtatcaagcagcacattacgaattagttgcttctgcacgagctgtaaaaattggtcatgagattaatccagattttcaaataggttgtatgattgcgatgtgtccaatttatccagttacttgcaatcctaaggatatcttaatggcaatgaaagctatgcagaagcgttattattttgctgatgtgcatgttttaggtaaatatcctgagcatattttcaagtattgggaacgaaaaggtatttcagttgattttactgcccaggataaagaagatttacttggtgggactgtagattacattggtttcagttactatatgtcctttgctatcgactctcatcgtgaaaataatccttattttgattatcttgaaacagaagatttagtgaaaaataattatgttaaggcttctgaatgggagtggcaaattgatccagaaggtttgcgttatgcgttaaattggtttacagaccactatcacttaccactctttattgttgaaaatggttttggagctatagatcaagttgcagcagatggtatggtacatgatgattatagaattgaatatctaggtgcccatattcgtgaaatgaaaaaggctgtagttgaagatggtgttgatttaatgggttatactccatggggatgtattgatttggtttcagctggtaccggtgaaatgcggaaacgttatggctttatttatgtagataaagatgataatgggaagggaagttataatcgttccccgaaaaaatcttttggctggtataaggaagttatttcatctaacggtgaatcagtagaa

SEQ ID NO: 438 - protein, 478 aa, Streptococcus pneumoniae
  6-phospho-beta-glucosidase (bglA); Cellular location: cytoplasm; Similar to strain R6 sequence 15902320 (0.E+01)
MTTFKDGFLWGGAVAAHQLEGGWQEGGKGISVADVMTAGRHGVAREITLGVLEGKYYPNHEAIDFYHRYKEDIALFAEMGFKCFRTSIAWTRIFPKGDELEPNEEGLQFYDNLFDECLKNGIEPVITLSHFEMPYHLVTEYGGWKNRKLIDFFARFAEVVFKRYKDKVKYWMTFNEINNQANYQEDFAPFTNSGIVYEEGDNREAIMYQAAHYELVASARAVKIGHEINPDFQIGCMIAMCPIYPVTCNPKDILMAMKAMQKRYYFADVHVLGKYPEHIFKYWERKGISVDFTAQDKEDLLGGTVDYIGFSYYMSFAIDSHRENNPYFDYLETEDLVKNNYVKASEWEWQIDPEGLRYALNWFTDHYHLPLFIVENGFGAIDQVAADGMVHDDYRIEYLGAHIREMKKAVVEDGVDLMGYTPWGCIDLVSAGTGEMRKRYGFIYVDKDDNGKGSYNRSPKKSFGWYKEVISSNGESVE

SEQ ID NO: 439 - DNA, 237 bp, Streptococcus pneumoniae
atgattggaagtattgcagcaattttaacaacatttgcatttttaccacaagtttttcgtgtagttaagacaaaggacacaggatctattgctctaggtatgtatgttatgcaagttattggtattgcattgtggcttgctcatggtattcgtataggagacttgcctttgattttagcaaatagtgtttcatttctactctcaggaataattttattttataaattgaagtataaa

SEQ ID NO: 440 - protein, 79 aa, Streptococcus pneumoniae
  conserved hypothetical protein; Cellular location: membrane; Similar to strain R6 sequence 15902321 (1.E-39)
MIGSIAAILTTFAFLPQVFRVVKTKDTGSIALGMYVMQVIGIALWLAHGIRIGDLPLILANSVSFLLSGIILFYKLKYK

SEQ ID NO: 441 - DNA, 312 bp, Streptococcus pneumoniae
atggcaaaagctttaattatttgtgcagcaggaatgtcttcatcacttatggcacagaaaacaacagagtttctaaaaggaaaagggaaagatattgtagttgatgctattagtgctactgaaggagggaaagctatcgcagcagcagcttttgatttgtatcttgtcagtcctcaaacaaaaatgtactttaagcaatttgaagaggctggttctaaagcaggaaaaccagttgtacaaatacctcctcaagcctatattcctattccaatgggaattgaaaaaatggctaatttgattcttgagaatatt

SEQ ID NO: 442 - protein, 104 aa, Streptococcus pneumoniae
  PTS system, IIB component; Cellular location: outside; Similar to strain R6 sequence 15902322 (3.E-54)
MAKALIICAAGMSSSLMAQKTTEFLKGKGKDIVVDAISATEGGKAIAAAAFDLYLVSPQTKMYFKQFEEAGSKAGKPVVQIPPQAYIPIPMGIEKMANLILENI

SEQ ID NO: 443 - DNA, 1479 bp, Streptococcus pneumoniae
atgaatgtgttaaacattaaagagaaagatatccttcaatttttaataaaaaataaggaacgttttgttacaagcaaagaactggcagaatatttatcctgttcagatagaactgtccgtaatgtactgaaattaattgagaagacaatgattattcaaggagtccggttgatttcaaaacaaggtcaagggtatcaaatattttttgagaatcaaggcgcttaccaggagtttagacaaacttatgaactggaagaagactatacgaaaactgcggtttcaaaaggtgatgatcgtttagtatttatcttaaataaattattatttgagcaagttccagttctttttgatgatttagctgatgaactttacgttagtcgttcaacattatctcatgatttcagaaagatacgagtgatgttatcagagtataatttgtccattgagagtagggcgaataaaggagtttatgtctcaggcgaggaacgtgataaacgacgttttatcataaattatttcctagagaatcaattttttaaaacaatacattgctatgtaaaatttaacttttttgatcaaactgttccattagaagaatttgctagaattgttttggatgaatgccaagaggccaacctaaaactatctgattttgtactacagaatttagtagttcacatagcattgtctgtgattcgtttaaaatccggatttgaaataaaaaatatagactgtcagatgactgatgatgcaatagagagaaaggttgcccaaagaattctttctaaagtaagagaagtaacaaatcaggaatttccagttcaggaaatagactacattactttgcatttgttagctaagagtcaacaatgtcaaaaaaatcagaagaatatttctgaagaagttttaaaaaaatctttatttaaaacatttcagaatttaggattagatgatatgtataacttttcttcagatttccaactaattgaaggattgataactcatctaatgacactacaagtacgtttagaaagccggattaccttaaataaccctttggtagatgaaattaaacagaattatagtgatatattctttatgactagagaaattcttgcaaatatggacaagttcttggagtggacaatatcagatgatgaagtagcatatgtaagtcttcactttttagctgctatggaacgtagcaaagagagtactaagtttaatattcttgctatttgtgcaacaggatttggtgcagcccaaatgttaagaaatcgtttggaaacggagtttgggaagcgagtagaagttgttgatgtaataggctactatgaattgaatcaagaaaaacttaaaggaatagattttatagtgtcagctattgatttatcaaatctatattttcaaatcccagtttttaaagttagtgtgtttcttaagagtgatgagatggaaatgattagaaaagctatggat

SEQ ID NO: 444 - protein, 493 aa, Streptococcus pneumoniae
  transcriptional regulator, putative; Cellular location: membrane; Feature of note: similar to Mga; Similar to strain R6 sequence 15902323 (0.E+01)
MNVLNIKEKDILQFLIKNKERFVTSKELAEYLSCSDRTVRNVLKLIEKTMIIQGVRLISKQGQGYQIFFENQGAYQEFRQTYELEEDYTKTAVSKGDDRLVFILNKLLFEQVPVLFDDLADELYVSRSTLSHDFRKIRVMLSEYNLSIESRANKGVYVSGEERDKRRFIINYFLENQFFKTIHCYVKFNFFDQTVPLEEFARIVLDECQEANLKLSDFVLQNLVVHIALSVIRLKSGFEIKNIDCQMTDDAIERKVAQRILSKVREVTNQEFPVQEIDYITLHLLAKSQQCQKNQKNISEEVLKKSLFKTFQNLGLDDMYNFSSDFQLIEGLITHLMTLQVRLESRITLNNPLVDEIKQNYSDIFFMTREILANMDKFLEWTISDDEVAYVSLHFLAAMERSKESTKFNILAICATGFGAAQMLRNRLETEFGKRVEVVDVIGYYELNQEKLKGIDFIVSAIDLSNLYFQIPVFKVSVFLKSDEMEMIRKAMD

SEQ ID NO: 445 - DNA, 495 bp, Streptococcus pneumoniae
atgcaagtttctagttatgtacaatcatcaaagattaacaaatttgaaaacaacggctttagacagtattttagtaaagaaaactttttaatatgtactgaatcagacaaggtaaatttacttgaaaagatggttgagagtttatctgttggtgaatcaaatgagtttgaacaatctttactttatggaattaaacagcgcgaagaattaagttcagttgttttttctgaaaaaattgcagttccgcatcctattcagccctttggtacagagggaaaggtttcggttgcaatttgtaaagattcgttactctgggataatcaaagttcacatgtccagctagtatttcttctatctccatcaatatatgggaacgaaggtttggcaactgtgactaaaaagatagtctctctgacagagaatgatgaattgcaaaatcagctaatatcttgcaataactttgaagattttattaacatatttgagaagataaaa

SEQ ID NO: 446 - protein, 165 aa, Streptococcus pneumoniae
  PTS system, IIA component; Cellular location: cytoplasm; Similar to strain R6 sequence 15902323 (1.E-86)
MQVSSYVQSSKINKFENNGFRQYFSKENFLICTESDKVNLLEKMVESLSVGESNEFEQSLLYGIKQREELSSVVFSEKIAVPHPIQPFGTEGKVSVAICKDSLLWDNQSSHVQLVFLLSPSIYGNEGLATVTKKIVSLTENDELQNQLISCNNFEDFINIFEKIK

SEQ ID NO: 447 - DNA, 312 bp, Streptococcus pneumoniae
atgaatcaagaggaactgcaggttgcagcatttgaaattatcctgcattcgggaaatgcaaggtcagaaatacatgaagcatttgcaaaaatgagagaaggtagttttgatgatgcagaaagtaaattaaatcaatcaaatgagataattcttgaagcgcatcatgcacaaaccaaactcttgcaagaatacgcaagtggagtggaaattaaaattgaaattatcatggtacatgctcaagatcatttaatgaccactatgacattattagaagtagcaaaggaaatgttagctctttataagaaagttaac

SEQ ID NO: 448 - protein, 104 aa, Streptococcus pneumoniae
  PTS system, IIA component; Cellular location: cytoplasm; Similar to strain R6 sequence 15902324 (4.E-54)
MNQEELQVAAFEIILHSGNARSEIHEAFAKMREGSFDDAESKLNQSNEIILEAHHAQTKLLQEYASGVEIKIEIIMVHAQDHLMTTMTLLEVAKEMLALYKKVN

SEQ ID NO: 449 - DNA, 504 bp, Streptococcus pneumoniae
atggataaaaaagaacgacaaaagattgaacaacaacgtcgagagatggctctaactaatacttttttcaatcgatatcttcttctacgttattcaatagcactcttcttttttgggaatatttattggcttttgagtcagtttattagtccctcgcctattattattttccccattatgctcatagtattttctattttagcaactgttgaacaatttaaactttatggaaataggaaagaaaagttgggaataacactaatgtttgttagaatacaaatgcttatttcaataggattacttgttttaacttggacaagttggtttaagaatctttttccgatttttgaaaataaccaagtagcacgtttatttgtttttgtagttcttctattaggtttagttctgagtttgttagacattagaagaattaaaaaaatttataaacgaacagataaggcttatcaacaatttgtccaattggaaaagaactcacttagttta

SEQ ID NO: 450 - protein, 168 aa, Streptococcus pneumoniae
  hypothetical protein; Cellular location: membrane; Similar to strain R6 sequence 15902325 (2.E-88)
MDKKERQKIEQQRREMALTNTFFNRYLLLRYSIALFFFGNIYWLLSQFISPSPIIIFPIMLIVFSILATVEQFKLYGNRKEKLGITLMFVRIQMLISIGLLVLTWTSWFKNLFPIFENNQVARLFVFVVLLLGLVLSLLDIRRIKKIYKRTDKAYQQFVQLEKNSLSL

SEQ ID NO: 451 - DNA, 1344 bp, Streptococcus pneumoniae
atggatcaacaaaacgggttgtttggttttcttgaaaaccatgttatgggaccaatgggcaaacttgctcagtttaaagtagtacgtgctatcacggctgcaggtatggctgctgtaccatttactattgtaggatcaatgtttttggtattcagtattttgccacaagctttctcattttggccaattgtggcagatattttctctgcttcatttgataaattcacatcactttacatggttgcaaactatgcgactatgggttctctatctctttatttcgttctatcacttgcatatgaattgacaaaaatttatgcagaggaagaagaactcaatatgaatcctcttaatggtgccttgcttgccttgatggcttttgtcatgacagtaccgcaaatcatttttgatggtggaatgatgaagactgtgacaagtctaaaagaaggtgcagtaattgcagatggatgggcaatgggaaatgtagtcgcacgttttgggacaacagggatttttaccgcaatcattatggcaattgtgactgttcttatttatcgtatgtgtgttaaacataattgggttattaaaatgcctgaagctgttccagaaggagtttctcgtggatttaccgctttggttccgggatttgttgttgcatttgttgttatctttatcaacggtcttcttgtagcaatgggaacagatatttttaaagtcattgcaattccatttggttttgtatccaatctgactaattcgtggattggtttaatgattatttatctattgactcaactactttggattgtaggtatccacggtgcgaacattgtttttgcatttgttagtccaattgctcttgctaacatggctgaaaatgctgctggcgggcacttcgctgttgcaggtgaattttctaatatgtttgtaattgcaggtggttctggtgcaactttaggactatgtttatatattgcttttgcctctaaatctgaacagcttaaagcaataggacgagcatctgtagttccagccttatttaatattaatgaaccattaatttttggattacctattatctataatccagccttggctataccatttattttagcaccaatggttactgctactatttattacgtagcgaattctctaaactttattaagccaattatcgcacaggttccatggccaactccagtagggattggagctttcttagggacagcagatcttcgagctgtattagttgctctagtatgtgcatttgcagcattcctagtctatcttccattcatccgtgtatatgatcaaaaattggtgaaagaagagcaaggtatc

SEQ ID NO: 452 - protein, 448 aa, Streptococcus pneumoniae
  PTS system, IIC component; Cellular location: membrane; Similar to strain R6 sequence 15902326 (0.E+01)
MDQQNGLFGFLENHVMGPMGKLAQFKVVRAITAAGMAAVPFTIVGSMFLVFSILPQAFSFWPIVADIFSASFDKFTSLYMVANYATMGSLSLYFVLSLAYELTKIYAEEEELNMNPLNGALLALMAFVMTVPQIIFDGGMMKTVTSLKEGAVIADGWAMGNVVARFGTTGIFTAIIMAIVTVLIYRMCVKHNWVIKMPEAVPEGVSRGFTALVPGFVVAFVVIFINGLLVAMGTDIFKVIAIPFGFVSNLTNSWIGLMIIYLLTQLLWIVGIHGANIVFAFVSPIALANMAENAAGGHFAVAGEFSNMFVIAGGSGATLGLCLYIAFASKSEQLKAIGRASVVPALFNINEPLIFGLPIIYNPALAIPFILAPMVTATIYYVANSLNFIKPIIAQVPWPTPVGIGAFLGTADLRAVLVALVCAFAAFLVYLPFIRVYDQKLVKEEQGI

SEQ ID NO: 453 - DNA, 174 bp, Streptococcus pneumoniae
atgtccttagatatagataaagaaaagatgacaatcatgggaatagcttttgaaaaccgatccgtttttaagagtgtttggtatgctttaagtacaaatatgattgaaggatggcgacctacggttagtgatgttgaaaaattacgagatgaagctcttgctctggggatgact

SEQ ID NO: 454 - protein, 58 aa, Streptococcus pneumoniae
  hypothetical protein; Cellular location: cytoplasm; Similar to strain R6 sequence 15902327 (3.E-29)
MSLDIDKEKMTIMGIAFENRSVFKSVWYALSTNMIEGWRPTVSDVEKLRDEALALGMT

SEQ ID NO: 455 - DNA, 2211 bp, Streptococcus pneumoniae
ttgaaaatttttaagggagagttttatcgaatctctgtattaacagacaagctagtaaggttagaatactctcaaactggaagttttgaggatagaacgacacaacttatctataatagagattttggccaaatttcgttagattatatcgagacatcaaacgtactagatattatgacggactattttcatctgcactttaataaaggagaatttaacgccgaaaatttatttatagaattaaaaggaaattttgccgtatatggtagtcgctggtattttggtgaatctattgaaacgttaaaaggaacagctcggactctggataaggcagatggagcaatctcgttagaagatggaattattagccgaaatggtatagccttattggatgattctcaaggatttatttgggatgaacaatctggttatattgagagagaaaatcaaattgacctgtatttctttgcctatgggcatgattatagaggagcaatcagagatttttaccatttgactggttcaacacccttgttgccaagatatgctttaggcaattggtggagtagatattggccttatacgtcggatgaatacttggatttaatagacagatttgaaacagagaaaattccattatctatcggtgtgttagatatggattggcatataactgacattccagctcgctttggaagtggctggacaggatatagttggaatagaaacttaataccaaatccagaacagttattgcaacaacttcatgatagaaagctaaaactctccttaaatgtccatcctgctgatgggatacgggcttatgaagaagcttatcctcaaatcgcaaaacggttggggttaaatgtagaactagaagaacctgctatttttgatttttttaatccctcttttagggaagcctactttaaagatgttcattatgaactagaaaagcagggagtagatttttggtggattgactggcaacaagggacacaaggtatgctagatccactttggcttttaaaccattatcactatcaggatagttgtaaaaatgcagaaggtggtttgattttatcaagatatgcaggtcctggtagtcaccgctaccctgttggtttttcaggggatactattattagttggaattccttaagatttcaaccctattttacagcgacagcatctaatatcggttatagttggtggagtcatgatatcggtggacatatgttgggggattatgacgaagagctacaaactagatggctacagtttggtgtttttagtccgattactcgattacatagttctagaagtccttttaatagtaaagaaccttggtttttttcagaaacaacatctaagattatgaagaaataccttcgtttgagacatcagatgattccctatctatataccatgaatgtacagacacatgaggaaggtgccccattaatcagtccaatctattatttctatccagagaatgatgagagctataatgttccaaaccaatacttttttggaacagaactgatggtggctcccattgtagaaaagatggatttgacattccaatctgcaaaagtagatgtatggttccctgaaggtgaatggtatgacttcttttcagagaaaaaatacacaggtggtgtgaagttaagtgtttatagggacatctcgactacgcctgtgtttgcaaaaagtggtgcaatcattcccttggttggttctgagataggtatgggtgttgatttacctgaagttgtagattggtatgtattcccaggaaaacaacattcttttgaaatgcttgaagatcaaaatggtcaaagatataaaacaagattatcaatcgattgggaaatgggaatggtagagttagcattacaaggagattctagtatcgttccaagcaatagaaaacatagaattcattttaaaggaacgaatgtgtctataattgaattgccaaataagaatgatacagctaaatttgaatggaaagataataaaaggacatctttaaatgacgaagtttttagactactaaagacagcttctcttccatatgaattaaaagatagattgttaaatcaattcatcaatgcgaaaaactctcatgacttaatgaatatcttgcatcatcaggataaggaattgagagggcgtttgttggaaatgatatttactagccaaaac

SEQ ID NO: 456 - protein, 737 aa, Streptococcus pneumoniae
  glycosyl hydrolase, family 31; Cellular location: cytoplasm; Similar to strain R6 sequence 15902328 (0.E+01)
MKIFKGEFYRISVLTDKLVRLEYSQTGSFEDRTTQLIYNRDFGQISLDYIETSNVLDIMTDYFHLHFNKGEFNAENLFIELKGNFAVYGSRWYFGESIETLKGTARTLDKADGAISLEDGIISRNGIALLDDSQGFIWDEQSGYIERENQIDLYFFAYGHDYRGAIRDFYHLTGSTPLLPRYALGNWWSRYWPYTSDEYLDLIDRFETEKIPLSIGVLDMDWHITDIPARFGSGWTGYSWNRNLIPNPEQLLQQLHDRKLKLSLNVHPADGIRAYEEAYPQIAKRLGLNVELEEPAIFDFFNPSFREAYFKDVHYELEKQGVDFWWIDWQQGTQGMLDPLWLLNHYHYQDSCKNAEGGLILSRYAGPGSHRYPVGFSGDTIISWNSLRFQPYFTATASNIGYSWWSHDIGGHMLGDYDEELQTRWLQFGVFSPITRLHSSRSPFNSKEPWFFSETTSKIMKKYLRLRHQMIPYLYTMNVQTHEEGAPLISPIYYFYPENDESYNVPNQYFFGTELMVAPIVEKMDLTFQSAKVDVWFPEGEWYDFFSEKKYTGGVKLSVYRDISTTPVFAKSGAIIPLVGSEIGMGVDLPEVVDWYVFPGKQHSFEMLEDQNGQRYKTRLSIDWEMGMVELALQGDSSIVPSNRKHRIHFKGTNVSIIELPNKNDTAKFEWKDNKRTSLNDEVFRLLKTASLPYELKDRLLNQFINAKNSHDLMNILHHQDKELRGRLLEMIFTSQN

SEQ ID NO: 457 - DNA, 474 bp, Streptococcus pneumoniae
atgacttcactttatgatttttccgttttgaaccaaaacaaccaagcaactcccttggatagctatcgtggcaaagttctcttgattgtcaacactgctactggatgtggtttaacgccccagtaccagggacttcaagaactctatgaacgctatcaagatcagggcttcgaaatattggatttcccttgcaatcagtttatgggacaagcacccggcagcgcagaggaaatcaacgccttctgtagcctacattttcaaaccaccttcccacgttttgccaagattaaggtcaacggtaaggaagcagaccctctctatgtctggttacaagaccagaaatccggcccactaggaaaacgagtcgaatggaatttcgctaagtttctcatcggtcgagatgggcaagtctttgaacgcttttcttcaaaaacagacccaaaacaaattgaagaggcgatacaaactctacta

SEQ ID NO: 458 - protein, 158 aa, Streptococcus pneumoniae
  glutathione peroxidase; Cellular location: cytoplasm; Similar to strain R6 sequence 15902329 (7.E-90)
MTSLYDFSVLNQNNQATPLDSYRGKVLLIVNTATGCGLTPQYQGLQELYERYQDQGFEILDFPCNQFMGQAPGSAEEINAFCSLHFQTTFPRFAKIKVNGKEADPLYVWLQDQKSGPLGKRVEWNFAKFLIGRDGQVFERFSSKTDPKQIEEAIQTLL

SEQ ID NO: 459 - DNA, 3231 bp, Streptococcus pneumoniae
ttgattttacaatatgtttattggagtgtatacatgcaaacaaaaacaaagaagctcattgtgagtttgtcttcacttgttttatcaggatttttattaaaccattatatgacaattggagcggaagaaacgactacgaataccattcagcaaagccagaaggaagttcagtatcagcaaagggatacaaaaaatttagttgaaaatggtgattttggtcagacggaggacggaagcagtccgtggacaggaagcaaagctcaggggtggtcagcttgggtagaccagaagaatagtgcagatgcctcaactcgagtcattgaggctaaggatggggctatcactatctcaagccatgagaaattaagggcagcgcttcaccgtatggttcctattgaagctaagaaaaagtataaactgcgtttcaagattaaaacagataataaaatcgggattgccaaagttcgtatcattgaggaaagtggtaaggacaagcgattgtggaattctgcaacgacgtcaggaacaaaggactggcagaccattgaagcagactatagcccgactttagatgttgataaaatcaagctggagttattctatgaaacaggaactgggactgtttcctttaaggatattgagctggtagaggtagcagaccagctttctgaggattctcaaacagataaacagcttgaggaaaagattgatttaccaattggaaaaaaacatgttttttctcttgcggactatacttataaggtagaaaatcctgacgttgcttcagtcaaaaatggaattttagaacctcttaaggaagggacaaccaatgtcattgtcagtaaagatggcaaggaagtgaaaaagattcctttgaagattctggcctctgttaaggatgcatacacagaccgtttggatgactggaatggcatcatcgctgggaatcaatactatgattctaaaaatgaacagatggccaaattaaaccaggaattggaaggaaaggtagctgatagcctatccagtatttcaagtcaggcggaccgcacctatttgtgggaaaaattttcaaattataaaacgtctgcaaatctgactgccacttatcggaaattggaggagatggccaagcaagtgaccaatccttcttctcgttattatcaagatgaaactgtcgttcgaacagtcagggattccatggaatggatgcataaacatgtctacaatagtgaaaagagcattgttgggaactggtgggattatgaaatcggtacacctcgtgccatcaacaataccttgtctctgatgaaagaatacttctctgatgaggaaattaaaaaatatacagatgtgattgaaaaatttgtaccagatcccgaacatttccgaaagacgactgataacccattcaaggctctaggtggaaacttagttgatatgggaagggtaaaagtaatagctggtttactgcgtaaggatgatcaagaaatttcttctaccattcgctcgattgagcaagtgttcaagttggtagaccaaggtgaaggtttttatcaagatggatcctatatcgaccacaccaatgttgcctatacgggtgcttatgggaatgttttgattgatggcctgtctcaactgttgccagtcattcaaaagaccaagaatccaatcgataaagataaaatgcaaaccatgtaccactggattgataaatcgtttgctcctttgctggtgaatggagagttgatggatatgagtcgtggacgctcgatcagtcgtgcaaatagcgaggggcacgtggccgcagtagaagtactaagagggattcaccgaatagcggatatgtctgaaggagaaaccaaacaatgtttgcagagtcttgtgaagaccattgttcaatcggatagttattatgatgtctttaagaatttgaagacttataaggatatcagtttgatgcaatccttgttaagtgatgcaggagtcgcaagtgttccaagaccaagttacctatctgcctttaacaagatggataaaacagccatgtacaatgcagagaaagggtttggatttggcttgtcactcttttccagtcgtaccttgaattacgaacacatgaacaaggaaaataaacgtggttggtatacgagtgatgggatgttctatctttacaatggcgatttgagtcactatagcgatggctactggccaacagttaatccatataagatgcctggtacaacagagacggatgctaagagagcggatagcgatacaggtaaagttttaccgtctgctttcgttggaacgagcaaactagatgatgccaatgcgacagcaaccatggatttcaccaactggaatcaaacattgactgctcataagagctggtttatgctaaaggataagatcgcctttttaggaagcaatatccaaaacacttcaacagatactgctgcaactacaattgaccagagaaaactggaatcaggtaatccatataaagtctatgtcaatgataaagaagcctcccttacagaacaagaaaaggattatcctgaaacccaaagtgtctttttagaatcgttcgattcgaaaaagaatattggttactttttctttaagaagagttcaatcagtatgagtaaggctttgcaaaagggagcctggaaggatatcaatgaaggacagtcagacaaggaagttgaaaatgaatttcttacgattagtcaggctcataagcaaaatagagattcttatggctatatgctcattcctaacgtggatcgtgccaccttcaatcaaatgataaaagagttagaaagtagcctcatcgaaaataacgaaacccttcagtctgtttatgatgctaaacaaggagtttggggcattgtgaaatatgatgattctgtctctactatttccaaccaattccaagttttgaaacgtggagtctataccattcgaaaagaaggggatgaatataagattgcctactataatcctgaaacccaggaatcagctccagatcaggaagtctttaaaaagctagagcaagcagctcagccacaagtacagaattcaaaagaaaaggaaaaatctgaagaggaaaagaaccattcggatcaaaagaatctccctcagacaggagaaggtcagtcaatcttggcaagtctagggttcttgctacttggggcattttatctattccgtagaggaaagaacaac

SEQ ID NO: 460 - protein, 1077 aa, Streptococcus pneumoniae
  hyaluronidase; Cellular location: Peptidoglycan-bound (LPXTG); Similar to strain R6 sequence 15902330 (0.E+01)
MILQYVYWSVYMQTKTKKLIVSLSSLVLSGFLLNHYMTIGAEETTTNTIQQSQKEVQYQQRDTKNLVENGDFGQTEDGSSPWTGSKAQGWSAWVDQKNSADASTRVIEAKDGAITISSHEKLRAALHRMVPIEAKKKYKLRFKIKTDNKIGIAKVRIIEESGKDKRLWNSATTSGTKDWQTIEADYSPTLDVDKIKLELFYETGTGTVSFKDIELVEVADQLSEDSQTDKQLEEKIDLPIGKKHVFSLADYTYKVENPDVASVKNGILEPLKEGTTNVIVSKDGKEVKKIPLKILASVKDAYTDRLDDWNGIIAGNQYYDSKNEQMAKLNQELEGKVADSLSSISSQADRTYLWEKFSNYKTSANLTATYRKLEEMAKQVTNPSSRYYQDETVVRTVRDSMEWMHKHVYNSEKSIVGNWWDYEIGTPRAINNTLSLMKEYFSDEEIKKYTDVIEKFVPDPEHFRKTTDNPFKALGGNLVDMGRVKVIAGLLRKDDQEISSTIRSIEQVFKLVDQGEGFYQDGSYIDHTNVAYTGAYGNVLIDGLSQLLPVIQKTKNPIDKDKMQTMYHWIDKSFAPLLVNGELMDMSRGRSISRANSEGHVAAVEVLRGIHRIADMSEGETKQCLQSLVKTIVQSDSYYDVFKNLKTYKDISLMQSLLSDAGVASVPRPSYLSAFNKMDKTAMYNAEKGFGFGLSLFSSRTLNYEHMNKENKRGWYTSDGMFYLYNGDLSHYSDGYWPTVNPYKMPGTTETDAKRADSDTGKVLPSAFVGTSKLDDANATATMDFTNWNQTLTAHKSWFMLKDKIAFLGSNIQNTSTDTAATTIDQRKLESGNPYKVYVNDKEASLTEQEKDYPETQSVFLESFDSKKNIGYFFFKKSSISMSKALQKGAWKDINEGQSDKEVENEFLTISQAHKQNRDSYGYMLIPNVDRATFNQMIKELESSLIENNETLQSVYDAKQGVWGIVKYDDSVSTISNQFQVLKRGVYTIRKEGDEYKIAYYNPETQESAPDQEVFKKLEQAAQPQVQNSKEKEKSEEEKNHSDQKNLPQTGEGQSILASLGFLLLGAFYLFRRGKNN

SEQ ID NO: 461 - DNA, 105 bp, Streptococcus pneumoniae
gtggtttatctcagagctataagcccaaatcatcagccagcgcctaaagacgctggctttcacgttgttcaagccttattgctcttgactcgtcacttgcctctt

SEQ ID NO: 462 - protein, 35 aa, Streptococcus pneumoniae
  hypothetical protein
MVYLRAISPNHQPAPKDAGFHVVQALLLLTRHLPL

SEQ ID NO: 463 - DNA, 627 bp, Streptococcus pneumoniae
atgaccaaatcagatacgattattgaactaaaaaaacaaaaaattgtcgctgttattcgaggaaatacaaaggaagaaggactacaagcctcgattgcttgtatcaagggcggtatcaaagctattgaaatcgcctataccaatcagtatgcaggacaaatcatcaaggaacttgtagacttgtatcaggacgatcagagtgtttgtatcggtgcaggtactgtgcttgatgccgtaactgctagagatgccattctagctggagcaaattacgttgtttctccatctttccatgctgaaactgcgaaaatgtgcaatctctacagcacaccgtacattccaggctgtattaccctcacagagatcacgactgcacttgaagccggtagtgaaatcatcaaactcttcccaggtagtactctcagtccagcatatatctctgcagtcaaggcaccgatcccacaagtttccgtaatggtaaccggaggagtcggcctaaacaacatccctcaatggttcgctgctggtgcagatgccgttggaattggtggcgaactcaataaactcgcttcccaaggcaactttgaccgcatcagcgagattgcccaacagtatattacactcaga

SEQ ID NO: 464 - protein, 209 aa, Streptococcus pneumoniae
  4-hydroxy-2-oxoglutarate aldolase/2-deydro-3-deoxyphosphogluconate aldo; Cellular location: cytoplasm; Similar to strain R6 sequence 15902331 (e-114)
MTKSDTIIELKKQKIVAVIRGNTKEEGLQASIACIKGGIKAIEIAYTNQYAGQIIKELVDLYQDDQSVCIGAGTVLDAVTARDAILAGANYVVSPSFHAETAKMCNLYSTPYIPGCITLTEITTALEAGSEIIKLFPGSTLSPAYISAVKAPIPQVSVMVTGGVGLNNIPQWFAAGADAVGIGGELNKLASQGNFDRISEIAQQYITLR

SEQ ID NO: 465 - DNA, 999 bp, Streptococcus pneumoniae
atgacgaaaatattactgtttggcgaaccattaattcgaatttcaccattagatgccaccagtatcggcgatcatgttgccagttcgacttattttggcggatcagaaattaacatcgcttgtaatttgcaagccctgggtatctcaacgaaagtttttaccgcactccctgccaacgagattggagatcgttttctcacattcttgaaacagcaccaaatcgataccagttcaatctgtcggcttggcgatcgaatcggcctctactatttggagaacggctttggttgtcgtcaaagtgaagttttctacgatcgtaagcatacgagtatcagccagattcggccaaacatgctagatatggattctctctttcaggggattagccattttcattttagtggaatcaccgtagctatcggtcaagaggtccgtgcgatccttctcctactcttggaagaagccaagcgccgaggaattgtcgtttcaatggatctcaatctgagaacaaagatgatttcagtcctagaagccaagtatgaattttctaagtttgcacgttttactgactattgcttcggtattgatcctctcatgattgatgaccaaaatctagagatgtttccaagagacagtgctagcctagaagaggtggaaaatcgcatgcgacttttaaaagaagcctatggtttcaaggccattttccataccctccgctctagtgatgagcaagacaaaaatgtctatcaagcctatgctctagaagaactatttgaagagtctgtccaactaaaaactgcagtctatcaacgaattggtagcggggatgcctttatatctggtgccctttaccaactactccatcattcctccctaaaaactaccattgactttgcagttgcgagcgcaactctcaaatgcactcttccaggagaccatctctccacttcctcaactagtattgaaaatttactggcaaatgcacaagatatcattcgt

SEQ ID NO: 466 - protein, 333 aa, Streptococcus pneumoniae
  carbohydrate kinase, PfkB family; Cellular location: membrane; Similar to strain R6 sequence 15902332 (0.E+01)
MTKILLFGEPLIRISPLDATSIGDHVASSTYFGGSEINIACNLQALGISTKVFTALPANEIGDRFLTFLKQHQIDTSSICRLGDRIGLYYLENGFGCRQSEVFYDRKHTSISQIRPNMLDMDSLFQGISHFHFSGITVAIGQEVRAILLLLLEEAKRRGIVVSMDLNLRTKMISVLEAKYEFSKFARFTDYCFGIDPLMIDDQNLEMFPRDSASLEEVENRMRLLKEAYGFKAIFHTLRSSDEQDKNVYQAYALEELFEESVQLKTAVYQRIGSGDAFISGALYQLLHHSSLKTTIDFAVASATLKCTLPGDHLSTSSTSIENLLANAQDIIR

SEQ ID NO: 467 - DNA, 639 bp, Streptococcus pneumoniae
atgaaaatcgcattaatcaatgaaaatagtcaagctagcaagaatcacattatttacgatagtctaaaagaagcgacagataaaaaaggctaccaattatttaactatggtatgcgtggagaagaaggagaaagtcaattaacttatgtgcagaacggactaatggctgccatccttttaaatacaaaggcagttgactttgttgttaccggctgtggtacgggtgtaggggctatgcttgctttaaacagcttccctggtgttgtctgtggtctagcagtggacccaactgacgcttacctttattctcaaatcaatggtggtaacgccttgtctatcccttatgccaaaggatttggctggggggcagaactgaccctcaaattgatgtttgaacgcttatttgctgaagaaatgggcggtggctacccaagagaacgtgtaatccctgaacaacgcaacgctcgtatcttaaacgaggtgaaacaaatcacccacaatgatttgatgaccatccttaaaataatcgaccaagacttcctcaaagacaccatctctggcaaatacttccaagaatacttctttgaaaactgccaagatgatgaagttgctgcttatttgaaagaagtattagccaag

SEQ ID NO: 468 - protein, 213 aa, Streptococcus pneumoniae
  conserved domain protein; Cellular location: membrane; Similar to strain R6 sequence 15902333 (e-120)
MKIALINENSQASKNHIIYDSLKEATDKKGYQLFNYGMRGEEGESQLTYVQNGLMAAILLNTKAVDFVVTGCGTGVGAMLALNSFPGVVCGLAVDPTDAYLYSQINGGNALSIPYAKGFGWGAELTLKLMFERLFAEEMGGGYPRERVIPEQRNARILNEVKQITHNDLMTILKIIDQDFLKDTISGKYFQEYFFENCQDDEVAAYLKEVLAK

SEQ ID NO: 469 - DNA, 813 bp, Streptococcus pneumoniae
atgacaaatacatcattctcaattgagcagttttctttaaaaggaaaaattgctctcatcaccggcgcttcttatggaattggatttgctattgccaaatcctacgctgaagccggcgctactattgtctttaacgatatcaatcaagatctggtcaataaagggattgaagcttatcgtgaagttggcatccaagcccatggatatgtctgtgacgtgacagacgaggacggtatccaagccatggtcaagcaaatcgaacaagaggttggtgtcattgacatcctcgttaataacgctggtattatccgccgagttccaatgtgcgaaatgagcgccgctgatttccgtaaggtcatcgatattgacttaaacgcaccatttatcgtttcaaaggcagttattccttctatgataaagaaagggcatggaaagattatcaatatttgttcgatgatgagcgaactgggacgtgaaacagttagcgcttatgctgctgctaaagggggcttgaaaatgttgacccgcaacattgcgtctgaatacggtggagccaatatccaatgtaacggaattggaccgggttatattgccactcctcaaacagcacctcttcgtgaattgcaagaagatggttctcgccacccatttgaccagttcatcattgcaaaaacacctgctgcacgttggggaaatactgaagatttgatgggccctgctgtctttctcgctagtgatgccagcaattttgtcaatggccacatcctatatgtagatggcggtatcttagcctacatcggaaaacaacctgag

SEQ ID NO: 470 - protein, 271 aa, Streptococcus pneumoniae
  oxidoreductase, short chain dehydrogenase/reductase family; Cellular location: cytoplasm; Similar to strain R6 sequence 15902334 (e-153)
MTNTSFSIEQFSLKGKIALITGASYGIGFAIAKSYAEAGATIVFNDINQDLVNKGIEAYREVGIQAHGYVCDVTDEDGIQAMVKQIEQEVGVIDILVNNAGIIRRVPMCEMSAADFRKVIDIDLNAPFIVSKAVIPSMIKKGHGKIINICSMMSELGRETVSAYAAAKGGLKMLTRNIASEYGGANIQCNGIGPGYIATPQTAPLRELQEDGSRHPFDQFIIAKTPAARWGNTEDLMGPAVFLASDASNFVNGHILYVDGGILAYIGKQPE

SEQ ID NO: 471 - DNA, 432 bp, Streptococcus pneumoniae
atgaaaattgtacttgtagggcatggacattttgctacagggatttatagttctttacaattgattgcaggtaatcaagaaaatgtggaggcgattgactttgtggaaggaatgtcagcagatgaactcaagcaaaaaatcttacttgcaatttcaaatgaagaagaagttttaatcctaagtgatctcttgggaggatcgccattcaaggtttcttctaccataatgggagaaaatccagccaagacaatgaatgttctctcgggtttgaacttagccatgttaatggaagcagtctttgctagaatggctcatagctttgatgaggttgttaataaatcagtagtggcggcccagggcggagtcgtaaatggtaaagaattgttttcaacggatgcagaggaagaggaagaagatttcgaatcgggtatt

SEQ ID NO: 472 - protein, 144 aa, Streptococcus pneumoniae
  PTS system, IIA component; Cellular location: outside; Similar to strain R6 sequence 15902335 (4.E-76)
MKIVLVGHGHFATGIYSSLQLIAGNQENVEAIDFVEGMSADELKQKILLAISNEEEVLILSDLLGGSPFKVSSTIMGENPAKTMNVLSGLNLAMLMEAVFARMAHSFDEVVNKSVVAAQGGVVNGKELFSTDAEEEEEDFESGI

SEQ ID NO: 473 - DNA, 1188 bp, Streptococcus pneumoniae
atgataaaaaaggttacgattgaaaaaataaaatcgcctgagcgcttcttagaagtaccacttctgacgaaagaagaagtcggccaggcaatcgataaggttattcggcagttagaactcaaccttgactatttcaaggaagatttcccgacgccagctacctttgataatgtctatccaatcatggataacacggaatggaccaatggtttctggacaggagaactgtggttggcttatgaatacagtcaacaggatgcatttaaaaacatcgctcataaaaatgttctttctttcctggatcgtgtcaataagagagtagaattggatcaccatgatctcggcttcttgtacacaccgtcttgtatggctgaatataagataaatggagatggagaggctagagaagcaaccttgaaagctgcagataagttgattgaacgctatcaagaaaaaggtggttttattcaagcttggggagacttgggcaagaaagagcattaccgtttgattatcgactgcttgctcaatatccaactcttattctttgcttatcaagaaacaggcgatcaaaaatactacgatattgcagaaagccatttctatgcttcagctaataatgtaatccgtgatgacgcttcgtccttccacaccttctattttgatcctgagacaggtcaaccctttaaaggtgtaacgagacaagggtatagtgatgattcatgctgggcacgtggtcaatcatggggagtctatggtattcctttgacttatcgtcacttaaaagacgagtcctgctttgacttgtttaagggtgtgaccaattatttcttgaatcgtctgccaaaagatcatgtgtcctattgggatttgatttttaatgatggtagtgatcaatcacgagattcttcagcaacagctatcgccgtctgtgggattcatgaaatgctaaaacatctcccagaggtggatgctgacaaagatatttataaacatgctatgcatgccatgcttcgttccttgatcgaacattatgcaaatgatcaatttacccctggtgggacaagtctcctccacggtgtgtactcatggcattcaggtaaaggagtggatgaaggcaatatctggggtgactactattacctagaagcccttatccgtttctacaaagactggaacctatattgg

SEQ ID NO: 474 - protein, 396 aa, Streptococcus pneumoniae
  glucuronyl hydrolase; Cellular location: membrane; Similar to strain R6 sequence 15902336 (0.E+01)
MIKKVTIEKIKSPERFLEVPLLTKEEVGQAIDKVIRQLELNLDYFKEDFPTPATFDNVYPIMDNTEWTNGFWTGELWLAYEYSQQDAFKNIAHKNVLSFLDRVNKRVELDHHDLGFLYTPSCMAEYKINGDGEAREATLKAADKLIERYQEKGGFIQAWGDLGKKEHYRLIIDCLLNIQLLFFAYQETGDQKYYDIAESHFYASANNVIRDDASSFHTFYFDPETGQPFKGVTRQGYSDDSCWARGQSWGVYGIPLTYRHLKDESCFDLFKGVTNYFLNRLPKDHVSYWDLIFNDGSDQSRDSSATAIAVCGIHEMLKHLPEVDADKDIYKHAMHAMLRSLIEHYANDQFTPGGTSLLHGVYSWHSGKGVDEGNIWGDYYYLEALIRFYKDWNLYW

SEQ ID NO: 475 - DNA, 489 bp, Streptococcus pneumoniae
atgacaatgccaaatattattatgacccgtatcgatgaacggttgattcatggacaaggacaactttgggtaaaatacctaggttgtaatacggtcattgttgccaatgacgaagtaagcacggacaagatgcaacaaactctgatgaaaacagttgtgccagactcagttgccatgcgtttcttccctttgcaaaaggtgattgatatcattcacaaggctaatcctgctcaaacgatctttatcgttgtaaaggatgtgaaggacgctttaaccttggtagaaggtggtgtcactatcaaagaaatcaatattgggaacattcacaatgcccctggtaaagagcaagtgacacgctccatcttcctgggtgaagaggacaaggcggccctcaaggaattgagccaaactcatcaagtaacatttaatacgaaaacaactccaacaggaaatgatggagctgttcaagtcaacattatggactatatt

SEQ ID NO: 476 - protein, 163 aa, Streptococcus pneumoniae
  PTS system, IIB component; Cellular location: cytoplasm; Similar to strain R6 sequence 15902337 (6.E-90)
MTMPNIIMTRIDERLIHGQGQLWVKYLGCNTVIVANDEVSTDKMQQTLMKTVVPDSVAMRFFPLQKVIDIIHKANPAQTIFIVVKDVKDALTLVEGGVTIKEINIGNIHNAPGKEQVTRSIFLGEEDKAALKELSQTHQVTFNTKTTPTGNDGAVQVNIMDYI

SEQ ID NO: 477 - DNA, 777 bp, Streptococcus pneumoniae
atgtcgattaatgtatttcaagcgattttaattggattatggacagctttctgttttagtggaatgctgttaggaatttacaccaatagatgtattgttctgtcatttggtgtcggaattattctaggtgatctgcctactgctcttgcaatgggagctattggtgaattggcttatatgggattcggtgttggtgctggaggtactgttccaccaaacccaatcggacctggtatctttggtaccttgatggctatcactagtgctggtaaagtcagtccagaagcggctcttgccctctctactccgattgctgtggcgattcaattcttacaaactttcgcctacactgtacgtgctggtgcgcctgaaacagctatgaagcacttgaaaaaccataatttgaagaaatttaagttcactctaaatgcaacaatttggttgtttgcctttattggatttaccttgggttgcttgggtgccctttcaatggataccttgttgaaactcgtagactacattccaccggtattacttacaggtttgacagttgctggtaaaatgctcccagctatcggttttgcgatgatcttgtcagtgatggctaagaaagagttgattccctttgtcttgttgggatatgtttgtgcagcttatctaaacatcccaacaattggtattgcaattgtaggtactatctttgctttgattgaattttataacaagccaaaaacagcggatcatgtggtagaggaggaagcacacgatgactggatc

SEQ ID NO: 478 - protein, 259 aa, Streptococcus pneumoniae
  PTS system, IIC component; Cellular location: membrane; Similar to strain R6 sequence 15902338 (e-148)
MSINVFQAILIGLWTAFCFSGMLLGIYTNRCIVLSFGVGIILGDLPTALAMGAIGELAYMGFGVGAGGTVPPNPIGPGIFGTLMAITSAGKVSPEAALALSTPIAVAIQFLQTFAYTVRAGAPETAMKHLKNHNLKKFKFTLNATIWLFAFIGFTLGCLGALSMDTLLKLVDYIPPVLLTGLTVAGKMLPAIGFAMILSVMAKKELIPFVLLGYVCAAYLNIPTIGIAIVGTIFALIEFYNKPKTADHVVEEEAHDDWI

SEQ ID NO: 479 - DNA, 816 bp, Streptococcus pneumoniae
atgactggatctaacaaattaacaaaacgtgattatcttaaaacgtctttgcgggcattcttttgtcaaaatggatttaactatagtaactatcaagggttgggatatgccaatgtgatgtatcctgctttgaaaaaacactatggagaggatcaggaaggtttctaccaagccttggaagaaaactgtgaattctataataccaacccacacttcctgccttttattaccagcttgcatcttgtaatgttggaaaatggccgtccggcaaaagaaacacgtagcatcaagatggccttgatgggaccattggcaggtattggggattctctttctcaattctgtttagctccattgttctcaaccatcgcagcttcgtttgctcaagaaggcttggttgtcggtccaatcttgttcttccttgcgatgaatacgattttaacagcgattaaattgtcaactggtctgtatggatacaaactaggaacaactgtgattgataaactaagcgaacagatggcaacgatttctcgtattgccaatattatcggtgtaaccgtaattgctggtttggcagcgacatctgttaagattatggtgccgattacctttgctgcaggggaagttaaagcagacgctaaacaaagtatcgtaagtattcagggaatgcttgataaggttgctccagctcttctaccagccctatttacacttttagtttactacttgatcaaagaaaagaaatggacaacatataaactcgttattttaacagttatcatcggaattatcggaagctggcttaagattatagct

SEQ ID NO: 480 - protein, 272 aa, Streptococcus pneumoniae
  PTS system, IID component; Cellular location: membrane; Similar to strain R6 sequence 15902339 (e-153)
MTGSNKLTKRDYLKTSLRAFFCQNGFNYSNYQGLGYANVMYPALKKHYGEDQEGFYQALEENCEFYNTNPHFLPFITSLHLVMLENGRPAKETRSIKMALMGPLAGIGDSLSQFCLAPLFSTIAASFAQEGLVVGPILFFLAMNTILTAIKLSTGLYGYKLGTTVIDKLSEQMATISRIANIIGVTVIAGLAATSVKIMVPITFAAGEVKADAKQSIVSIQGMLDKVAPALLPALFTLLVYYLIKEKKWTTYKLVILTVIIGIIGSWLKIIA

SEQ ID NO: 481 - DNA, 291 bp, Streptococcus pneumoniae
atggatacaacattgttttatggaatagtgattgtcttggcagtgagtccccttttactgtcaagctttcattctattcgtcagcaaaagttgcttcgcaaacagatggagcaacgacaagagtatttagcttctttaacatttggtgatgaagtgttgttattgtctggaattcatggaaaaatcatttctatccaagatgacttggtctccttgcagattgcaaaaggtgtggtcatccatgtagaaaaggaaagtgtaatgggaaagacaaaagaactgctttttaag

SEQ ID NO: 482 - protein, 97 aa, Streptococcus pneumoniae
  preprotein translocase, YajC subunit (yajC); Cellular location: outside; Similar to strain R6 sequence 15902340 (3.E-47)
MDTTLFYGIVIVLAVSPLLLSSFHSIRQQKLLRKQMEQRQEYLASLTFGDEVLLLSGIHGKIISIQDDLVSLQIAKGVVIHVEKESVMGKTKELLFK

SEQ ID NO: 483 - DNA, 1638 bp, Streptococcus pneumoniae
atgaaagaagaaagaagacaattttttgaaagagtcgatggaaatcaatgtcgtgattatatcttgtcgcactgttcaaaagactatgagaaagtcaagagttcccttgaacgcttgatggacaatcgttttatgtttgatagtccttgggatatggagccttgttcaaaaatccatcaaatccagccgatggtatgggatcaagtatttgaagatgatccagaatggtcttatatgctcaatcgacaagaatatctcttgcagtttatgatagggtatctggtagaaggagataaggactatattcaaaagtgcaagttctttctatttgattggattgagcaggtgagagaattttctcctcaatccttgatgactagaaccttggatacgggtattcgttcctttacttggttgaaactactcttgctcctcttgaaatttgacttgctagaggagaaagaactagagaaaattttggtcagtctagaaaagcagattgactttatgaaaagctactatcgcgccaagtacacccttagtaactgggggattttacaaacaattccgatgcttgctatctatcatttcttttcagataagatggatctagaagaagcttaccattttgcttcagaggagttgaaacagcaaattgagacacagattttaggagatggaagccagtttgaacagtcgattctctatcatgtagaggtttataaagccttgctggatttgtgtctcttgcttccagacttgcaagatagttaccaagagttgctggaaaagatggcgacctatattcaaatgatgacaggcttagatggacggactttggcttttggtgatagcgattctacagaaacgacagaaattttgagcctgtctgctgtggttttgaaccaggaagaccttcttaacggtctggatgttaaagttgatttgcttagcctcttgttcctggggcgagaaaaggtcaagcgactgcaggaatttgaaaagagagcttggcagcctaagtccatgatctttgaagactctggacatgtctgcattaaggatgaacatcgttatctatttttcaaaaatggtccgctaggaagtgcccatagtcatagtgacgagaatagtttttgcttacagtatcaaggccaacctattttcatagatgctgggcgttattcttatcgggagatatatgaacgttatctcttaaagagtgcttggagtcattcgacctgcattgtagatgggaaagctccggaaagaatcacgggatcctgggaatatgaatactatcctcactccctgttttgtcaccataaagaaagggagggagtgcattatattgagggggcttattggtcagcagaacctgatttgccttatcttcacaggagaaaaatcctcatgttggtagaggatgtctggctcttggtagatgacatcaggtgtcaaggtcaacatgaggtgttgactcagtttatccttgacaaggatgtgacctatcaagatgggaaaatcaatcagttgagactatggagtgaagttgattttgatttggaagataccatcatttctcctaaatccccaattattcaccccaaatctaaaaaccatccagaatccttgcct

SEQ ID NO: 484 - protein, 546 aa, Streptococcus pneumoniae
  hypothetical protein, interruption; Cellular location: cytoplasm; Similar to strain R6 sequence 15902341 (0.E+01)
MKEERRQFFERVDGNQCRDYILSHCSKDYEKVKSSLERLMDNRFMFDSPWDMEPCSKIHQIQPMVWDQVFEDDPEWSYMLNRQEYLLQFMIGYLVEGDKDYIQKCKFFLFDWIEQVREFSPQSLMTRTLDTGIRSFTWLKLLLLLLKFDLLEEKELEKILVSLEKQIDFMKSYYRAKYTLSNWGILQTIPMLAIYHFFSDKMDLEEAYHFASEELKQQIETQILGDGSQFEQSILYHVEVYKALLDLCLLLPDLQDSYQELLEKMATYIQMMTGLDGRTLAFGDSDSTETTEILSLSAVVLNQEDLLNGLDVKVDLLSLLFLGREKVKRLQEFEKRAWQPKSMIFEDSGHVCIKDEHRYLFFKNGPLGSAHSHSDENSFCLQYQGQPIFIDAGRYSYREIYERYLLKSAWSHSTCIVDGKAPERITGSWEYEYYPHSLFCHHKEREGVHYIEGAYWSAEPDLPYLHRRKILMLVEDVWLLVDDIRCQGQHEVLTQFILDKDVTYQDGKINQLRLWSEVDFDLEDTIISPKSPIIHPKSKNHPESLP

SEQ ID NO: 485 - DNA, 1344 bp, Streptococcus pneumoniae
atgaacagtttaccaaatcatcacttccaaaacaagtctttttaccaactatctttcgatggaggtcatttaacccagtatggtggtcttatcttttttcaggaacttttttcccagttgaaactaaaagagcggatttctaagtatttagtaacgaatgaccaacgccgctactgtcgttattcggattcagatatccttgtccagttcctctttcaactgttaacaggttatggaacggactatgcttgtaaagaattgtcagctgatgcctactttccaaaattattggaaggagggcagcttgcttcacagccaaccttatcccgttttctttccagaactgacgaggaaacagtccatagtttgcgatgcctcaaccttgaattggtcgaattctttttacagtttcaccagctaaaccaactcattgtagatatcgattctacccatttcacaacttatggcaagcaagaaggtgttgcttataacgcccactatcgtgctcatggctatcatcctctttatgctttcgaggggaagacaggttattgtttcaatgcccagcttcgtcctggtaatcgttattgttctgaagaggcagacagctttatcacacctgttttagaacggtttaatcaacttctctttcgaatggatagtggctttgcgaccccaaaattatacgatttaattgaaaaaacagggcaatactacctcataaaactcaagaaaaatactgttctgagccgtcttggagacctttccctcccttgcccacaggatgaggacttaaccatcttgccccactccgcctactcagaaactctctatcaagcaggatcttggtcgcacaagcgtcgtgtctgccagttctctgaacgaaaagaaggaaacttgttctacgatgttatttctctcgttacaaatatgacgagtggaacaagccaagaccagtttcagctttatcgtggacgtggtcaagccgagaatttcatcaaggagatgaaggagggattttttggcgataaaacggatagttcaaccttaatcaaaaacgaagttcgtatgatgatgagctgtatcgcctacaatctctatctttttctcaaacatctagctggaggtgacttccaaactttaacaatcaaacgcttccgccatctttttcttcacgtggtaggaaaatgtgttcgaacaggacgcaagcagctcctcaaattgtctagtctctatgcctattccgaattgttttcagcactttattctaggattagaaaagtcaacctgaatcttcctgttccttatgaaccacctagaagaaaagcgtcgttaatgatgcat

SEQ ID NO: 486 - protein, 448 aa, Streptococcus pneumoniae
  IS1380-Spn1, transposase; Cellular location: cytoplasm; Similar to strain R6 sequence 15904024 (e-149)
MNSLPNHHFQNKSFYQLSFDGGHLTQYGGLIFFQELFSQLKLKERISKYLVTNDQRRYCRYSDSDILVQFLFQLLTGYGTDYACKELSADAYFPKLLEGGQLASQPTLSRFLSRTDEETVHSLRCLNLELVEFFLQFHQLNQLIVDIDSTHFTTYGKQEGVAYNAHYRAHGYHPLYAFEGKTGYCFNAQLRPGNRYCSEEADSFITPVLERFNQLLFRMDSGFATPKLYDLIEKTGQYYLIKLKKNTVLSRLGDLSLPCPQDEDLTILPHSAYSETLYQAGSWSHKRRVCQFSERKEGNLFYDVISLVTNMTSGTSQDQFQLYRGRGQAENFIKEMKEGFFGDKTDSSTLIKNEVRMMMSCIAYNLYLFLKHLAGGDFQTLTIKRFRHLFLHVVGKCVRTGRKQLLKLSSLYAYSELFSALYSRIRKVNLNLPVPYEPPRRKASLMMH

SEQ ID NO: 487 - DNA, 327 bp, Streptococcus pneumoniae
atgaatgatttgggtaaatacaatgagcttgaaagaagtagcaaactcaccaagcgccaattctttgagaatcagatgctggattataccatcattgcgcatgagagttttgaaatcatccgtcattctgtctaccagacagatgatcgtgaagtggaaaatgctctggcttttgaagtgaaaaatgatgaaacagacaagctgattctgttattaagcgaggatattggtgtaggtgaaaaattgtgcctcgttgacggaacaaaaatgcgtggaaaatgtttagtatatgataaaataaatgagagaatgattcgcttgcagtgc

SEQ ID NO: 488 - protein, 109 aa, Streptococcus pneumoniae
  hypothetical protein, interruption; Cellular location: cytoplasm; Similar to strain R6 sequence 15902341 (2.E-55)
MNDLGKYNELERSSKLTKRQFFENQMLDYTIIAHESFEIIRHSVYQTDDREVENALAFEVKNDETDKLILLLSEDIGVGEKLCLVDGTKMRGKCLVYDKINERMIRLQC

SEQ ID NO: 489 - DNA, 1065 bp, Streptococcus pneumoniae
gtgctagaaataggcattttgaatagtgaatatgttataataagtattagtaggaggtgttttagattggagaagaaactgaccataaaagacattgcggaaatggctcagacctcgaaaacaaccgtgtcattttacctaaacgggaaatatgaaaaaatgtcccaagagacacgtgaaaagattgaaaaagttattcatgaaacaaattacaaaccgagcattgttgcgcgtagcttaaactccaaacgaacaaaattaatcggtgttttgattggtgatattaccaacagtttctcaaaccaaattgttaagggaattgaggatatcgccagccagaatggctaccaggtaatgataggaaatagtaattacagccaagagagtgaggaccggtatattgaaagcatgcttctcttgggagtagacggctttattattcagccgacctctaatttccgaaaatattctcgtatcatcgatgagaaaaagaagaaaatggtcttttttgatagtcagctctatgaacaccggactagctgggttaaaaccaataactatgatgccgtttatgacatgacccagtcctgtatcgaaaaaggttatgaacattttctcttgattacagcggatacgagtcgtttgagtactcggattgagcgggcaagtggttttgtggatgctttaacagatgctaatatgcgtcacgccagtctaaccattgaagataagcatacgaatttggaacaaattaaggaatttttacaaaaagaaatcgatcccgatgaaaaaactctggtatttatccctaactgttgggccctacctctagtctttaccgttatcaaagagttgaattataacttgccacaagttgggttgattggttttgacaatacggagtggacttgcttttcttctccaagtgtttcgacgctggttcagccctcctttgaggaaggacaacaggctacaaagattttgattgaccagattgaaggtcgcaatcaagaagaaaggcaacaagtcttggattgtagtgtgaattggaaagagtcgactttc

SEQ ID NO: 490 - protein, 355 aa, Streptococcus pneumoniae
  sugar binding transcriptional regulator RegR (regR); Cellular location: membrane; Similar to strain R6 sequence 15902342 (0.E+01)
MLEIGILNSEYVIISISRRCFRLEKKLTIKDIAEMAQTSKTTVSFYLNGKYEKMSQETREKIEKVIHETNYKPSIVARSLNSKRTKLIGVLIGDITNSFSNQIVKGIEDIASQNGYQVMIGNSNYSQESEDRYIESMLLLGVDGFIIQPTSNFRKYSRIIDEKKKKMVFFDSQLYEHRTSWVKTNNYDAVYDMTQSCIEKGYEHFLLITADTSRLSTRIERASGFVDALTDANMRHASLTIEDKHTNLEQIKEFLQKEIDPDEKTLVFIPNCWALPLVFTVIKELNYNLPQVGLIGFDNTEWTCFSSPSVSTLVQPSFEEGQQATKILIDQIEGRNQEERQQVLDCSVNWKESTF

SEQ ID NO: 491 - DNA, 372 bp, Streptococcus pneumoniae
ttgcaagagctaaaaaagaccaggattaggaggtgccttatgaaatcactagctagactactgatcattcatgtttttatcagtattttccttttcttcgcccttacttcaggagctatttctcatacagttttactactcctactcctctttcttcctgcgctcaataaaggacttgagaaaatacaatcaaaacggatacctgtcctcaacgcagccctcttctttctcctcatatcctttccacaacttttaaccaaccctgtccaatggaaattttcaatattcctagtcgtaaccatcatttcaagtttggcctacttctataacttttatcaagtagttaaagaagtagatcaaaaacagttgatt

SEQ ID NO: 492 - protein, 124 aa, Streptococcus pneumoniae
  hypothetical protein
MQELKKTRIRRCLMKSLARLLIIHVFISIFLFFALTSGAISHTVLLLLLLFLPALNKGLEKIQSKRIPVLNAALFFLLISFPQLLTNPVQWKFSIFLVVTIISSLAYFYNFYQVVKEVDQKQLI

SEQ ID NO: 493 - DNA, 261 bp, Streptococcus pneumoniae
atgaggattaggaggaaactcatgaaaaaagaaaagaaacagttacgttatcctggtctgaaagcaggttcgatttatggaacagtgatattttttataattccactcattgataccctaacaagtgaaaatccaaattttatcagttctcttctaaatacaaaacatatttttaaaactatactgggagctttctttttcggagtgatgatacatattgtcgactcacttcgtattgcaagagctaaaaaagaccaggat

SEQ ID NO: 494 - protein, 87 aa, Streptococcus pneumoniae
  hypothetical protein, FRAMESHIFT
MRIRRKLMKKEKKQLRYPGLKAGSIYGTVIFFIIPLIDTLTSENPNFISSLLNTKHIFKTILGAFFFGVMIHIVDSLRIARAKKDQD

SEQ ID NO: 495 - DNA, 540 bp, Streptococcus pneumoniae
atgaaaaaagaaaccttcactgaaaaactgatcaaacgcacatacggtatttctggtccccttgacgaatacaaacggcgtgaggccgatagtattgggaaccaagtctttatcatcctcttttatctgatgattttcggaaatcttattccactccttctggcctataaataccctcaagaagtggctctaatctatcctcctctgattttagtgattgccctcatcgcttctggctatgtcacctaccaaatgaaaaaaacaggcatcacagtcattgaaccagatatgctgaatgagaaagaaagcaagcaactacactacccaggtctgaaagcaggtttgttctttggtctatggatgttttttataactcctcttctcaggatactcatagatgaaggtcaggactattttcattctcttctcactataagaaatggtgtatcaagtattctcggttctattttcttcggagcgagcatacagttcctcatctcccgtcgcattgcaaaaactaagaaaaatcaagatgaggat

SEQ ID NO: 496 - protein, 180 aa, Streptococcus pneumoniae
  hypothetical protein; Cellular location: membrane; Similar to strain R6 sequence 15902344 (8.E-16)
MKKETFTEKLIKRTYGISGPLDEYKRREADSIGNQVFIILFYLMIFGNLIPLLLAYKYPQEVALIYPPLILVIALIASGYVTYQMKKTGITVIEPDMLNEKESKQLHYPGLKAGLFFGLWMFFITPLLRILIDEGQDYFHSLLTIRNGVSSILGSIFFGASIQFLISRRIAKTKKNQDED

SEQ ID NO: 497 - DNA, 192 bp, Streptococcus pneumoniae
atgaatcgtgtgaaagaatttcgcaaggaattgggtatttcccagctcgaactcgccaaggatatcggtgtctcgagacagactatcaatatgattgaaaacgacaagtacaatccaaccttggaactctgtctcaatctcgcccgcagcctccaaactgacctcaacagtctcttttgggaggaagatttt

SEQ ID NO: 498 - protein, 64 aa, Streptococcus pneumoniae
  transcriptional regulator, putative; Cellular location: cytoplasm; Similar to strain R6 sequence 15902345 (7.E-33)
MNRVKEFRKELGISQLELAKDIGVSRQTINMIENDKYNPTLELCLNLARSLQTDLNSLFWEEDF

SEQ ID NO: 499 - DNA, 948 bp, Streptococcus pneumoniae
atgacaaaagaatttcatcatgtaacggtcttactccacgaaacgattgatatgcttgacgtaaagcctgatggtatctacgttgatgcgactttgggcggagcaggacatagcgagtatttattaagtaaattaagtgaaaaaggccatctctatgcctttgaccaggatcagaatgccattgacaatgcgcaaaaacgcttggcaccttacattgagaagggaatggtgacctttatcaaggacaacttccgtcatttacaggcatgtttgcgcgaagctggtgttcaggaaattgatggaatttgttatgacttgggagtgtctagtcctcaattagaccagcgtgagcgtggtttttcttataaaaaggatgcgccactggacatgcggatgaatcaggatgctagcctgacagcctatgaagtggtgaacaattatgactatcatgacttggttcgtattttcttcaagtatggagaggacaaattctctaaacagattgcgcgtaagattgagcaagcgcgtgaagtgaagccgattgagacaacgactgagttagcagagattatcaagttggtcaaacctgccaaggaactcaagaagaaggggcatcctgctaagcagattttccaggctattcgaattgaagtcaatgatgaactgggagcggcagatgagtccatccagcaggctatggatatgttggctctggatggtagaatttcagtgattacctttcattccttagaagaccgcttgaccaagcaattgttcaaggaagcttcaacagttgaagttccaaaaggcttgcctttcatcccagatgatctcaagcccaagatggaattggtgtcccgtaagccaatcttgccaagtgcggaagagttagaagccaataaccgctcgcactcagccaagttgcgcgtggtcagaaaaattcacaag

SEQ ID NO: 500 - protein, 316 aa, Streptococcus pneumoniae
  yllC protein (yllC); Cellular location: cytoplasm; Similar to strain R6 sequence 15902346 (e-178)
MTKEFHHVTVLLHETIDMLDVKPDGIYVDATLGGAGHSEYLLSKLSEKGHLYAFDQDQNAIDNAQKRLAPYIEKGMVTFIKDNFRHLQACLREAGVQEIDGICYDLGVSSPQLDQRERGFSYKKDAPLDMRMNQDASLTAYEVVNNYDYHDLVRIFFKYGEDKFSKQIARKIEQAREVKPIETTTELAEIIKLVKPAKELKKKGHPAKQIFQAIRIEVNDELGAADESIQQAMDMLALDGRISVITFHSLEDRLTKQLFKEASTVEVPKGLPFIPDDLKPKMELVSRKPILPSAEELEANNRSHSAKLRVVRKIHK

SEQ ID NO: 501 - DNA, 315 bp, Streptococcus pneumoniae
atggcagaaaaaatggaaaaaacaggtcaaatactacagatgcaacttaaacggttttcgcgtgtggaaaaagctttttacttttccattgctgtaaccactcttattgtagccattagtattatttttatgcagaccaagctcttgcaagtgcagaatgatttgacaaaaatcaatgcgcagatagaggaaaagaagaccgaattggacgatgccaagcaagaggtcaatgaactattacgtgcagaacgtttgaaagaaattgccaattcacacgatttgcaattaaacaatgaaaatattagaatagcggag

SEQ ID NO: 502 - protein, 105 aa, Streptococcus pneumoniae
  cell division protein FtsL (ftsL); Cellular location: membrane; Similar to strain R6 sequence 15902347 (3.E-53)
MAEKMEKTGQILQMQLKRFSRVEKAFYFSIAVTTLIVAISIIFMQTKLLQVQNDLTKINAQIEEKKTELDDAKQEVNELLRAERLKEIANSHDLQLNNENIRIAE

SEQ ID NO: 503 - DNA, 2250 bp, Streptococcus pneumoniae
atgaagtggacaaaaagagtaatccgttatgcgaccaaaaatcggaaatcgccggctgaaaacagacgcagagttggaaaaagtctgagtttattatctgtctttgtttttgccatttttttagtcaattttgcggtcattattgggacaggcactcgctttggaacagatttagcgaaggaagctaagaaggttcatcaaaccacccgtacagttcctgccaaacgtgggactatttatgaccgaaatggagtcccgattgctgaggatgcaacctcctataatgtctatgcggtcattgatgagaactataagtcagcaacgggtaagattctttacgtagaaaaaacacaatttaacaaggttgcagaggtctttcataagtatctggacatggaagaatcctatgtaagagagcaactctcgcaacctaatctcaagcaagtttcctttggagcaaagggaaatgggattacctatgccaatatgatgtctatcaaaaaagaattggaagctgcagaggtcaaggggattgattttacaaccagtcccaatcgtagttacccaaacggacaatttgcttctagttttatcggtctagctcagctccatgaaaatgaagatggaagcaagagcttgctgggaacctctggaatggagagttccttgaacagtattcttgcagggacagacggcattattacctatgaaaaggatcgtctgggtaatattgtacccggaacagaacaagtttcccaacgaacgatggacggtaaggatgtttatacaaccatttccagccccctccagtcctttatggaaacccagatggatgcttttcaagagaaggtaaaaggaaagtacatgacagcgactttggtcagtgctaaaacaggggaaattctggcaacaacgcaacgaccgacctttgatgcagatacaaaagaaggcattacagaggactttgtttggcgtgatatcctttaccaaagtaactatgagccaggttccactatgaaagtgatgatgttggctgctgctattgataataatacctttccaggaggagaagtctttaatagtagtgagttaaaaattgcagatgccacgattcgagattgggacgttaatgaaggattgactggtggcagaacgatgactttttctcaaggttttgcacactcaagtaacgttgggatgaccctccttgagcaaaagatgggagatgctacctggcttgattatcttaatcgttttaaatttggagttccgacccgtttcggtttgacggatgagtatgctggtcagcttcctgcggataatattgtcaacattgcgcaaagctcatttggacaagggatttcagtgacccagacgcaaatgattcgtgcctttacagctattgctaatgacggtgtcatgctggagcctaaatttattagtgccatttatgatccaaatgatcaaactgctcggaaatctcaaaaagaaattgtgggaaatcctgtttctaaagatgcagctagtctaactcggactaacatggttttggtagggacggatccggtttatggaaccatgtataaccacagcacaggcaagccaactgtaactgttcctgggcaaaatgtagccctcaagtctggtacggctcagattgctgacgagaaaaatggtggttatctagtcgggttaaccgactatattttctcggctgtatcgatgagtccggctgaaaatcctgattttatcttgtatgtgacggtccaacaacctgaacattattcaggtattcagttgggagaatttgccaatcctatcttggagcgggcttcagctatgaaagactctctcaatcttcaaacaacagctaaggctttagagcaagtaagtcaacaaagtccttatcctatgcctagtgtcaaggatatttcacctggtgatttagcagaagaattgcgtcgcaatcttgtacaacccatcgttgtgggaacaggaacgaagattaaaaacagttctgctgaagaagggaagaatcttgccccgaaccagcaagtccttatcttatctgataaagcagaggaggttccagatatgtatggttggacaaaggagactgctgagacccttgctaagtggctcaatatagaacttgaatttcaaggttcgggctctactgtgcagaagcaagatgttcgtgctaacacagctatcaaggacattaaaaaaattacattaactttaggagac

SEQ ID NO: 504 - protein, 750 aa, Streptococcus pneumoniae
  penicillin-binding protein 2X (pbpX); Cellular location: outside; Similar to strain R6 sequence 15902348 (0.E+01)
MKWTKRVIRYATKNRKSPAENRRRVGKSLSLLSVFVFAIFLVNFAVIIGTGTRFGTDLAKEAKKVHQTTRTVPAKRGTIYDRNGVPIAEDATSYNVYAVIDENYKSATGKILYVEKTQFNKVAEVFHKYLDMEESYVREQLSQPNLKQVSFGAKGNGITYANMMSIKKELEAAEVKGIDFTTSPNRSYPNGQFASSFIGLAQLHENEDGSKSLLGTSGMESSLNSILAGTDGIITYEKDRLGNIVPGTEQVSQRTMDGKDVYTTISSPLQSFMETQMDAFQEKVKGKYMTATLVSAKTGEILATTQRPTFDADTKEGITEDFVWRDILYQSNYEPGSTMKVMMLAAAIDNNTFPGGEVFNSSELKIADATIRDWDVNEGLTGGRTMTFSQGFAHSSNVGMTLLEQKMGDATWLDYLNRFKFGVPTRFGLTDEYAGQLPADNIVNIAQSSFGQGISVTQTQMIRAFTAIANDGVMLEPKFISAIYDPNDQTARKSQKEIVGNPVSKDAASLTRTNMVLVGTDPVYGTMYNHSTGKPTVTVPGQNVALKSGTAQIADEKNGGYLVGLTDYIFSAVSMSPAENPDFILYVTVQQPEHYSGIQLGEFANPILERASAMKDSLNLQTTAKALEQVSQQSPYPMPSVKDISPGDLAEELRRNLVQPIVVGTGTKIKNSSAEEGKNLAPNQQVLILSDKAEEVPDMYGWTKETAETLAKWLNIELEFQGSGSTVQKQDVRANTAIKDIKKITLTLGD

SEQ ID NO: 505 - DNA, 978 bp, Streptococcus pneumoniae
atgtttatttccatcagtgctggaattgtgacatttttactaactttagtagaaattccggcctttatccaattttatagaaaggcgcaaattacaggccagcagatgcatgaggatgtcaaacagcatcaggcaaaagctgggactcctacaatgggaggtttggttttcttgattacttctgttttggttgctttctttttcgccctatttagtagccaattcagcaataatgtgggaatgattttgttcatcttggtcttgtatggcttggtcggatttttagatgactttctcaaggtctttcgtaaaatcaatgaggggcttaatcctaagcaaaaattagctcttcagcttctaggtggagttatcttctatcttttctatgagcgcggtggcgatatcctgtctgtctttggttatccagttcatttgggatttttctatattttcttcgctcttttctggctagtcggtttttcaaacgcagtaaacttgacagacggtgttgacggtttagctagtatttccgttgtgattagtttgtctgcctatggagttattgcctatgtgcaaggtcagatggatattcttctagtgattcttgccatgattggtggtttgctcggtttcttcatctttaaccataagcctgccaaggtctttatgggtgatgtgggaagtttggccctaggtgggatgctggcagctatctctatggctctccaccaagaatggactctcttgattatcggaattgtgtatgtttttgaaacaacttctgttatgatgcaagtcagttatttcaaactgacaggtggtaaacgtattttccgtatgacgcctgtacatcaccattttgagcttgggggattgtctggtaaaggaaatccttggagcgagtggaaggttgacttcttcttttggggagtgggacttctagcaagtctcctgaccctagcaattttatatttgatg

SEQ ID NO: 506 - protein, 326 aa, Streptococcus pneumoniae
  phospho-N-acetylmuramoyl-pentapeptide-transferase (mraY); Cellular location: membrane; Similar to strain R6 sequence 15902349 (0.E+01)
MFISISAGIVTFLLTLVEIPAFIQFYRKAQITGQQMHEDVKQHQAKAGTPTMGGLVFLITSVLVAFFFALFSSQFSNNVGMILFILVLYGLVGFLDDFLKVFRKINEGLNPKQKLALQLLGGVIFYLFYERGGDILSVFGYPVHLGFFYIFFALFWLVGFSNAVNLTDGVDGLASISVVISLSAYGVIAYVQGQMDILLVILAMIGGLLGFFIFNHKPAKVFMGDVGSLALGGMLAAISMALHQEWTLLIIGIVYVFETTSVMMQVSYFKLTGGKRIFRMTPVHHHFELGGLSGKGNPWSEWKVDFFFWGVGLLASLLTLAILYLM

SEQ ID NO: 507 - DNA, 186 bp, Streptococcus pneumoniae
ttgttagaaatcgatttgactgtcctgattgatttgtcctgttcttatttcgttttaatatacagttttgagatggttgatagaactgacgaagtcagctcaaaacacggttttgaggttgtagataaggagaagctgatgtggtttgaagaggttttcgaagagtgtaaaaaaatattggtcagt

SEQ ID NO: 508 - protein, 62 aa, Streptococcus pneumoniae
  box element
MLEIDLTVLIDLSCSYFVLIYSFEMVDRTDEVSSKHGFEVVDKEKLMWFEEVFEECKKILVS

SEQ ID NO: 509 - DNA, 2103 bp, Streptococcus pneumoniae
atgaataacaactttaataattttaataacatggatgatttatttaaccaattgatgggtggtatgcgaggatacagttctgaaaatcgccgttacttaattaatggacgcgaagtcacacctgaggaatttgctcactatcgtgcgactggtcaattaccaggaaatgcagaaactgatgtgcaaatgccacaacaggcatcaggtatgaaacaaggcggtgtccttgcaaaactaggtcgaaacttaacagcagaagcgcgtgagggcaagttggatcctgttatcggacgaaacaaggaaattcaagaaacatctgaaatcctctcacgccgcaccaagaacaatcctgttttggtcggagatgcaggtgttggtaagacagcagttgtcgaaggtctagcgcaagccattgtgaacggagatgttcctgctgctatcaagaacaaggaaattatttctattgatatctcaggtcttgaggctggtactcaataccgtggtagctttgaagaaaatgtccaaaacttagtcaatgaagtgaaagaagcagggaatattatcctcttctttgatgaaattcaccaaattcttggtgctggtagcactggtggagacagtggttctaaaggacttgcggatattctcaagccagctctctctcgtggagaattgacagtgattggggcaacaactcaagacgaataccgtaacaccatcttgaagaatgctgctcttgctcgtcgtttcaacgaagtgaaggtcaatgctccttcggcagagaatacttttaaaattcttcaaggaattcgtgacctctatcaacaacaccacaatgtcatcttgccagacgaagtcttgaaagcagcggtggattattctgttcaatacattcctcaacgtagcttgccagataaggctattgaccttgtcgatgtaacggctgctcacttggcggctcaacatccagtaacagatgtgcatgctgttgaacgagaaatcgaaacggaaaaagacaagcaagaaaaagcagttgaagcagaagattttgaagcagctctaaactataaaacacgcattgcagaattggaaaggaaaatcgaaaaccacacagaagatatgaaagtgactgcaagtgtcaacgatgtggctgaatctgtggaacgaatgacaggtatcccagtatcgcaaatggaagcttcagatatcgaacgtttgaaagatatggctcatcgcttgcaagacaaggtgattggtcaagataaggccgtagaagttgtagctcgtgctatccgtcgtaaccgtgctggttttgatgaaggaaatcgcccaatcggcaacttcctctttgtagggtctactggggttggtaagacggagcttgctaagcaattggcactcgatatgtttggaacccaggatgcgattatccgtttagatatgtctgaatacagtgaccgcacagctgtttctaagctaattggtacaacagcaggctatgtgggttatgatgacaatagcaataccttaacagaacgtgttcgtcgcaatccatactctatcattctcttggatgaaattgaaaaggctgaccctcaagttattacccttctcctccaagttctagatgatggtcgtttgacagatggtcaaggaaatacagtaaacttcaagaacactgtcattattgcgacctcaaatgctggatttggctatgaagccaacttgacagaagatgcggataaaccagaattgatggaccgtttgaaacccttcttccgtccagaattcctcaaccgctttaatgcagtcatcgagttctcacacttgactaaggaagacctttctaagattgtagatttgatgttggctgaagttaaccaaaccttggctaagaaagacattgacttggtagtcagtcaagcggctaaagattatatcacagaagaaggttacgacgaagtcatgggggttcgtcctctccgtcgcgtggttgaacaagaaattcgtgataaggtgacagacttccacttggatcatttagatgctaaacatctggaagcagatatggaagatggcgttttggttattcgtgagaaagtc

SEQ ID NO: 510 - protein, 701 aa, Streptococcus pneumoniae
  ATP-dependent Clp protease, ATP-binding subunit, putative; Cellular location: cytoplasm; Similar to strain R6 sequence 15902351 (0.E+01)
MNNNFNNFNNMDDLFNQLMGGMRGYSSENRRYLINGREVTPEEFAHYRATGQLPGNAETDVQMPQQASGMKQGGVLAKLGRNLTAEAREGKLDPVIGRNKEIQETSEILSRRTKNNPVLVGDAGVGKTAVVEGLAQAIVNGDVPAAIKNKEIISIDISGLEAGTQYRGSFEENVQNLVNEVKEAGNIILFFDEIHQILGAGSTGGDSGSKGLADILKPALSRGELTVIGATTQDEYRNTILKNAALARRFNEVKVNAPSAENTFKILQGIRDLYQQHHNVILPDEVLKAAVDYSVQYIPQRSLPDKAIDLVDVTAAHLAAQHPVTDVHAVEREIETEKDKQEKAVEAEDFEAALNYKTRIAELERKIENHTEDMKVTASVNDVAESVERMTGIPVSQMEASDIERLKDMAHRLQDKVIGQDKAVEVVARAIRRNRAGFDEGNRPIGNFLFVGSTGVGKTELAKQLALDMFGTQDAIIRLDMSEYSDRTAVSKLIGTTAGYVGYDDNSNTLTERVRRNPYSIILLDEIEKADPQVITLLLQVLDDGRLTDGQGNTVNFKNTVIIATSNAGFGYEANLTEDADKPELMDRLKPFFRPEFLNRFNAVIEFSHLTKEDLSKIVDLMLAEVNQTLAKKDIDLVVSQAAKDYITEEGYDEVMGVRPLRRVVEQEIRDKVTDFHLDHLDAKHLEADMEDGVLVIREKV

SEQ ID NO: 511 - DNA, 480 bp, Streptococcus pneumoniae
atgtcaaaagaagttattgtcgaaagttttgaacttgaccacaccattgtcaaagcaccctatgttcgcttgattggggaagaaacaggaccaaaaggagacatcatctccaattatgatattcgcttggtgcaaccaaacgaagactctatccctactgccggccttcacactatcgagcacctcttagccaaactcatccgtacccgcattgacggcatgattgactgttcaccatttggttgccgcacaggcttccacatgattatgtggggacgtcacaccagtgctaaaatcgcagctgttatcaaggattcgctcaaggaaatcgctgaaactactacttgggaagatgtcccagggacaaccatcgaatcttgcggaaactacaaggaccacagcctcttctctgctaaagaatgggcaaaactcatcttggaacaagggatttcagatgatgcctttgaacgtcatgtgatt

SEQ ID NO: 512 - protein, 160 aa, Streptococcus pneumoniae
  autoinducer-2 production protein (luxS); Cellular location: cytoplasm; Similar to strain R6 sequence 15902352 (1.E-91)
MSKEVIVESFELDHTIVKAPYVRLIGEETGPKGDIISNYDIRLVQPNEDSIPTAGLHTIEHLLAKLIRTRIDGMIDCSPFGCRTGFHMIMWGRHTSAKIAAVIKDSLKEIAETTTWEDVPGTTIESCGNYKDHSLFSAKEWAKLILEQGISDDAFERHVI

SEQ ID NO: 513 - DNA, 1482 bp, Streptococcus pneumoniae
atgaaaaaacaagcttttagttctgaacaatatttgaatttacaacgcgaccatattttggagcgcattaaccaatttgacggcaagctctacttagagtttggcggtaaaatgttagaagatttccacgctgctcgtgtccttcctggttatgaacctgacaacaaaatcaagctcttgcaagaattgaaagagcaggttgaggttgtgattgccattaatgctagcaacattgaacattccaaagcacgtggcgacttaggcatttcttatgaccaagaagttcttcgtttgattgataaattcaatgaattagggatttttgttggttccgttgtcattacacaatacgctggccaacccgctgcagatgccttccgcaatcaacttgagaaaaacggaattgattcttatcttcattatccaatcaaaggatatccgacggatatggatcacatcatttccccagaaggcatgggcaaaaacgactacatcaaaaccagtcgcaacttgattgtcgtaaccgctcctggacctggttctggaaaattggcaacgtgtatgtccaatatgtaccacgaccaaatcaatggcatcaaatctggctacgctaaatttgaaaccttccctgtttggaatcttccccttcatcatccagttaacttggcttatgaagctgccacagctgaccttgatgatgtcaacatgattgaccccttccatcttcaaacctatggagaaaccactgtcaactacaaccgtgatatcgaaatcttcccagtgctcaaacgcatgttggaacgtattctcggaaaatcaccatacgcttcaccgacagatatgggtgtcaacatggttggtttcgctattacagatgacgaggccgctgtcgaagcttctaaacaagaaatcatccgccgttactatcaaacagttcttgacttcaaagctgaaaaagttggcgaagctgccgtcaagaaaattgagttgctcatgaacgacctcggtatcacacctgcagaccgtaaggttgctgtcgttgcgcgccaaaaagcagaagaaactggtggaccagccctagcctttgaattgccaaatggggaaatcatcactggtaagaactcagaactctttggtcctacagccgctgccttgatcaacgccatcaaaaaatcagctgacatcgctaaagaagtaaaactaatcgagcctgaagttgttaagccaatccaaggtcttaaaatcgatcatctcggtagccgcaatccacgccttcattcaaatgaaatcctgattgcacttgctatcacagctacagaaaatcctgatgctgcccgcgctatggaagaactcggcaacctcaaaggaagcgaagcccactcaaccatcatcttgactgatgaagacaagaatgtccttcgtaaactgggtatcaacgtaacctttgacccatactaccaatacgaccgcttatatcgtaag

SEQ ID NO: 514 - protein, 494 aa, Streptococcus pneumoniae
  hypothetical protein; Cellular location: cytoplasm; Feature of note: RGD motif; Similar to strain R6 sequence 15902353 (0.E+01)
MKKQAFSSEQYLNLQRDHILERINQFDGKLYLEFGGKMLEDFHAARVLPGYEPDNKIKLLQELKEQVEVVIAINASNIEHSKARGDLGISYDQEVLRLIDKFNELGIFVGSVVITQYAGQPAADAFRNQLEKNGIDSYLHYPIKGYPTDMDHIISPEGMGKNDYIKTSRNLIVVTAPGPGSGKLATCMSNMYHDQINGIKSGYAKFETFPVWNLPLHHPVNLAYEAATADLDDVNMIDPFHLQTYGETTVNYNRDIEIFPVLKRMLERILGKSPYASPTDMGVNMVGFAITDDEAAVEASKQEIIRRYYQTVLDFKAEKVGEAAVKKIELLMNDLGITPADRKVAVVARQKAEETGGPALAFELPNGEIITGKNSELFGPTAAALINAIKKSADIAKEVKLIEPEVVKPIQGLKIDHLGSRNPRLHSNEILIALAITATENPDAARAMEELGNLKGSEAHSTIILTDEDKNVLRKLGINVTFDPYYQYDRLYRK

SEQ ID NO: 515 - DNA, 1605 bp, Streptococcus pneumoniae
atgcaagaaaaatggtggcacaatgccgtagtctatcaagtctatccaaagagttttatggatagtaatggagatggagttggtgatttgccaggtattaccagtaagttggactatctagctaagctaggaatcacagcaatttggctttctcccgtttatgacagccctatggatgataatggctatgatattgctgattatcaagcgattgcggctatttttggaaccatggaggacatggatcagctgattgcagaagctaagaagcgtgacattcgtatcatcatggacttggtggtcaatcatacctcagatgaacatgcttggtttgtcgaagcctgtgaaaatactgacagccctgagcgagactactatatctggcgcgatgaacccaatgacctagattctatctttagtgggtctgcttgggaatacgatgaaaagtcaggtcaatactatctccactttttcagcaagaaacagccggatctcaactgggaaaatgaaaaacttcgccagaaaatttatgagatgatgaacttctggattgataaaggtattggtggtttccgtatggatgttattgacatgattggcaaaattcctgacgagaaggtagtcaataatggtcctatgctccatccctatctcaaggaaatgaatcaggcgacctttggagataaggatctcttgacagtaggggagacttggggagcaactccagagattgccaagttctactctgatccaaaggggcaagaattgtctatggtcttccagtttgaacatatcggtcttcagtatcaggaaggtcagcctaaatggcactatcaaaaagagctgaatatcgctaagttaaaagaaatcttcaacaaatggcagacagagttaggagttgaggacggctggaattccctcttctggaacaaccatgacctccctcgtattgtctcaatctggggaaatgaccaagaataccgcgaaaaatctgccaaagcctttgcaatcttacttcatctcatgagaggaactccttatatctaccaaggtgaggagattgggatgaccaactatccgtttgaaacactggatcaagtagaagatattgaatctctcaactatgcgcgtgaggctcttgaaaaaggtgttccgattgaagaaatcatggacagtatccgtgttattggacgtgacaatgcccgtacccctatgcaatgggacgagagcaaaaacgctggtttctcaacaggtcaaccttggttggcggttaatccaaattacgagatgatcaatgtccaagaagcgctggcaaatccagattctattttctatacctatcagaaactggtccaaattcgcaaggagaatagctggctagttcgagctgactttgaattgcttgatacggctgataaggtctttgcttatatacgtaaggatggcgaccgtcgcttcctagttgtggctaacttgtccaatgaagagcaagacttgacagtagaaggaaaagtcaaatctgtcttgattgaaaacactgcggctaaagaagtacttgaaaaacaggtcttggctccatgggatgctttctgtgtggaattacta

SEQ ID NO: 516 - protein, 535 aa, Streptococcus pneumoniae
  glucan 1,6-alpha-glucosidase (dexB); Cellular location: cytoplasm; Similar to strain R6 sequence 15902354 (0.E+01)
MQEKWWHNAVVYQVYPKSFMDSNGDGVGDLPGITSKLDYLAKLGITAIWLSPVYDSPMDDNGYDIADYQAIAAIFGTMEDMDQLIAEAKKRDIRIIMDLVVNHTSDEHAWFVEACENTDSPERDYYIWRDEPNDLDSIFSGSAWEYDEKSGQYYLHFFSKKQPDLNWENEKLRQKIYEMMNFWIDKGIGGFRMDVIDMIGKIPDEKVVNNGPMLHPYLKEMNQATFGDKDLLTVGETWGATPEIAKFYSDPKGQELSMVFQFEHIGLQYQEGQPKWHYQKELNIAKLKEIFNKWQTELGVEDGWNSLFWNNHDLPRIVSIWGNDQEYREKSAKAFAILLHLMRGTPYIYQGEEIGMTNYPFETLDQVEDIESLNYAREALEKGVPIEEIMDSIRVIGRDNARTPMQWDESKNAGFSTGQPWLAVNPNYEMINVQEALANPDSIFYTYQKLVQIRKENSWLVRADFELLDTADKVFAYIRKDGDRRFLVVANLSNEEQDLTVEGKVKSVLIENTAAKEVLEKQVLAPWDAFCVELL

SEQ ID NO: 517 - DNA, 1344 bp, Streptococcus pneumoniae
atgaacagtttaccaaatcatcacttccaaaacaagtctttttaccaactatctttcgatggaggtcatttaacccagtatggtggtcttatcttttttcaggaacttttttcccagttgaaactaaaagagcggatttctaagtatttagtaacgaatgaccaacgccgctactgtcgttattcggattcagatatccttgtccagttcctctttcaactgttaacaggttatggaacggactatgcttgtaaagaattgtcagctgatgcctactttccaaaattgttggaaggagggcagcttgcttcacagccaaccttatcccgttttctttccagaactgacgaggaaacagtccatagtttgcgatgcctcaaccttgaattggtcgaattctttttacagtttcaccagctaaaccaactcattgtagatatcgattctacccatttcacaacttatggcaagcaagaaggtgttgcttataacgcccactatcgtgctcatggctatcatcctctttatgctttcgaggggaagacaggttattgtttcaatgcccagcttcgtcctggtaatcgttattgttctgaagaggcagacagctttatcacacctgttttagaacggtttaatcaacttctctttcgaatggatagtggctttgcgaccccaaaattatacgatttaattgaaaaaacagggcaatactacctcataaaactcaagaaaaatactgttctgagccgtcttggagacctttccctcccttgcccacaggatgaggacttaaccatcttgccccactccgcctactcagaaactctctatcaagcaggatcttggtcgcacaagcgtcgtgtctgccagttctctgaacgaaaagaaggaaacttgttctacgatgttatttctctcgttacaaatatgacgagtggaacaagccaagaccagtttcagctttatcgtggacgtggtcaagccgagaatttcatcaaggagatgaaggagggattttttggcgataaaacggatagttcaaccttaatcaaaaacgaagttcgtatgatgatgagctgtatcgcctacaatctctatctttttctcaaacatctagctggaggtgacttccaaactttaacaatcaaacgcttccgccatctttttcttcacgtggtgggaaaatgtgttcgaacaggacgcaagcagctcctcaaattgtctagtctctatgcctattccgaattgttttcagcactttattctaggattagaaaagtcaacctgaatcttcctgttccttatgaaccacctagaagaaaagcgtcgttaatgatgcat

SEQ ID NO: 518 - protein, 448 aa, Streptococcus pneumoniae; identical to SEQ ID NO: 486
  IS1380-Spn1, transposase; Cellular location: cytoplasm; Similar to strain R6 sequence 15904024 (e-149)

SEQ ID NO: 519 - DNA, 336 bp, Streptococcus pneumoniae
ttggttgcaggtctaacaaatggtgagttaatcgctccaataacttacgaagagacgatgacgagcgacttttttgaagcttggtttcagaaatttctcttaccaacattaaacacaccatcggttattattatggataatgcaagattccatagaatgggtaagttagaactcttgtgtgaagagtttgggtataaacttttacctcttcctccctactcacctgagtacaatcctattgagaaaacatgggctcatatcaaaaagcacctcaaaaaggtattaccaagttgcaataccttttatgaggctcttttgtcttgttcttgtttcaat

SEQ ID NO: 520 - protein, 112 aa, Streptococcus pneumoniae
  IS630-Spn1, transposase Orf2; Cellular location: cytoplasm; Similar to strain R6 sequence 15903941 (2.E-46)
MVAGLTNGELIAPITYEETMTSDFFEAWFQKFLLPTLNTPSVIIMDNARFHRMGKLELLCEEFGYKLLPLPPYSPEYNPIEKTWAHIKKHLKKVLPSCNTFYEALLSCSCFN

SEQ ID NO: 521 - DNA, 345 bp, Streptococcus pneumoniae
atgtggtataatcttcttatggcatattcaatagattttcgtaaaaaagttctctcttattgtgagcgaacaggtagtataacagaagcatcacacgttttccaaatatcacgtaataccatttatggctggttaaagctaaaagagaaaacaggagagctaaaccaccaagtaaaaggaacaaaaccaagaaaagttgatagagatagacttaaaaactatcttactgacaatccagacgcttatttgactgaaatagcttctgaatttggctgtcatccaactaccatccactatgcgctcaaagctatgggctacactcgaaaaaaagaaccacacctacta

SEQ ID NO: 522 - protein, 115 aa, Streptococcus pneumoniae; identical to SEQ ID NO: 430
  IS630-Spn1, transposase Orf1 FRAMESHIFT; Cellular location: cytoplasm; Similar to strain R6 sequence 15902766 (6.E-66)

SEQ ID NO: 523 - DNA, 1443 bp, Streptococcus pneumoniae
atgagtagacgttttaaaaaatcacgttcacagaaagtgaagcgaagtgttaatatagttttgctgactatttatttattgttagtttgttttttattgttcttaatctttaagtacaatatccttgcttttagatatcttaatctagtggtaactgcgttagtcctactagttgccttggtagggctactcttgattatctataaaaaagctgaaaagtttactatttttctgttggtgttctctatccttgtcagctctgtgtcgctctttgcagtacagcagtttgttggactgaccaatcgtttaaatgcgacttctaattactcagaatattcaatcagtgtcgctgttttagcagatagtgagatcgaaaatgttacgcaactgacgagtgtgacagcaccgactgggactaataatgaaaatattcagaaattactagctgatatcaagtcaagtcagaataccgatttgacggtcaaccagagttcgtcttacttggcagcttacaagagtttgattgcaggggagactaaggccattgtcctaaatagtgtctttgaaaacatcatcgagtcagagtatccagactacgcatcgaagataaaaaagatttatactaagggattcactaaaaaagtagaagctcctaagacgtctaagagtcagtctttcaatatctatgttagtggaattgacacctatggtcctattagttcggtgtcgcgatcagatgtcaacatcctgatgactgtcaatcgagataccaagaaaatcctcttgaccacaacgccacgtgatgcctatgtaccaatcgcagatggtggaaataatcaaaaagataaattgactcatgcgggcatttatggagttgattcgtccattcacaccttagaaaatctctatggagtggatatcaattactatgtgcgattgaacttcacttcgtttttgaaattgattgatttgttgggtggaattgatgtttataatgatcaagaatttactgcccatacgaatggaaagtattaccctgcaggcaatgttcatcttgattcagaacaggctctcggttttgttcgtgagcgctactccctagcagatggcgatcgtgaccgcgggcgccatcaacaaaaggtgattgtggctatccttcaaaaattaacgtcaaccgaagtgctgaaaaattatagtacgatcattaatagcttgcaagattctatccaaacaaatatgccacttgagaccatgataaatttggtcaatgctcagttagaaagtggagggaattataaagtaaattctcaagatttaaaagggacaggtcggatggatcttccttcttatgcaatgccagacagtaacctctatgtgatggaaatagatgatagtagtttagctgtagttaaagcagctatacaggatgtgatggagggtaga

SEQ ID NO: 524 - protein, 481 aa, Streptococcus pneumoniae
  capsular polysaccharide biosynthesis protein Cps4A (cps4A); Cellular location: membrane; Similar to strain R6 sequence 15902358 (e-160)
MSRRFKKSRSQKVKRSVNIVLLTIYLLLVCFLLFLIFKYNILAFRYLNLVVTALVLLVALVGLLLIIYKKAEKFTIFLLVFSILVSSVSLFAVQQFVGLTNRLNATSNYSEYSISVAVLADSEIENVTQLTSVTAPTGTNNENIQKLLADIKSSQNTDLTVNQSSSYLAAYKSLIAGETKAIVLNSVFENIIESEYPDYASKIKKIYTKGFTKKVEAPKTSKSQSFNIYVSGIDTYGPISSVSRSDVNILMTVNRDTKKILLTTTPRDAYVPIADGGNNQKDKLTHAGIYGVDSSIHTLENLYGVDINYYVRLNFTSFLKLIDLLGGIDVYNDQEFTAHTNGKYYPAGNVHLDSEQALGFVRERYSLADGDRDRGRHQQKVIVAILQKLTSTEVLKNYSTIINSLQDSIQTNMPLETMINLVNAQLESGGNYKVNSQDLKGTGRMDLPSYAMPDSNLYVMEIDDSSLAVVKAAIQDVMEGR

SEQ ID NO: 525 - DNA, 729 bp, Streptococcus pneumoniae
atgatagacatccattcgcatatcgtttttgatgtagatgacggtcccaagtcaagagaggaaagcaaggctctcttggcagaatcctacagacagggggtgcgaaccattgtttctacctctcaccgtcgcaagggcatgtttgaaactccggaagagaagatagcagaaaactttcttcaggttcgggaaatagctaaggaagtggcgagtgacttggtcattgcttacggggctgaaatttattacacaccagatgttctggataagctggaaaaaaagcggattccgaccctcaatgatagtcgttatgccttgatagagtttagtatgaacactccttatcgcgatattcatagcgccttgagcaagatcttgatgttgggaattactccagtcattgcccacattgagcgctatgatgctcttgaaaataatgaaaaacgcgttcgagaactgatcgatatgggctgttacacgcaagtaaatagttcacatgtcctcaaacccaaactttttggcgaacgttataaattcatgaaaaaaagagctcagtattttttagagcaggatttggttcatgtcattgcaagtgatatgcacaatctagacggtagacctcctcatatggcagaagcatatgaccttgttacccaaaaatacggagaagcgaaggctcaggaactttttatagacaatcctcgaaaaattgtaatggatcaactaatt

SEQ ID NO: 526 - protein, 243 aa, Streptococcus pneumoniae
  capsular polysaccharide biosynthesis protein Cps4B (cps4B); Cellular location: membrane
MIDIHSHIVFDVDDGPKSREESKALLAESYRQGVRTIVSTSHRRKGMFETPEEKIAENFLQVREIAKEVASDLVIAYGAEIYYTPDVLDKLEKKRIPTLNDSRYALIEFSMNTPYRDIHSALSKILMLGITPVIAHIERYDALENNEKRVRELIDMGCYTQVNSSHVLKPKLFGERYKFMKKRAQYFLEQDLVHVIASDMHNLDGRPPHMAEAYDLVTQKYGEAKAQELFIDNPRKIVMDQLI

SEQ ID NO: 527 - DNA, 693 bp, Streptococcus pneumoniae
atgatgaaagaacaaaatacgatagaaatcgatgtatttcaattagttaaaagcttgtggaaacgcaagctaatgattttaatagtggcacttgtgacaggtgcgggggcttttgcatatagcacttttattgttaagccagaatatacgagtaccacgcgaatttacgtagtgaatcgcaatcaaggagacaagccggggttgacaaatcaggatttgcaggcaggaacttatctggtaaaagactaccgtgagattatcctttcgcaggatgttttggaggaagttgtttctgatttgaaactagatttgacgccaaaaggtttggctaataaaattaaagtgacagtaccagttgatacccgtattgtctctatttcagttaatgatcgagttcctgaagaggcaagccgtatcgctaactctttgagagaagtagctgctcaaaaaattatcagtattactcgtgtttctgacgtgacaacactggaggaggcaaggccggcgatatccccgtcttcgccaaatattaaacgcaatacactaattggttttttggcaggggtgattggaactagtgttatagttcttcatcttgaacttttggatactcgtgtgaaacgtccggaagatatcgaaaatacattgcagatgacacttttgggagttgtgccaaacttgggtaagttgaaa

SEQ ID NO: 528 - protein, 231 aa, Streptococcus pneumoniae
  capsular polysaccharide biosynthesis protein Cps4C (cps4C); Cellular location: membrane
MMKEQNTIEIDVFQLVKSLWKRKLMILIVALVTGAGAFAYSTFIVKPEYTSTTRIYVVNRNQGDKPGLTNQDLQAGTYLVKDYREIILSQDVLEEVVSDLKLDLTPKGLANKIKVTVPVDTRIVSISVNDRVPEEASRIANSLREVAAQKIISITRVSDVTTLEEARPAISPSSPNIKRNTLIGFLAGVIGTSVIVLHLELLDTRVKRPEDIENTLQMTLLGVVPNLGKLK

SEQ ID NO: 529 - DNA, 681 bp, Streptococcus pneumoniae
atgccgacattagaaatagcacaaaaaaaactggagttcattaagaaggcagaagaatattacaatgccttgtgtacaaatatacagttgagcggagataaactaaaagtaatttccgttacttctgttaaccctggggaaggaaaaacaactacttccataaatatagcatggtcgtttgcgcgtgcaggctataaaactcttttgatcgatggcgatactcgaaattcagttatgttaggagtttttaaatctcgtgaaaaaattacagggctaacagaatttttatctgggacagctgatttatctcacggtttatgtgatacaaatattgaaaatttatttgtagttcaatcgggatctgtatcaccaaaccctacagccttgttacaaagtaaaaattttaatgatatgattgaaacattgcgtaaatattttgattatatcattattgatacaccgcctattggaattgttattgatgcggcaattatcactcaaaagtgtgatgcgtccatcttggtaacagcaacaggtgaggcgaataaacgtgatatccaaaaagcgaaacaacaattaaaacaaacagggaaactgttcctaggagttgttttaaataaattggatatctcggttaataagtatggagtttacggttcctatggaaattatggtaaaaaa

SEQ ID NO: 530 - protein, 227 aa, Streptococcus pneumoniae
  capsular polysaccharide biosynthesis protein Cps4D (cps4D); Cellular location: membrane
MPTLEIAQKKLEFIKKAEEYYNALCTNIQLSGDKLKVISVTSVNPGEGKTTTSINIAWSFARAGYKTLLIDGDTRNSVMLGVFKSREKITGLTEFLSGTADLSHGLCDTNIENLFVVQSGSVSPNPTALLQSKNFNDMIETLRKYFDYIIIDTPPIGIVIDAAIITQKCDASILVTATGEANKRDIQKAKQQLKQTGKLFLGVVLNKLDISVNKYGVYGSYGNYGKK

SEQ ID NO: 531 - DNA, 651 bp, Streptococcus pneumoniae
ttgtcaaatggaaatagaatgaaaaatggaaatagaatttatagttggaggttgtttatgtacggtataataaaacgattaggtgatatattattatctttaatagggataataatattgtgtccggtttttatgataattgcaattgcgattaaacttgattcagaaggtccggttatatttaagcaaaaacgctttggtattcataaagaatacttctatattttgaaatttaggtctatgaaaatagatgcacctaaaaatgtggcgcctcgaaacttatataatccagagcaatggattacaaaagtaggggctttcttgcgaaaaacatctttggatgaactaccacaattgtttaatattcttgttggtaatatgagtattgtaggtcctagaccagcgggtataaatgaactagatttgattgcagagagagataagtatggagcaaatgatatcttgccagggttaactggatgggcacaaattaacgggcgtgatactttgtctgttgagatgaagacggagttagatggctactatgttaaacatctgtctttgataatggatattagatgtatagttaagacaataccttacgtactgaaacgaaaaggtattgtagagggtagtggtaagaaagaaagt

SEQ ID NO: 532 - protein, 217 aa, Streptococcus pneumoniae
  capsular polysaccharide biosynthesis protein Cps4E (cps4E); Cellular location: outside; Similar to strain R6 sequence 15903697 (6.E-24)
MSNGNRMKNGNRIYSWRLFMYGIIKRLGDILLSLIGIIILCPVFMIIAIAIKLDSEGPVIFKQKRFGIHKEYFYILKFRSMKIDAPKNVAPRNLYNPEQWITKVGAFLRKTSLDELPQLFNILVGNMSIVGPRPAGINELDLIAERDKYGANDILPGLTGWAQINGRDTLSVEMKTELDGYYVKHLSLIMDIRCIVKTIPYVLKRKGIVEGSGKKES

SEQ ID NO: 533 - DNA, 1227 bp, Streptococcus pneumoniae
atgaaaatactatttgtttgccaacattataagccagaaccattcaggttgtcagatatttgtgaagatttagttcgaaaagggcatgaagtctctgttttggctgggattcctaattaccctgaagggaagatatatgcagattatcgtcataataaaaaaagacgtgagattatagaaggtgttacgatatatcgttcttatacaatccctagaaaaaaaagtgttgtatttcgattgttgaattattttagctttgcaattagttctactttaggagttttattggggaggtataaaacgaaagatggatcgaattttgactgtgtattcgttaaccaattgtctccagttatgatggcatgggctggtatggcttataaaaaaaaatataagaaaccgatgtttctatattgtatggatgtttggccagatagtttaaccgtaggtggagtgaaacaagatggcttgattttcaagctgtttaaatttatctcaaaaaaagtttaccgagctagtgattatatatttgtcactagtccatcatttaaaaattattttgtgaagcaatttgacatatccgaacaaaagattacatatttgccacaatatgcagaagatctttttatccctgatgaatctatagttaataaagaaagtgttgacctaacttttgctggtaatattggcaaagcacaaaatttggaaactattttgaaagctgccagtttgatagagaagaataccaatttacccaagaaaattcattttcattttgttggagatggtacggaattgttaagcatgaaagcattagctcatgaattggagttaaagaatatttccttctatggaagacgttctttggaggaaatgccatccttctataaaaaatcagatgctatgttagtttctttaataggagactcgatagtttctcgtactatacctgggaaggtacaatcttatatggcggcaggcaaaccaattataggtgcaatttcaggagatgctaaaataattgtagaagaagcaaattgtggatatgttagtcccgaacgagatgtaaaacaattggcaaaaaatatttgtaaatttagtatgttatctattaagagacaaagagagttaggaaagaaagctcgttgttactatgaaaatcacttttcaaaagagcagtttatgctcgaactggagacatgtttagagagggaaagtaagaaagaa

SEQ ID NO: 534 - protein, 409 aa, Streptococcus pneumoniae
  capsular polysaccharide biosynthesis protein Cps4F (cps4F); Cellular location: cytoplasm
MKILFVCQHYKPEPFRLSDICEDLVRKGHEVSVLAGIPNYPEGKIYADYRHNKKRREIIEGVTIYRSYTIPRKKSVVFRLLNYFSFAISSTLGVLLGRYKTKDGSNFDCVFVNQLSPVMMAWAGMAYKKKYKKPMFLYCMDVWPDSLTVGGVKQDGLIFKLFKFISKKVYRASDYIFVTSPSFKNYFVKQFDISEQKITYLPQYAEDLFIPDESIVNKESVDLTFAGNIGKAQNLETILKAASLIEKNTNLPKKIHFHFVGDGTELLSMKALAHELELKNISFYGRRSLEEMPSFYKKSDAMLVSLIGDSIVSRTIPGKVQSYMAAGKPIIGAISGDAKIIVEEANCGYVSPERDVKQLAKNICKFSMLSIKRQRELGKKARCYYENHFSKEQFMLELETCLERESKKE

SEQ ID NO: 535 - DNA, 1074 bp, Streptococcus pneumoniae
atgagagtactgtttatactatctgataatatatatctaactccttacttcaatttttataaagaattattgaagaaactgtctattagttacgatgttatatattgggataagaatattaacgagattattacaaaacaaaactactatcgtatttctttttctggtaaaggaaaattaagtaagatattaggttatgtaaaattcagaaaagaaattaaaaagaagctaaaagaaaatgattatgatatgatattgccgttacatagtattgtgtctttcattttagtagattttcttctcttttcatttaaaaatagatatatttatgatattcgtgattacagttatgaaaaatttttggtttatcgtttggttcagaaacaattggtgaaaaattctttaatgaatatcgtttcttcagacggctataaattttttttaccaatgggagagtattttactacccataacctacccaatatgatagaattaaacgaggtaaagcagttaaaaaataatagtacgtttccaattcaactttcctacattggtttaattcgttttcaagaacaaaataaaaaaataatcgatttttttgcaaatgacagtcgatttcagttgaattttataggtactaatgcaggagaattaagggaattttgtcaagaaaaaaatatcagcaatgttaacttggtggacacattccagcctaaagataccatgtctttttataagaatacagatgttgttttgaatttatacgggaatcacactcccttactagactatgctttgtctaataaactctactttgctgcattgttgtataaacctattttagtttgtgaagatacttatatggaaaaagtgtcaatagagaatggttttggtttcgttttacctatgaaggatgaatcggaaaaagattgtttggctttgtatattcaaaaccttgacaggaaacagctaattaagaattgtgataacttcatggacagaattagtttagaaaaacaaaaaacagaaatagaattagagaagcgaatcttaagcttaaggaagaagaatgat

SEQ ID NO: 536 - protein, 358 aa, Streptococcus pneumoniae
  capsular polysaccharide biosynthesis protein Cps4G (cps4G); Cellular location: membrane
MRVLFILSDNIYLTPYFNFYKELLKKLSISYDVIYWDKNINEIITKQNYYRISFSGKGKLSKILGYVKFRKEIKKKLKENDYDMILPLHSIVSFILVDFLLFSFKNRYIYDIRDYSYEKFLVYRLVQKQLVKNSLMNIVSSDGYKFFLPMGEYFTTHNLPNMIELNEVKQLKNNSTFPIQLSYIGLIRFQEQNKKIIDFFANDSRFQLNFIGTNAGELREFCQEKNISNVNLVDTFQPKDTMSFYKNTDVVLNLYGNHTPLLDYALSNKLYFAALLYKPILVCEDTYMEKVSIENGFGFVLPMKDESEKDCLALYIQNLDRKQLIKNCDNFMDRISLEKQKTEIELEKRILSLRKKND

SEQ ID NO: 537 - DNA, 1116 bp, Streptococcus pneumoniae
atgattaaagtattacatctatttacaacactagatagtggtggagtagaaagttttctattcaactattattctcacattgatagaaaaaaaattcaatttgattttattgtgcctggaaaagaacaaggatttttagaggataaaatgaaagaattgggtgcaaaggtttatcatgtgcctctattaaggaaaaagcctctacatcagtttctctctcttgctagaataataaagaaaggagattatgatatagttcattgccatggctataaatctgcaattggtctgatcttatctaaaataattggttgtaaaattagaattattcatagtcatatggcttatgtaacagaaaacagttttcaaaaagtattgcgtaaattagtaacaattttggtaaaaatcttagcaactcattggtttgcatgtggggaagattcggctaagtggttatatggagagaaagcgtataaagacggaaaaattgaaattatttttaatgcaattgatttgaaaaagtatcaatttttgtcagatgttagagaaaaatgtcgtagagaattagatgtgtcaaataagttcgtattaggaaatatagctcgcctatcagatcaaaaaaaccaaagttatttatttaacgttttaaaagaactcattttaatcaaaccaaatgttattttactcctagttggtaatggtgaggatgagcagaaattaaaacagaaagctttagaactaaatctgaccccatatgtgctatttttagggagaaggactgatatttctgatttattatctgcgatggatgtttttttgcttccgtctaaatatgaggggttgcctgtttctctagtagaggctcaggcatcgggattacaaattttatcgtcagatacagtgacgcaagaagtagatgtgaccaaaaacattagttacttacctatcaacgaagagtctgtgttgctatggaaagataaagtactgtctttaacatctgaggaatgcaatcgttttgaaataaataacagtatgacagatggactctatgatatttgttatcaagctagtaaattattgaatcgttatcaagaaatgtgtgtaataaaggagata

SEQ ID NO: 538 - protein, 372 aa, Streptococcus pneumoniae
  capsular polysaccharide biosynthesis protein Cps4H (cps4H); Cellular location: membrane; Similar to strain R6 sequence 15902179 (3.E-12)
MIKVLHLFTTLDSGGVESFLFNYYSHIDRKKIQFDFIVPGKEQGFLEDKMKELGAKVYHVPLLRKKPLHQFLSLARIIKKGDYDIVHCHGYKSAIGLILSKIIGCKIRIIHSHMAYVTENSFQKVLRKLVTILVKILATHWFACGEDSAKWLYGEKAYKDGKIEIIFNAIDLKKYQFLSDVREKCRRELDVSNKFVLGNIARLSDQKNQSYLFNVLKELILIKPNVILLLVGNGEDEQKLKQKALELNLTPYVLFLGRRTDISDLLSAMDVFLLPSKYEGLPVSLVEAQASGLQILSSDTVTQEVDVTKNISYLPINEESVLLWKDKVLSLTSEECNRFEINNSMTDGLYDICYQASKLLNRYQEMCVIKEI

SEQ ID NO: 539 - DNA, 1398 bp, Streptococcus pneumoniae
atgcagacaaagtatatttgtagagtgacactagtgacattaagttttatatttgctttctgttacttgttctggactctcgataattggaataatggttttcttatatctaattatgttccgtctatatttatatgggtttgctttctaattatttttcaaattactggttttattttacaaaaagttagtatatatgatttttctgtatggtatctgattttatcttatttttttatgtttggattaattttcaatgagtatatggggtttcaaacaactctgctgtggagccctagtaacttctataataatgaagaattatttcattcatatatttttataatttggattttgttttgttattctgtaggctatttatttttttatagtgatggaaaggtacattatcattcagaagtacaaaattatcaggaaaatgaagagaaaattttgtacaatgcgggtaggattttaacaggagtgggctttatttctagggtaataactgattctaaaacagtactagcagttagagcggcgaatagctattcagcatattcagaggcagctagttcaggaataatagatgatttaggagtacttatgcttcctggtgtgttctccttgttttattcagataagctgtcccgagttataaagcgtactattttttgggtaatgttgttttacctaattttgataatgatcctaacaggaagtcgtaaaatccaggtgttttcaatcttggcgttggttttagtatacacacaatctttagggattactttttcgaagaaaagagtacttgtatttttaatagtaactgtatttctattaaatgtattagttgttattagggggcaccgtttcgacttgaatactataggtatatacttatttgattccttttcttcattagattttgtaaagaatatactaggggaagtattttcagagtcgggactgaccagcctaacagtagcttctgctgtaactgttgtgcctagtagcattccatatgaatatgggatgacatttctacgcactatcctatcaatttttcctattggatggttagttggtgatttttttgataaagcatcagcgacggttgttattaataaatttttggggttacctgtaggctcttcttttgtggaagaattattttggaactttggttactatggtggtgttttttggagttttgttttgggaatatttagtggatggcgattaaatttcagagcttttcaaacaagtaaaatctcaaaagttatttatttttcggtaatttctcaactattgcttttagtgagaagtagttcaatagatgtttatcgtcctattatgtatagtttgattatgatatttatttttaggaggttgaaaaaa

SEQ ID NO: 540 - protein, 466 aa, Streptococcus pneumoniae
  hypothetical protein; Cellular location: membrane
MQTKYICRVTLVTLSFIFAFCYLFWTLDNWNNGFLISNYVPSIFIWVCFLIIFQITGFILQKVSIYDFSVWYLILSYFFMFGLIFNEYMGFQTTLLWSPSNFYNNEELFHSYIFIIWILFCYSVGYLFFYSDGKVHYHSEVQNYQENEEKILYNAGRILTGVGFISRVITDSKTVLAVRAANSYSAYSEAASSGIIDDLGVLMLPGVFSLFYSDKLSRVIKRTIFWVMLFYLILIMILTGSRKIQVFSILALVLVYTQSLGITFSKKRVLVFLIVTVFLLNVLVVIRGHRFDLNTIGIYLFDSFSSLDFVKNILGEVFSESGLTSLTVASAVTVVPSSIPYEYGMTFLRTILSIFPIGWLVGDFFDKASATVVINKFLGLPVGSSFVEELFWNFGYYGGVFWSFVLGIFSGWRLNFRAFQTSKISKVIYFSVISQLLLLVRSSSIDVYRPIMYSLIMIFIFRRLKK

SEQ ID NO: 541 - DNA, 1080 bp, Streptococcus pneumoniae
gtggtgaaaaaaattatgttacatggtgcaacggattatggttcaagtaattacggtgattatctttacggtgagattgtctatgatttattagaatctaaaggatatgaagtttctttttataatccatcagatttctttcaaatgtacttgaaagaatatcgccaaaaacaaagttttactaaaaaacaagcagatgctattttgtatatcccgggaggatattttggggaagggcataatgcacgttttcgtgataatttaatccaatttaaacgatttttacctttgggaatttgggcttcatattttaaaaagcctataggagtattaggtattggtgcagggcctaataacgattctttgatgaattatggtataaagagaattattaatcatgctcaatttattacagttcgtgatcgagaatcatttgattctttgaagcatttgtcgccttcggctccagtgcatgaaacctttgatttaattatttcaagtaaattaagagaagaaaaaacagagcagctgtgtcaattgaaaagagaagctaaagataagaagataattcttgttcactataatcattccaaaaaagctcttgaaaaatttgcggaatcaattagtctttttctagaaaacaatcctaactattatgttgtagtaacttcggattccattctaccttatgaagatgcttattatcaggaatttagaaaattagttagaactgaggattgttttcaattcaagtatcattctcctgcagaaatgacatcattgttgaaaatggtagatgtggttttaacttgtaaattacatgttggggtagtggcaacatgttttaataaatctgtgattgccattgcatgccatccagaaaaaacagcacgttattatggagcaattggagagttacaacgttgtgaatctttatttgattcaagtgttaatagtattgtaaagaaacttgaaacttttcatctaaaaccgataacaataccttcagaattggtgttgaaagcgagaagtagtttggactatttagatctttttttggaaggactagttcgtgaaagt

SEQ ID NO: 542 - protein, 360 aa, Streptococcus pneumoniae
  hypothetical protein; Cellular location: membrane
MVKKIMLHGATDYGSSNYGDYLYGEIVYDLLESKGYEVSFYNPSDFFQMYLKEYRQKQSFTKKQADAILYIPGGYFGEGHNARFRDNLIQFKRFLPLGIWASYFKKPIGVLGIGAGPNNDSLMNYGIKRIINHAQFITVRDRESFDSLKHLSPSAPVHETFDLIISSKLREEKTEQLCQLKREAKDKKIILVHYNHSKKALEKFAESISLFLENNPNYYVVVTSDSILPYEDAYYQEFRKLVRTEDCFQFKYHSPAEMTSLLKMVDVVLTCKLHVGVVATCFNKSVIAIACHPEKTARYYGAIGELQRCESLFDSSVNSIVKKLETFHLKPITIPSELVLKARSSLDYLDLFLEGLVRES

SEQ ID NO: 543 - DNA, 1239 bp, Streptococcus pneumoniae
gtgaaagttgatagaatttcatttataaaaaatacaagttctctctatattctgaatattgttaaattactatttcctttattaacactcccgtatttgacaagggtgctttcgctagacgcgtatggaatggttatttatgttaaagcgttaatagcttatgttcaactggtgattgattttggtttcatgatatcagctacaaaaaatattgtaaatgcttgtactactccctcaaagattggaaggatagttggagatactctagttgaaaaaatatttttatctatcatttcgattctaatttacaccatattgatgtggcaaatcccaataatgagagagaatattcttttttcagttttttatttgttagctacagtgaccaatatttttatctttgactttttatttcgtggaattgaaaagatgcatgcagttgcaattccttatattatttctaaaactatcattacaattttgacatttattgtagtaaaagatgattcttctattttatggattcctatattggaaggaattgggaatttagttgctgcagtagtttcttatagattccttcattattatggaattaaattatcattttcttatctgtctgtttgggttaaagatttaaaggaatcctctatttattttttatccaattttgcaactactatttttggcgtctttacgacagtcatttcgggtttttatttacaaagtcaagagatagccttttgggggatagcaatgcaactgctttcagcagcaaaatcattgtataatcctatagcgaatagtttatatccgcatatgatacgtactaaagatatacaatcggttaagagtattaatcggattatgtttattcctattatctttggagttttgatagttttattcttttcaaatcaaattctttctataattggtggtgaaaaatataccgtttcagcagattttcttaagtacttattacccgcttttgttgctagtttttattctatgatttacggatggcctgtcttaggagctattgataaagtgaaagaaactacaatgacaactatattagcttcgattgtccaaactttgggattaggaatatttatcttgtctgataattttagtttagtaacattagctatttgttcaagtatgtctgaggtggtgttatggattagccgttatctaatttattttaagaaccgttcattatttgttaggagtaag

SEQ ID NO: 544 - protein, 413 aa, Streptococcus pneumoniae
  O-antigen transporter RfbX, putative; Cellular location: membrane; Similar to strain R6 sequence 15902361 (9.E-11)
MKVDRISFIKNTSSLYILNIVKLLFPLLTLPYLTRVLSLDAYGMVIYVKALIAYVQLVIDFGFMISATKNIVNACTTPSKIGRIVGDTLVEKIFLSIISILIYTILMWQIPIMRENILFSVFYLLATVTNIFIFDFLFRGIEKMHAVAIPYIISKTIITILTFIVVKDDSSILWIPILEGIGNLVAAVVSYRFLHYYGIKLSFSYLSVWVKDLKESSIYFLSNFATTIFGVFTTVISGFYLQSQEIAFWGIAMQLLSAAKSLYNPIANSLYPHMIRTKDIQSVKSINRIMFIPIIFGVLIVLFFSNQILSIIGGEKYTVSADFLKYLLPAFVASFYSMIYGWPVLGAIDKVKETTMTTILASIVQTLGLGIFILSDNFSLVTLAICSSMSEVVLWISRYLIYFKNRSLFVRSK

SEQ ID NO: 545 - DNA, 1116 bp, Streptococcus pneumoniae
ttgttaggagtaagtaaatatatgaaaaaagtagttgtagtatttggaactcgtccagaagccatcaagatgtgtcctttggtcaaagagttaagaacacgtaagaatattgaaacattagtttgcgttacgggccaacaccgtcaaatgttggatcaggtcttggacacatttgggattattcccgattttgatttgtctattatgaaagataaacaaactttatttgatgtgaccattggcattttggaaggaatgaaggctattttagagtcagaaaaacctgatttggtgttagttcatggggatacaagtacgaccttcgctagttcactggcggccttttatttacagattccaattggtcatgttgaagctggtttgcgcacttacgatatctattcaccatatcctgaagagtttaatcgtcaagcagttggggttttggctcagtatcattttacaccaacacaactttcaaaagataatcttttaagagaaggaaaaactccagagagcatatttgtgacaggtaatacggcgattgatgctttacaaactacaattcaagaggactatacgcatcctgagttagaatggataggagaaagcaggtttattctaattacagctcatcgtcgtgaaaatcttggtgaaccgatgagacatatgtttagagcaattagaaggattattgaagaatattcagatgtcaaggctatttatcctatccatatgaatcctcgtgttcgccaaattgctgaggaagaactaagtggctgtgaacgtatcaagatgatcgaacctttagaagtattagattttcacaattttttatcaagaagttatttaattttaacagatagtggtggtattcaggaagaggctccaagtttaggaaaacctgttttggttatgagagatacaactgaacgtccagagggaattgaagcagggactttgaaacttgtaggtgctgatgaaaataatatttataggcattttaaagaattattagaaaatgattcagtttatcaagcaatgagtcaagcttcaaatccatatggagatggaacggcttgtaagaaaattgcagacatactagaaggagaagtg

SEQ ID NO: 546 - protein, 372 aa, Streptococcus pneumoniae
  UDP-N-acetylglucosamine-2-epimerase (cps4I); Cellular location: cytoplasm
MLGVSKYMKKVVVVFGTRPEAIKMCPLVKELRTRKNIETLVCVTGQHRQMLDQVLDTFGIIPDFDLSIMKDKQTLFDVTIGILEGMKAILESEKPDLVLVHGDTSTTFASSLAAFYLQIPIGHVEAGLRTYDIYSPYPEEFNRQAVGVLAQYHFTPTQLSKDNLLREGKTPESIFVTGNTAIDALQTTIQEDYTHPELEWIGESRFILITAHRRENLGEPMRHMFRAIRRIIEEYSDVKAIYPIHMNPRVRQIAEEELSGCERIKMIEPLEVLDFHNFLSRSYLILTDSGGIQEEAPSLGKPVLVMRDTTERPEGIEAGTLKLVGADENNIYRHFKELLENDSVYQAMSQASNPYGDGTACKKIADILEGEV

SEQ ID NO: 547 - DNA, 1053 bp, Streptococcus pneumoniae
atgtcacaatttacaggaaaaactctcctaattacaggagggacaggttcatttgggaatgcggttctcaagcgttttttagaaacagatgtctcagagattcgtatattttcgcgagatgaaaagaaacaagatgatatgcgtcatgagtttcaggtaaaagtaccagaagtggctgggaaaatccgtttttaccttggagatgtgcgtgacttagcttcggtaaaaaatgctatgcatggtgtggattatgtttttcacgctgctgctcttaaacaagtaccttcttgtgaatttttccctgtagaagcggtaaaaactaacattttgggaacggagaatgtcctcactgcggctatcgaagctggtgtaaagcaagttatctgtctttctacagataaggcggcttatcctgtcaatgctatgggaacatccaaggctatgatggaaaagattgctgttgctaagtccaggacggtaaatcctgagcatacaaagatatgtgtgactcgctatgggaatgttctgtgtagccgtggatctgtcgttcctctttggattgagcaaattaagcaaggaaatgctcttacaattactgaacctagcatgacacgttttgtgatgacattggaagaagcagtagacttggttttatttgcatttgaagaagggaaatctggagatatactagttcagaaagcaccagcatgtacgattgaagtgttggctaaggctgtatcagaaatttttgcctcagaacaagatattaagattataggtattagacacggagaaaaaaggtatgaaacactattaactaacgaagagtgcgcaaatgcaattgatttgggtgatttttatagagttcctagtgataatcgtaatcttaactatgataagtatttcaaagatggtagtacgaatagaaatttgttgacagaattcaatagtaataataccgatttgatggatgtagagcaagttaaaagaaagttgctagaattagatgaaatacagacagcaattcgtgatatggtagcagacgaagagatg

SEQ ID NO: 548 - protein, 351 aa, Streptococcus pneumoniae
  capsular polysaccharide biosynthesis protein cps4J (cap4J); Cellular location: outside; Similar to strain R6 sequence 15902136 (2.E-36)
MSQFTGKTLLITGGTGSFGNAVLKRFLETDVSEIRIFSRDEKKQDDMRHEFQVKVPEVAGKIRFYLGDVRDLASVKNAMHGVDYVFHAAALKQVPSCEFFPVEAVKTNILGTENVLTAAIEAGVKQVICLSTDKAAYPVNAMGTSKAMMEKIAVAKSRTVNPEHTKICVTRYGNVLCSRGSVVPLWIEQIKQGNALTITEPSMTRFVMTLEEAVDLVLFAFEEGKSGDILVQKAPACTIEVLAKAVSEIFASEQDIKIIGIRHGEKRYETLLTNEECANAIDLGDFYRVPSDNRNLNYDKYFKDGSTNRNLLTEFNSNNTDLMDVEQVKRKLLELDEIQTAIRDMVADEEM

SEQ ID NO: 549 - DNA, 1227 bp, Streptococcus pneumoniae
atgattaaaaatattttaatcacaggagcgaaaggatttgtaggaaaaaatcttatctgtactctggaagctttgaaagatggacgagataggactcgtcctaatttagagattggagagatttttcagtatgatcgtgatacagatccgattttattagatgaatattgtaagaaggccgatttcgtattccatttagctggtgtcaatcgtccacagaatcctgatgaattcatggagggaaattacggtttttcaagtagattattggagattttagaaaagtatgaaaacacttgtcctgttctactctcaagttctactcaagctagtttagaaggccgattttcaaactctatatatggacaatctaagctagcaggggaagaactcttctttgaatatggaaagaaaacgggagcacctgtcttagtttaccgtttcccgaatctttatgggaagtggtgccgtcctaactacaattctgctgtagcaactttctgttataatctagctcacgatttacctattcaagtaaatgatccaagtgtagaattggagttgctgtatattgatgatttgatacaagagtgtctaactgcattggaaggaaatcctcatcgttgtaatctagatggattacaaatcttacctagcccatcaggaaactactgctacgtaccaacgactcatcgtgcaaccttaggagagattgtctctctattagaaacatttaaaaaacagcctgatagtttagttatgcctgaaattcctcagggatcgtttaaaaagaaattgtattctacctacctatcttatttaccagtagataagtttaagtttcctctaaaaatgaatatagatgaacgaggtagttttacggaattattaaaaacagaaaatacgggtcaattttctgttaatatttctaaacctggcattaccaaagggcaacattggcatcattctaagtgggaatttttcatggttgtttctggtcgtgctttaatacaagagcgtaggatagggctggatgaaaacggtcaagagtatcctattctgaactttgaagtgtcgggcgataagattgaagcaatacatatgataccgggctatgcacataatattattaatctttctgatacagaaaatctaattactgtcatgtgggctaatgagtcatttgatcctagacatccagatactttttttgaacaagtggagaaa

SEQ ID NO: 550 - protein, 409 aa, Streptococcus pneumoniae
  capsular polysaccharide biosynthesis protein Cps4K (cps4K); Cellular location: cytoplasm
MIKNILITGAKGFVGKNLICTLEALKDGRDRTRPNLEIGEIFQYDRDTDPILLDEYCKKADFVFHLAGVNRPQNPDEFMEGNYGFSSRLLEILEKYENTCPVLLSSSTQASLEGRFSNSIYGQSKLAGEELFFEYGKKTGAPVLVYRFPNLYGKWCRPNYNSAVATFCYNLAHDLPIQVNDPSVELELLYIDDLIQECLTALEGNPHRCNLDGLQILPSPSGNYCYVPTTHRATLGEIVSLLETFKKQPDSLVMPEIPQGSFKKKLYSTYLSYLPVDKFKFPLKMNIDERGSFTELLKTENTGQFSVNISKPGITKGQHWHHSKWEFFMVVSGRALIQERRIGLDENGQEYPILNFEVSGDKIEAIHMIPGYAHNIINLSDTENLITVMWANESFDPRHPDTFFEQVEK

SEQ ID NO: 551 - DNA, 1182 bp, Streptococcus pneumoniae
atgaaaattaagacagattatagtgatattcactttaaagataatggcaaacttaagttattgattattgtgggaacacgtccagagattatacgtctaagtagtgttatcactaaatgtcgaaagtattttgatgttattttggcacatactggacaaaactatgattacaatttaaatggtattttctttgataatttagggttagacactccggacgtatacatggatgctgttggagatgatcttggtgctactgtagggaatattattaatacttcatacaaattgatgaatcaaattaaaccagatgctttattgattttaggggatacaaattcttgtttatcagctattgctgccaagcgtttacatattccaatttttcatatggaggctggcaatcgctgtaaagatgagtgcctaccggaagagactaatcgtcggattgttgatgttatttcagatgttaacttagcatactctgaacatgcacgtaagtatttacatgagtgtggtttacctaaagagcgcacatatgtaactggttctcctatggcagaagtgttacataaaaatttatctgctattgagtcttcagatatccatgaacgtttgggattgaaaaaaggaggttatatcttactttcagctcaccgtgaggaaaatattgatacagataaaaattttatttctctctttacagcaattaatcaattagctgaaaagtataatatgccaatcttatattcttgccatcctagatcaaagaaaaggctacaagagagcggttttaaactagataaacgtgtgattcagcatgagccactaggattccatgactataattgtttacagatgaatgcatttgttgtagtatctgattcgggaactttaccggaagaaagtagtttctttactagtcaaggttatccttttcccgctgtatgtattcgtacaagtacagaacgtcctgagtccttagataaggcaggatttattttggcaggcattgatgaaaattctcttcttcaagcagttgaaactgctgttagcttggcacaagatgaggattttggattaccggttccggattatgttgaggaaaatgtctctactaaagttgttaagataatacagagctatacagggatagtggataaaatagtttggaggaaaagc

SEQ ID NO: 552 - protein, 394 aa, Streptococcus pneumoniae
  UDP-N-acetylglucosamine 2-epimerase (cps4L); Cellular location: cytoplasm
MKIKTDYSDIHFKDNGKLKLLIIVGTRPEIIRLSSVITKCRKYFDVILAHTGQNYDYNLNGIFFDNLGLDTPDVYMDAVGDDLGATVGNIINTSYKLMNQIKPDALLILGDTNSCLSAIAAKRLHIPIFHMEAGNRCKDECLPEETNRRIVDVISDVNLAYSEHARKYLHECGLPKERTYVTGSPMAEVLHKNLSAIESSDIHERLGLKKGGYILLSAHREENIDTDKNFISLFTAINQLAEKYNMPILYSCHPRSKKRLQESGFKLDKRVIQHEPLGFHDYNCLQMNAFVVVSDSGTLPEESSFFTSQGYPFPAVCIRTSTERPESLDKAGFILAGIDENSLLQAVETAVSLAQDEDFGLPVPDYVEENVSTKVVKIIQSYTGIVDKIVWRKS

SEQ ID NO: 553 - DNA, 99 bp, Streptococcus pneumoniae
ttgggcggttactttcgaaactttgaaaacttcaaaaaacggatttttatcgctctgaacatcaaaaaagaaaggacgaaatttgtcctttctcaagct

SEQ ID NO: 554 - protein, 33 aa, Streptococcus pneumoniae
  IS1167, transposase, truncation
MGGYFRNFENFKKRIFIALNIKKERTKFVLSQA

SEQ ID NO: 555 - DNA, 447 bp, Streptococcus pneumoniae
ttggtaaactgcgaacagctagaagcttatcgtcaactggaagaagctgcacttgttggatgttgggcgcatgtgagaaggaagttttttgaagtgccccccaagcaagcagataaatcatccttaggagctaaaggtttagcctattgtgatcagttattttccttggaaagagactgggaggctttgccagctgatgaacggctacagaaacgtcaagaacatctccaacccctactggaagacttctttgcttggtgccgtcgtcagtcagttttatcgggttcaaaactaggaagggcaattgaatacagcctcaagtatgaagaaacctttaagaccattttaaaagacggacatctggtcctttccaataatctagctgaacgcgccattaaatcattggttatgggacggagtaaaagagtccagtggactcttttagcc

SEQ ID NO: 556 - protein, 149 aa, Streptococcus pneumoniae
  conserved domain protein
MVNCEQLEAYRQLEEAALVGCWAHVRRKFFEVPPKQADKSSLGAKGLAYCDQLFSLERDWEALPADERLQKRQEHLQPLLEDFFAWCRRQSVLSGSKLGRAIEYSLKYEETFKTILKDGHLVLSNNLAERAIKSLVMGRSKRVQWTLLA

SEQ ID NO: 557 - DNA, 225 bp, Streptococcus pneumoniae
ttgcgagagagactattgactcagcccttacttcatgcggatgaaacctcctatcgggttctagagagtgatagccatctgacctactattggacttttttgtcaggtaaagcagagaaacaagggattacgctttaccaccatgatcagtgtcgaagtggttcagtagtacaagaattcctaggagattattctggctatgttcattgtgatatgttgcggcag

SEQ ID NO: 558 - protein, 75 aa, Streptococcus pneumoniae
  IS66 family element, Orf3, degenerate
MRERLLTQPLLHADETSYRVLESDSHLTYYWTFLSGKAEKQGITLYHHDQCRSGSVVQEFLGDYSGYVHCDMLRQ

SEQ ID NO: 559 - DNA, 264 bp, Streptococcus pneumoniae
atggacaatgctatatggcataaatcaagtaccttaaagattccgactaatattggctttgcatttattcctccatacacaccagagatgaaccccattgaacaagtgtggaaagagattcgtaaacgtggatttaagaataaagcctttcgaactttggaagatgtcatgaatcaacttcaagatgttatacaaggactggagaaggaggtgataaagtccatcgttaatcggagatggactagagtgctttttgaaagcaga

SEQ ID NO: 560 - protein, 88 aa, Streptococcus pneumoniae
  transposase family protein, truncation; Cellular location: cytoplasm; Similar to strain R6 sequence 15903763 (3.E-11)
MDNAIWHKSSTLKIPTNIGFAFIPPYTPEMNPIEQVWKEIRKRGFKNKAFRTLEDVMNQLQDVIQGLEKEVIKSIVNRRWTRVLFESR

SEQ ID NO: 561 - DNA, 321 bp, Streptococcus pneumoniae
atgacaattcatctatctagcctagggcaggtctatctcgtgtgtgggaaaactgatatgagacaaggaatcgattcactggcttatctcgttaaaacccactttgaattggatcctttctccggtcaaatctttctcttttgtggtggacgtaaagaccgctttaaagtcctttactgggatggtcaaggattttggctactatataaacgctttgagaacggcagactgacttggcccagtacagaaaaggatgtcaaagctctcgcacctgaacaagtagattggctgatgaaaggcttttctatcactccaaaaata

SEQ ID NO: 562 - protein, 107 aa, Streptococcus pneumoniae
  IS66 family element, Orf2, interruption; Cellular location: cytoplasm; Similar to strain R6 sequence 15903342 (1.E-38)
MTIHLSSLGQVYLVCGKTDMRQGIDSLAYLVKTHFELDPFSGQIFLFCGGRKDRFKVLYWDGQGFWLLYKRFENGRLTWPSTEKDVKALAPEQVDWLMKGFSITPKI

SEQ ID NO: 563 - DNA, 198 bp, Streptococcus pneumoniae
ttggaggatattttaatgccacaacctattgttcctgtagagattccacaatctcgtcgttttgattctaaaaagagaaatgatattctacttaaaattcgtattggcaagcttgaagtaagtttttttcaatctctcaatctcgaaatgatagaacagcttttggataaggtgttgctctatgacaattcatctatc

SEQ ID NO: 564 - protein, 66 aa, Streptococcus pneumoniae
  IS66 family element, Orf1; Cellular location: cytoplasm; Similar to strain R6 sequence 15903763 (0.E+01)
MEDILMPQPIVPVEIPQSRRFDSKKRNDILLKIRIGKLEVSFFQSLNLEMIEQLLDKVLLYDNSSI

SEQ ID NO: 565 - DNA, 1982 bp, Streptococcus pneumoniae
atgatgaaaagttcaaaactatttgcccttgcgggcgtgacattattggcggcgactactttagctgcatgctctggatcaggttcaagcactaaaggtgagaagacattctcatacatttatgagacagaccctgataacctcaactatttgacaactgctaaggctgcgacacaaatattaccagtaacgtggttgatggtttgctagaaaatgatcgctacgggaactttgtgccgtctatggctgaggattggtctgtatccaaggatggattgacttacacttatactatccgtaaggatgcaaaatggtatacttctgaaggtgaagaatacgcggcagtcaaagctcaagactttgtaacaggattaaaatatgctgctgataaaaaatcagatgctctttaccttgttcaagaatcaatcaaagggttggatgcctatgtaaaaggggaaatcaaagatttctcacaagtaggaattaaggctctggatgaacagacagttcagtacactttgaacaaaccagaaagcttctggaattctaagacaaccatgggtgtgcttgcgccagttaatgaagagtttttgaattcaaaaggagatgattttgccaaagctacggatccaagtagtctcttgtataacggtccttatttgttgaaatccattgtgaccaaatcctctgttgaatttgcgaaaaatccgaactactgggataaggacaatgtgcatgttgacaaagttaaattgtcattctgggatggtcaagataccagcaaacctgcagaaaactttaaagatggtagccttacagcagctcgtctctatccaacaagtgcaagtttcgcagaacttgagaagagtatgaaggacaatattgtctatactcaacaagactctattacgtatctagttggtacaaatattgaccgtcagtcctataaatacacatctaagaccagcgacgaacaaaaggcatcgactaaaaaggctctcttaaacaaggatttccgtcaggctattgcctttggatttgaccgtacagcctatgcctctcagttgaatggacaaactggagcaagtaaaatcttgcgtaatctctttgtgccaccaacatttgttcaagcagatggtaaaaactttggcgatatggtcaaagagaaattggtcacttatggggatgaatggaaggatgttaatcttgcagattctcaggatggtctttacaatccagaaaaagccaaggctgaatttgctaaagctaaatcagccttacaagcagaaggagtccaattcccaattcatttggatatgccagttgaccaaacagcaactacaaaagttcagcgcgtccaatctatgaaacaatccttggaagcaactttaggagctgataatgtcattattgatattcaacaactacaaaaagacgaagtaaacaatattacatattttgctgaaaatgctgctggcgaagactgggatttatcagataatgtcggttggggtccagactttgccgatccatcaacctaccttgatattatcaaaccttctgtaggagaaagtactaaaacatatttagggtttgactcaggggaagataatgtagctgctaaaaaagtaggtctatatgactacgaaaaattggttactgaggctggtgatgagactacagatgttgctaaacgctatgataaatacgctgcagcccaagcttggttgacagatagtgctttgattattccaactacatctcgtacagggcgtccaatcttgtctaagatggtaccatttacaataccatttgcattgtcaggaaataaaggtacaagtgaaccagtcttgtataaatacttggaacttcaagacaaggcagtcactgtagatgaataccaaaaagctcaggaaaaatggatgaaagaaaaagaagagtctaataaaaaggctcaagaagatctcgcaaaacatgtgaaa

SEQ ID NO: 566 - protein, 69 aa, Streptococcus pneumoniae
  oligopeptide ABC transporter, oligopeptide-binding protein AliA FRAMESH
MMKSSKLFALAGVTLLAATTLAACSGSGSSTKGEKTFSYIYETDPDNLNYLTTAKAATQILPVTWLMVC

SEQ ID NO: 567 - DNA, 1791 bp, Streptococcus pneumoniae
gtggttgatggtttgctagaaaatgatcgctacgggaactttgtgccgtctatggctgaggattggtctgtatccaaggatggattgacttacacttatactatccgtaaggatgcaaaatggtatacttctgaaggtgaagaatacgcggcagtcaaagctcaagactttgtaacaggattaaaatatgctgctgataaaaaatcagatgctctttaccttgttcaagaatcaatcaaagggttggatgcctatgtaaaaggggaaatcaaagatttctcacaagtaggaattaaggctctggatgaacagacagttcagtacactttgaacaaaccagaaagcttctggaattctaagacaaccatgggtgtgcttgcgccagttaatgaagagtttttgaattcaaaaggagatgattttgccaaagctacggatccaagtagtctcttgtataacggtccttatttgttgaaatccattgtgaccaaatcctctgttgaatttgcgaaaaatccgaactactgggataaggacaatgtgcatgttgacaaagttaaattgtcattctgggatggtcaagataccagcaaacctgcagaaaactttaaagatggtagccttacagcagctcgtctctatccaacaagtgcaagtttcgcagaacttgagaagagtatgaaggacaatattgtctatactcaacaagactctattacgtatctagttggtacaaatattgaccgtcagtcctataaatacacatctaagaccagcgacgaacaaaaggcatcgactaaaaaggctctcttaaacaaggatttccgtcaggctattgcctttggatttgaccgtacagcctatgcctctcagttgaatggacaaactggagcaagtaaaatcttgcgtaatctctttgtgccaccaacatttgttcaagcagatggtaaaaactttggcgatatggtcaaagagaaattggtcacttatggggatgaatggaaggatgttaatcttgcagattctcaggatggtctttacaatccagaaaaagccaaggctgaatttgctaaagctaaatcagccttacaagcagaaggagtccaattcccaattcatttggatatgccagttgaccaaacagcaactacaaaagttcagcgcgtccaatctatgaaacaatccttggaagcaactttaggagctgataatgtcattattgatattcaacaactacaaaaagacgaagtaaacaatattacatattttgctgaaaatgctgctggcgaagactgggatttatcagataatgtcggttggggtccagactttgccgatccatcaacctaccttgatattatcaaaccttctgtaggagaaagtactaaaacatatttagggtttgactcaggggaagataatgtagctgctaaaaaagtaggtctatatgactacgaaaaattggttactgaggctggtgatgagactacagatgttgctaaacgctatgataaatacgctgcagcccaagcttggttgacagatagtgctttgattattccaactacatctcgtacagggcgtccaatcttgtctaagatggtaccatttacaataccatttgcattgtcaggaaataaaggtacaagtgaaccagtcttgtataaatacttggaacttcaagacaaggcagtcactgtagatgaataccaaaaagctcaggaaaaatggatgaaagaaaaagaagagtctaataaaaaggctcaagaagatctcgcaaaacatgtgaaa

SEQ ID NO: 568 - protein, 597 aa, Streptococcus pneumoniae
  oligopeptide-binding protein alia precursor (exported protein 1)
MVDGLLENDRYGNFVPSMAEDWSVSKDGLTYTYTIRKDAKWYTSEGEEYAAVKAQDFVTGLKYAADKKSDALYLVQESIKGLDAYVKGEIKDFSQVGIKALDEQTVQYTLNKPESFWNSKTTMGVLAPVNEEFLNSKGDDFAKATDPSSLLYNGPYLLKSIVTKSSVEFAKNPNYWDKDNVHVDKVKLSFWDGQDTSKPAENFKDGSLTAARLYPTSASFAELEKSMKDNIVYTQQDSITYLVGTNIDRQSYKYTSKTSDEQKASTKKALLNKDFRQAIAFGFDRTAYASQLNGQTGASKILRNLFVPPTFVQADGKNFGDMVKEKLVTYGDEWKDVNLADSQDGLYNPEKAKAEFAKAKSALQAEGVQFPIHLDMPVDQTATTKVQRVQSMKQSLEATLGADNVIIDIQQLQKDEVNNITYFAENAAGEDWDLSDNVGWGPDFADPSTYLDIIKPSVGESTKTYLGFDSGEDNVAAKKVGLYDYEKLVTEAGDETTDVAKRYDKYAAAQAWLTDSALIIPTTSRTGRPILSKMVPFTIPFALSGNKGTSEPVLYKYLELQDKAVTVDEYQKAQEKWMKEKEESNKKAQEDLAKHVK

SEQ ID NO: 569 - DNA, 117 bp, Streptococcus pneumoniae
ttgtttcctattgctttctcagctattatttgttatattaaaagtataattattttttatttatcagagttaagcattgcactttcagaggaaggagtattttttaaaaagaaaatg

SEQ ID NO: 570 - protein, 39 aa, Streptococcus pneumoniae
  hypothetical protein; Cellular location: membrane
MFPIAFSAIICYIKSIIIFYLSELSIALSEEGVFFKKKM

SEQ ID NO: 571 - DNA, 5301 bp, Streptococcus pneumoniae
atgaataaaggattatttgaaaaacgttgtaaatatagtattcggaaattttcattaggtgttgcttctgttatgattggagctgcattctttgggacaagtccggttcttgcagatagcgtgcagtctggttccacggcgaacttaccagctgatttagctactgctcttgcaacagcaaaagagaatgatgggcgtgattttgaagcgcctaaggtgggagaagaccaaggttctccagaagttacagatggacctaagacagaagaagaactattagcacttgaaaaagaaaaaccggctgaagaaaaaccaaaagaggataaacctgcagctgctaaacctgaaacacctaagacggtaacccctgaatggcaaacggtagcgaataaagagcaacagggaacagtcactatccgagaagaaaaaggtgtccgctacaaccaactatcctcaactgctcaaaatgataacgcaggcaaaccagccctgtttgaaaagaagggcttgaccgttgatgccaatggaaatgcaactgttgatttaaccttcaaagatgattctgaaaagggcaaatcacgctttggtgtctttttgaaatttaaagataccaagaataatgtttttgtcggttatgacaaggatggctggttctgggagtataaatctccaacaactagcacttggtatagaggtagtcgtgttgctgctcctgaaacaggatcaacaaaccgtctctctatcactctcaagtcagacggtcagctaaatgccagcaataatgatgtcaatctctttgacacagtgactctaccagctgcggtcaatgaccatcttaaaaatgagaagaagattcttctcaaggcgggctcttatgacgatgagcgaacagttgttagcgttaaaacggataaccaagagggggtaaaaacagaggatacccctgctgaaaaagaaacaggtcctgaagttgatgatagcaaggtgacttatgacacgattcagtctaaggtcctcaaagcagtgattgaccaagccttccctcgtgtcaaggaatacagcttgaacgggcatactttgccaggacaggtgcaacagttcaaccaagtctttatcaataaccaccgaatcacccctgaagtcacttataagaaaatcaatgagacaacagcagagtacttgatgaagcttcgcgatgatgctcacttaatcaatgcggaaatgacagtacgcttgcaagttgtagacaatcaattgcactttgatgtgactaagattgtcaaccacaatcaagtcactccaggtcaaaagattgatgacgaaagcaaactactttcttctattagtttcctcggcaatgctttagtctctgtttctagtaatcaaactggtgctaagtttgatggggcaaccatgtcaaacaatacgcatgtcagcggagatgatcatatcgatgtaaccaatccaatgaaggatttggctaagggttacatgtatggatttgtttctacagataagcttgctgctggtgtttggagtaactctcaaaacagctatggtggtggttcgaatgactggactcgtttgacagcttataaagaaacagtcggaaatgccaactatgtaggaatccacagctctgaatggcaatgggaaaaagcttataagggcattgttttcccagaatacacgaaggaacttccaagtgctaaggttgttatcactgaagatgccaatgcagacaagaacgttgattggcaagatggtgccattgcttatcgtagcattatgaacaatcctcaaggttgggaaaaagttaaggatatcacagcttaccgtatcgcgatgaactttggttctcaagcacaaaacccattccttatgaccttggatggtatcaagaaaatcaatctccatacagatggtcttgggcaaggtgttctccttaaaggatatggtagcgaaggccatgactctggtcacttgaactatgctgatattggtaagcgtatcggtggtgtcgaagacttcaagaccctaattgagaaggctaagaaatatggagctcatctaggtatccacgttaacgcttcagaaacttatcctgagtctaaatacttcaatgaaaaaattctccgtaagaatccagatggaagctatagctatggttggaactggctagatcaaggtatcaacattgatgctgcctatgacctagctcatggtcgtttggcacgttgggaagatttgaagaaaaaacttggtgacggtctcgactttatctatgtggacgtttggggtaatggtcaatcaggtgataacggtgcctgggctacccacgttcttgctaaagaaattaacaaacaaggctggcgctttgcgatcgagtggggccatggtggtgagtacgactctaccttccatcactgggcagctgacttgacctacggtggctacaccaataaaggtatcaacagtgccatcacccgctttatccgtaaccaccaaaaagatgcttgggtaggggactacagaagttatggtggtgcagccaactatccactgctaggtggctacagcatgaaagactttgaaggctggcagggaagaagtgactacaatggctatgtaaccaacttatttgcccatgacgtcatgactaagtacttccaacacttcactgtaagtaaatgggaaaatggtacaccggtgactatgaccgataacggtagcacctataaatggactccagaaatgcgagtggaattggtagatgctgacaataataaagtagttgtaactcgtaagtcaaatgatgtcaatagtccacaatatcgcgaacgtacagtaacgctcaacggacgtgtcatccaagatggttcagcttacttgactccttggaactgggatgcaaatggtaagaaactttctactgataaggaaaagatgtactacttcaatacgcaggccggtgcaacaacttggacccttccaagcgattgggcaaagagcaaggtttacctttacaagctaactgaccaaggtaagacagaagagcaagaactaactgtaaaagatggtaaaattaccctagatcttctagcaaatcaaccatacgttctctatcgttcgaaacaaactaatcctgaaatgtcatggagtgaaggcatgcacatctatgaccaaggatttaatagcggtaccttgaaacattggaccatttcaggcgatgcttctaaggcagaaattgtcaagtctcaaggggcaaacgatatgcttcgtattcaaggaaacaaagaaaaagttagtctcactcagaaattaactggcttgaaaccaaataccaagtatgccgtttatgttggtgtagataaccgtagtaatgccaaggcaagtatcactgtgaatactggtgaaaaagaagtgactacttataccaataagtctctcgcgctcaactatgttaaggcctacgcccacaatacacgtcgtgacaatgctacagttgacgatacaagttacttccaaaacatgtacgccttctttacaactggagcggacgtctcaaatgttactctgacattgagtcgtgaagctggtgatcaagcaacttactttgatgaaattcgtacctttgaaaacaattcaagcatgtacggagacaagcatgatacaggtaaaggcaccttcaagcaagactttgaaaatgttgctcagggtatcttcccatttgtagtgggtggtgtcgaaggtgttgaagataaccgcactcacttgtctgaaaaacacaatccatatacacaacgtggttggaatggtaagaaagtcgatgatgttatcgaaggaaattggtcactcaagacaaatggactagtgagccgtcgtaacttggtttaccaaaccatcccacaaaacttccgttttgaagcaggtaagacctaccgtgtaacctttgaatacgaagcaggatcagacaatacctatgcttttgtagtcggtaagggagaattccagtcaggtcgtcgtggtactcaagcaagcaacttggaaatgcatgaattgccaaatacttggacagattctaagaaagccaagaaggcaaccttccttgtgacaggtgcagaaacaggcgatacttgggtaggtatctactcaactggaaatgcaagtaatactcgtggtgattctggtggaaatgccaacttccgtggttataacgacttcatgatggataatcttcaaatcgaagaaattaccctaacaggtaagatgttgacagaaaatgctctgaagaactacttgccaacggttgccatgactaactacaccaaagagtctatggatgctttgaaagaggcggtctttaacctcagtcaggccgatgatgatatcagtgtggaagaagcgcgtgcagagattgccaagattgaagctttgaagaatgctttggttcagaagaagacggctttggtagcagatgactttgcaagtcttacagctcctgctcaggctcaagaaggtcttgcaaatgcctttgatggcaatgtgtctagtctatggcatacatcttggaatggtggagatgtaggcaagcctgcaactatggtcttgaaagaaccaactgaaatcacaggacttcgctatgttccgcgtggatcaggttcaaatggtaacttgcgagatgtgaaacttgttgtgacagatgagtctggcaaggagcatacctttactgcaactgattggccaaataacaacaaaccaaaagatattgactttggtaagacaatcaaggctaagaaaattgtccttactggtaccaagacatacggagatggtggagataaataccaatctgcagcggaacttatctttactcgtccacaggtagcagaaacacctcttgacttgtcaggctatgaagcagctttggttaaggctcagaaattaacagacaaagacaatcaagaggaagtagctagcgttcaggcaagcatgaaatatgcgacggataaccatctcttgacggaaagaatggtggaatactttgcagattatctcaaccaattaaaagattctgctacgaaaccagatgctccaactgtagagaaacctgagtttaaacttagatctttagcttccgagcaaggtaagacgccagattataagcaagaaatagctagaccagaaacacctgaacaaatcttgccagcaacaggtgagagtcaatctgacacagccctcatcctagcaagtgttagtctagccctatctgctctctttgtagtaaaaacgaagaaagac

SEQ ID NO: 572 - protein, 1767 aa, Streptococcus pneumoniae
  cell wall surface anchor family protein FRAMESHIFT; Cellular location: Peptidoglycan-bound (LPXTG); Feature of note: RGD motif; Similar to strain R6 sequence 15902372 (0.E+01)
MNKGLFEKRCKYSIRKFSLGVASVMIGAAFFGTSPVLADSVQSGSTANLPADLATALATAKENDGRDFEAPKVGEDQGSPEVTDGPKTEEELLALEKEKPAEEKPKEDKPAAAKPETPKTVTPEWQTVANKEQQGTVTIREEKGVRYNQLSSTAQNDNAGKPALFEKKGLTVDANGNATVDLTFKDDSEKGKSRFGVFLKFKDTKNNVFVGYDKDGWFWEYKSPTTSTWYRGSRVAAPETGSTNRLSITLKSDGQLNASNNDVNLFDTVTLPAAVNDHLKNEKKILLKAGSYDDERTVVSVKTDNQEGVKTEDTPAEKETGPEVDDSKVTYDTIQSKVLKAVIDQAFPRVKEYSLNGHTLPGQVQQFNQVFINNHRITPEVTYKKINETTAEYLMKLRDDAHLINAEMTVRLQVVDNQLHFDVTKIVNHNQVTPGQKIDDESKLLSSISFLGNALVSVSSNQTGAKFDGATMSNNTHVSGDDHIDVTNPMKDLAKGYMYGFVSTDKLAAGVWSNSQNSYGGGSNDWTRLTAYKETVGNANYVGIHSSEWQWEKAYKGIVFPEYTKELPSAKVVITEDANADKNVDWQDGAIAYRSIMNNPQGWEKVKDITAYRIAMNFGSQAQNPFLMTLDGIKKINLHTDGLGQGVLLKGYGSEGHDSGHLNYADIGKRIGGVEDFKTLIEKAKKYGAHLGIHVNASETYPESKYFNEKILRKNPDGSYSYGWNWLDQGINIDAAYDLAHGRLARWEDLKKKLGDGLDFIYVDVWGNGQSGDNGAWATHVLAKEINKQGWRFAIEWGHGGEYDSTFHHWAADLTYGGYTNKGINSAITRFIRNHQKDAWVGDYRSYGGAANYPLLGGYSMKDFEGWQGRSDYNGYVTNLFAHDVMTKYFQHFTVSKWENGTPVTMTDNGSTYKWTPEMRVELVDADNNKVVVTRKSNDVNSPQYRERTVTLNGRVIQDGSAYLTPWNWDANGKKLSTDKEKMYYFNTQAGATTWTLPSDWAKSKVYLYKLTDQGKTEEQELTVKDGKITLDLLANQPYVLYRSKQTNPEMSWSEGMHIYDQGFNSGTLKHWTISGDASKAEIVKSQGANDMLRIQGNKEKVSLTQKLTGLKPNTKYAVYVGVDNRSNAKASITVNTGEKEVTTYTNKSLALNYVKAYAHNTRRDNATVDDTSYFQNMYAFFTTGADVSNVTLTLSREAGDQATYFDEIRTFENNSSMYGDKHDTGKGTFKQDFENVAQGIFPFVVGGVEGVEDNRTHLSEKHNPYTQRGWNGKKVDDVIEGNWSLKTNGLVSRRNLVYQTIPQNFRFEAGKTYRVTFEYEAGSDNTYAFVVGKGEFQSGRRGTQASNLEMHELPNTWTDSKKAKKATFLVTGAETGDTWVGIYSTGNASNTRGDSGGNANFRGYNDFMMDNLQIEEITLTGKMLTENALKNYLPTVAMTNYTKESMDALKEAVFNLSQADDDISVEEARAEIAKIEALKNALVQKKTALVADDFASLTAPAQAQEGLANAFDGNVSSLWHTSWNGGDVGKPATMVLKEPTEITGLRYVPRGSGSNGNLRDVKLVVTDESGKEHTFTATDWPNNNKPKDIDFGKTIKAKKIVLTGTKTYGDGGDKYQSAAELIFTRPQVAETPLDLSGYEAALVKAQKLTDKDNQEEVASVQASMKYATDNHLLTERMVEYFADYLNQLKDSATKPDAPTVEKPEFKLRSLASEQGKTPDYKQEIARPETPEQILPATGESQSDTALILASVSLALSALFVVKTKKD

SEQ ID NO: 573 - DNA, 2157 bp, Streptococcus pneumoniae
atgaacaaaccaacgattctgcgcctaatcaagtatctgagcattagcttcttaagcttggttatcgcagccattgtcttaggcggaggagtttttttctactacgttagcaaggctcctagcctatccgagagtaaactagttgcaacaacttctagtaaaatctacgacaataaaaatcaactcattgctgacttgggttctgaacgccgcgtcaatgcccaagctaatgatattcccacagatttggttaaggcaatcgtttctatcgaagaccatcgcttcttcgaccacagggggattgataccatccgtatcctgggagctttcttgcgcaatctgcaaagcaattccctccaaggtggatcaactctcacccaacagttgattaagttgacttacttttcaacttcgacttccgaccagactatttctcgtaaggctcaggaagcttggttagcgattcagttagaacaaaaagcaaccaagcaagaaatcttgacctactatataaataaggtctacatgtctaatgggaactatggaatgcagacagcagctcaaaactactatggtaaagacctcaataatttaagtttacctcagttagccttgctggctggaatgcctcaggcaccaaaccaatatgacccctattcacatccagaagcagcccaagaccgccgaaacttggtcttatctgaaatgaaaaatcaaggctacatctctgctgaacagtatgagaaagcagtcaatacaccaattactgatggactacaaagtctcaaatcagcaagtaattaccctgcttacatggataattacctcaaggaagtcatcaatcaagttgaagaagaaacaggctataacctactcacaactgggatggatgtctacacaaatgtagaccaagaagctcaaaaacatctgtgggatatttacaatacagacgaatacgttgcctatccagacgatgaattgcaagtcgcttctaccattgttgatgtttctaacggtaaagtcattgcccagctaggagcacgccatcagtcaagtaatgtttccttcggaattaaccaagcagtagaaacaaaccgcgactggggatcaactatgaaaccgatcacagactatgctcctgccttggagtacggtgtctacgattcaactgctactatcgttcacgatgagccctataactaccctgggacaaatactcctgtttataactgggataggggctactttggcaacatcaccttgcaatacgccctgcaacaatcgcgaaacgtcccagccgtggaaactctaaacaaggtcggactcaaccgcgccaagactttcctaaatggtctaggaatcgactacccaagtattcactactcaaatgccatttcaagtaacacaaccgaatcagacaaaaaatatggagcaagtagtgaaaagatggctgctgcttacgctgcctttgcaaatggtggaacttactataaaccaatgtatatccataaagtcgtctttagtgatgggagtgaaaaagagttctctaatgtcggaactcgtgccatgaaggaaacgacagcctatatgatgaccgacatgatgaaaacagtcttgacttatggaactggacgaaatgcctatcttgcttggctccctcaggctggtaaaacaggaacctctaactatacagacgaggaaattgaaaaccacatcaagacctctcaatttgtagcacctgatgaactatttgctggctatacgcgtaaatattcaatggctgtatggacaggctattctaaccgtctgacaccacttgtaggcaatggccttacggtcgctgccaaagtttaccgctctatgatgacctacctgtctgaaggaagcaatccagaagattggaatataccagaggggctctacagaaatggagaattcgtatttaaaaatggtgctcgttctacgtggaactcacctgctccacaacaacccccatcaactgaaagttcaagctcatcatcagatagttcaacttcacagtctagctcaaccactccaagcacaaataatagtacgactaccaatcctaacaataatacgcaacaatcaaatacaacccctgatcaacaaaatcagaatcctcaaccagcacaacca

SEQ ID NO: 574 - protein, 719 aa, Streptococcus pneumoniae
  penicillin-binding protein 1A (pbp1A); Cellular location: outside; Similar to strain R6 sequence 15902373 (0.E+01)
MNKPTILRLIKYLSISFLSLVIAAIVLGGGVFFYYVSKAPSLSESKLVATTSSKIYDNKNQLIADLGSERRVNAQANDIPTDLVKAIVSIEDHRFFDHRGIDTIRILGAFLRNLQSNSLQGGSTLTQQLIKLTYFSTSTSDQTISRKAQEAWLAIQLEQKATKQEILTYYINKVYMSNGNYGMQTAAQNYYGKDLNNLSLPQLALLAGMPQAPNQYDPYSHPEAAQDRRNLVLSEMKNQGYISAEQYEKAVNTPITDGLQSLKSASNYPAYMDNYLKEVINQVEEETGYNLLTTGMDVYTNVDQEAQKHLWDIYNTDEYVAYPDDELQVASTIVDVSNGKVIAQLGARHQSSNVSFGINQAVETNRDWGSTMKPITDYAPALEYGVYDSTATIVHDEPYNYPGTNTPVYNWDRGYFGNITLQYALQQSRNVPAVETLNKVGLNRAKTFLNGLGIDYPSIHYSNAISSNTTESDKKYGASSEKMAAAYAAFANGGTYYKPMYIHKVVFSDGSEKEFSNVGTRAMKETTAYMMTDMMKTVLTYGTGRNAYLAWLPQAGKTGTSNYTDEEIENHIKTSQFVAPDELFAGYTRKYSMAVWTGYSNRLTPLVGNGLTVAAKVYRSMMTYLSEGSNPEDWNIPEGLYRNGEFVFKNGARSTWNSPAPQQPPSTESSSSSSDSSTSQSSSTTPSTNNSTTTNPNNNTQQSNTTPDQQNQNPQPAQP

SEQ ID NO: 575 - DNA, 594 bp, Streptococcus pneumoniae
atggtcaactatccacataaagtttcatcacaaaaaagacaaacatctctttctcaacccaaaaatttcgcaaatcgaggaatgtcttttgaaaagatgatcaatgctaccaacgactactatttgtctcagggcttggctgttatacataagaaaccaactcctattcaaatcgtacaagtggactatccacaacgaagtcgtgccaagattgttgaagcctattttcgacaagcttcaacgacggactattctggcgtttataatggatattacatcgactttgaagtcaaggaaacaaaacaaaaacgtgcgattccgatgaaaaattttcatccacatcagattcagcatatggaacaagtccttgcccaacaaggaatctgctttgtccttcttcacttttcttctcagcaagaaacctacttattgccggcattcgatttgattcgcttctatcatcaagataagggacaaaaatcaatgccacttgaatatattcgagaatatggatatgaaatcaaggctggtgccttccctcaaattccttatctcaatgttatcaaagaacatttattaggtggtaaaacaaga

SEQ ID NO: 576 - protein, 198 aa, Streptococcus pneumoniae
  recombination protein U (recU); Cellular location: cytoplasm; Similar to strain R6 sequence 15902374 (e-115)
MVNYPHKVSSQKRQTSLSQPKNFANRGMSFEKMINATNDYYLSQGLAVIHKKPTPIQIVQVDYPQRSRAKIVEAYFRQASTTDYSGVYNGYYIDFEVKETKQKRAIPMKNFHPHQIQHMEQVLAQQGICFVLLHFSSQQETYLLPAFDLIRFYHQDKGQKSMPLEYIREYGYEIKAGAFPQIPYLNVIKEHLLGGKTR

SEQ ID NO: 577 - DNA, 525 bp, Streptococcus pneumoniae
atggctacagctttggttttaggctattctgcttttgatttgggtttattttctgataaggatcctcgtcttaaattgattaaaaaagcgatacgtaaagatttagaggctatggcagcagatggggtgtcttggcttgtgtttacagggagtttgggttttgaatattgggttttagaggttgctcaggagatgaaaactgaatacggtttccagttggccaccatttttgcttttgaaacccatggggaaaattggaatgaaggcaatcagatgaaactgagtcgctttaagcaggtagactttgtcaaatatgcctatcctcgctatgaacacaaggggcagttaagagattaccagcagtttttgctggaaaacacgactagttcctatcttttttatgatgaagaaaatgaaacaaaactagcttatttttaccaaaagatgaaaaatcaagaggactattttataaagagattaacatttgatgaattaaatgaacttgctgaaaatttttccgaaaat

SEQ ID NO: 578 - protein, 175 aa, Streptococcus pneumoniae
  conserved hypothetical protein; Cellular location: cytoplasm; Similar to strain R6 sequence 15902375 (e-100)
MATALVLGYSAFDLGLFSDKDPRLKLIKKAIRKDLEAMAADGVSWLVFTGSLGFEYWVLEVAQEMKTEYGFQLATIFAFETHGENWNEGNQMKLSRFKQVDFVKYAYPRYEHKGQLRDYQQFLLENTTSSYLFYDEENETKLAYFYQKMKNQEDYFIKRLTFDELNELAENFSEN

SEQ ID NO: 579 - DNA, 327 bp, Streptococcus pneumoniae
atggcaagtattattttttcagcgaaagatatttttgaacaagagtttggacgtgaggtccgtggctataataaagtagaagttgacgagtttttagacgatgtcatcaaggactatgaaacctatgctgccttggtcaagtcacttcgtcaggaaattgcggatttgaaggaagaattaactcgtaaaccgaaaccttcaccagttcaagcagaaccccttgaagcggcaattacaagttctatgacgaattttgatattttgaaacgcctgaatagattggaaaaagaagtttttggtaaacaaattttagataactcagatttt

SEQ ID NO: 580 - protein, 109 aa, Streptococcus pneumoniae
  conserved hypothetical protein; Cellular location: cytoplasm; Similar to strain R6 sequence 15902376 (2.E-57)
MASIIFSAKDIFEQEFGREVRGYNKVEVDEFLDDVIKDYETYAALVKSLRQEIADLKEELTRKPKPSPVQAEPLEAAITSSMTNFDILKRLNRLEKEVFGKQILDNSDF

SEQ ID NO: 581 - DNA, 1155 bp, Streptococcus pneumoniae
atgaaaaaagaatttaatttaattgcaactgtggcagcagggcttgaggctgtcgttggtcgtgaagtgcgagagttgggctacgattgtcaggttgaaaatggacgtgttcgttttcaaggagacgtgagagctattatcgaaaccaacctttggcttcgggcagcagatcgtatcaaaattatcgtaggaacgttcccagctaagacttttgaagagctatttcagggagttttcgctttggattgggaaaattatttaccacttggagctcggttcccgatttcaaaagctaaatgtgttaagtccaaacttcacaatgagcccagtgttcaggctatttctaagaaagctgttgtcaagaaattgcagaaacactatgctcgcccagaaggggttcctctgatggagaatggcccagagtttaagattgaggtctctattctcaaagatgtggcaactgtcatgattgatacgaccgggtctagcctctttaaacgtggttatcgtaccgaaaaaggtggcgctcctatcaaggaaaatatggcagcagccattttacaactttctaactggtatccagacaagcctttgattgatccgacctgtggttcggggactttctgtattgaggcagttatgattgctagaaagatggcgccaggtcttcgtcgctcttttgcatttgaggaatggaactggatcagcgatcgcttgattcaagaagtgcgcacagaagcggctaaaaaagtagaccgtgagcttgagctggatatcatgggctgtgatattgatgctcgcatggtggaaattgctaaggccaatgctcaggtagctggtgttgcaggagacattacttttaagcagatgcgcgtgcaggatttacgttccgataaaatcaatggagtaatcatttccaatccgccttatggtgaacgtttgtcagatgatgcaggggtgaccaagctctatgctgagatggggcaagtatttgcaccgctgaaaacttggagcaaatttatcctgactagtgatgaagcttttgaaagcaagtatggtagccaagcagataagaagcgtaagttatacaacggaaccttgaaagtggatctatatcaatattttggtcagcgtgtcaaacggcaagaggtaaaa

SEQ ID NO: 582 - protein, 385 aa, Streptococcus pneumoniae
  conserved hypothetical protein; Cellular location: outside; Similar to strain R6 sequence 15902377 (0.E+01)
MKKEFNLIATVAAGLEAVVGREVRELGYDCQVENGRVRFQGDVRAIIETNLWLRAADRIKIIVGTFPAKTFEELFQGVFALDWENYLPLGARFPISKAKCVKSKLHNEPSVQAISKKAVVKKLQKHYARPEGVPLMENGPEFKIEVSILKDVATVMIDTTGSSLFKRGYRTEKGGAPIKENMAAAILQLSNWYPDKPLIDPTCGSGTFCIEAVMIARKMAPGLRRSFAFEEWNWISDRLIQEVRTEAAKKVDRELELDIMGCDIDARMVEIAKANAQVAGVAGDITFKQMRVQDLRSDKINGVIISNPPYGERLSDDAGVTKLYAEMGQVFAPLKTWSKFILTSDEAFESKYGSQADKKRKLYNGTLKVDLYQYFGQRVKRQEVK

SEQ ID NO: 583 - DNA, 1392 bp, Streptococcus pneumoniae
atgagtaaaaaaagacgaaatcgtcataaaaaagaaggtcaagaaccgcaatttgattttgatgaagcaaaagagctaacagttggtcaagctattcgtaaaaatgaagaagtggaatcaggagtcttgcctgaggattccattttggacaagtatgttaagcaacacagagatgaaattgaggcggataagtttgcgactcgtcaatacaaaaaagaggagttcgttgaaactcagagtctggatgatttaattcaagagatgcgtgaggctgtagagaagtcagaagcttcttcggaggaagttccatcttctgaagacatcttactacccttgcctctggacgatgaggagcaaggcttggatcctctattgctagatgatgaaaatccaacagaaatgactgaagaagtggaagaggagcaaaacctttctcgtctggatcaagaggactcagaaaagaaaagtaaaaaaggctttattttgaccgttttggcgcttgtatcagtaattatttgtgtcagtgcttattatgtctaccgtcaagtggctcgttcgactaaggaaattgaaacttctcaatcaactacagccaatcaatcggatgtggatgattttaatacactttatgacgccttttacacagatagcaataaaacggctttgaaaaatagccagtttgataaactgagtcaactcaagactttacttgataagctggaaggtagtcgtgaacatacgcttgccaaatctaaatatgatagtctagcaacgcaaatcaaggctattcaagatgtcaatgctcaatttgagaaaccagctattgtggatggtgtgttggataccaatgccaaagccaaatcggatgctaaatttacggatattaaaactggaaatacggagcttgataaagtgctagataaggctatcagtcttggtaagagccagcaaacaagtacttctagctcaagttcaagtcaaactagcagctcaagttcaagtcaagcaagttcaaatacgactagtgagccaaaaccaagtagttcaaatgagactagaagtagtcgcagtgaagtcaatatgggtctctcgagtgcaggggttgctgttcaaagaagtgccagtcgtgttgcctataatcagtctgctattgatgatagtaataactctgcctgggattttgcggatggtgtcttggaacaaattctagcgacttcacgttcacgtggctatatcactggagaccaatatatccttgaacgtgtcaatatcgttaacggcaatggttattacaacctctacaagccagatggaacctatctctttacccttaactgtaagacaggctactttgtcggaaatggcgctggtcatgcggatgacttagattac

SEQ ID NO: 584 - protein, 464 aa, Streptococcus pneumoniae
  hypothetical protein; Cellular location: membrane; Similar to strain R6 sequence 15902378 (0.E+01)
MSKKRRNRHKKEGQEPQFDFDEAKELTVGQAIRKNEEVESGVLPEDSILDKYVKQHRDEIEADKFATRQYKKEEFVETQSLDDLIQEMREAVEKSEASSEEVPSSEDILLPLPLDDEEQGLDPLLLDDENPTEMTEEVEEEQNLSRLDQEDSEKKSKKGFILTVLALVSVIICVSAYYVYRQVARSTKEIETSQSTTANQSDVDDFNTLYDAFYTDSNKTALKNSQFDKLSQLKTLLDKLEGSREHTLAKSKYDSLATQIKAIQDVNAQFEKPAIVDGVLDTNAKAKSDAKFTDIKTGNTELDKVLDKAISLGKSQQTSTSSSSSSQTSSSSSSQASSNTTSEPKPSSSNETRSSRSEVNMGLSSAGVAVQRSASRVAYNQSAIDDSNNSAWDFADGVLEQILATSRSRGYITGDQYILERVNIVNGNGYYNLYKPDGTYLFTLNCKTGYFVGNGAGHADDLDY

SEQ ID NO: 585 - DNA, 1422 bp, Streptococcus pneumoniae
atgacaaaagctaactttggtgtcgtaggtatggccgtaatgggtcgtaaccttgcccttaatattgaatctcgtggttacacagttgctatctacaaccgtagtaaagaaaaaacggaagatgtgattgcttgccatcctgaaaagaactttgtaccaagctatgacgttgaaagttttgtaaactcaatcgaaaaacctcgtcgtatcatgctgatggttcaagctggacctggtacagatgctactatccaagcccttcttccacaccttgacaagggtgatatcttgattgacggaggaaatactttctacaaagataccatccgtcgtaatgaagaattggcaaactctggtatcaactttatcggtactggggtttctggtggtgaaaaaggtgcccttgaaggtccttctatcatgcctggtggacaaaaagaagcctacgaattggttgcggatgttcttgaagaaatctcagctaaagcaccagaagatggcaaaccatgtgtgacttacatcggtcctgatggagctggtcactatgtgaaaatggttcacaatggtattgagtacggtgatatgcaattgatcgcagaaagctatgacttgatgcaacacttgctaggcctttctgcagaagatatggctgaaatctttactgagtggaacaagggtgaattagacagctacttgattgaaatcacagctgatatcttgagccgtaaagacgatgaaggccaagatggaccaatcgtagactacatccttgatgctgcaggtaacaagggaactggtaaatggactagccaatcatctcttgaccttggtgtaccattgtcactgattactgagtcagtgtttgcacgctacatttcaacttacaaagaagaacgtgtacatgctagcaaggtgcttccaaaaccagctgccttcaactttgaaggagacaaggctgaattgattgaaaagatccgtcaagccctttacttctcaaaaatcatttcatacgcacaaggatttgctcaattgcgtgtagcctctaaagaaaacaactggaacttgccatttgcagatatcgcatctatctggcgtgatggctgtatcatccgttctcgtttcttgcaaaagattacagatgcttacaaccgcgatgcagatcttgccaaccttcttttggacgagtacttcttggatgttactgctaagtaccaacaagcagtacgtgatatcgtagctcttgcggttcaagcaggtgtgccagtgccaactttctcagcagctattacttactttgatagctaccgttcagctgaccttccagctaacttgatccaagcacaacgtgactactttggtgctcacacttaccaacgtaaagacaaagaaggaaccttccactactcttggtatgacgaaaaa

SEQ ID NO: 586 - protein, 474 aa, Streptococcus pneumoniae
  6-phosphogluconate dehydrogenase, decarboxylating (gnd); Cellular location: outside; Similar to strain R6 sequence 15902379 (0.E+01)
MTKANFGVVGMAVMGRNLALNIESRGYTVAIYNRSKEKTEDVIACHPEKNFVPSYDVESFVNSIEKPRRIMLMVQAGPGTDATIQALLPHLDKGDILIDGGNTFYKDTIRRNEELANSGINFIGTGVSGGEKGALEGPSIMPGGQKEAYELVADVLEEISAKAPEDGKPCVTYIGPDGAGHYVKMVHNGIEYGDMQLIAESYDLMQHLLGLSAEDMAEIFTEWNKGELDSYLIEITADILSRKDDEGQDGPIVDYILDAAGNKGTGKWTSQSSLDLGVPLSLITESVFARYISTYKEERVHASKVLPKPAAFNFEGDKAELIEKIRQALYFSKIISYAQGFAQLRVASKENNWNLPFADIASIWRDGCIIRSRFLQKITDAYNRDADLANLLLDEYFLDVTAKYQQAVRDIVALAVQAGVPVPTFSAAITYFDSYRSADLPANLIQAQRDYFGAHTYQRKDKEGTFHYSWYDEK

SEQ ID NO: 587 - DNA, 687 bp, Streptococcus pneumoniae
atggggaaacggattttattacttgagaaagaacgaaatctagctcattttttaagtttggaactccagaaagagcagtatcgggttgatctggtagaggaggggcaaaaagccctctccatggctcttcagacagactatgatttgatgttattgaacgttaatctgggagatatgatggctcaggattttgcagaaaaattgagccgaactaaacctgcctcagtcatcatgattttagatcattgggaagacttgcaagaagagctggaagttgttcagcgttttgcagtttcatacatctataagccagtccttatcgaaaatctggtagcgcgtatttcggcgatcttccgaggtcgggacttcattgatcaacactgcagtctgatgaaagttccaaggacctaccgcaatcttaggatagatgttgaacatcacacggtttatcgtggtgaagagatgattgctctgacacgccgtgagtatgaccttttggcgacacttatgggaagcaagaaagtattgactcgtgagcaattgttggaaagtgtttggaagtatgaaagtgcgaccgagacaaatatcgtagatgtctatatccgctatctacggagcaagcttgatgttaaaggccaaaaaagctacattaaaactgtgcgtggtgttggatataccatgcaagaa

SEQ ID NO: 588 - protein, 229 aa, Streptococcus pneumoniae
  DNA-binding response regulator; Cellular location: cytoplasm; Similar to strain R6 sequence 15902380 (e-127)
MGKRILLLEKERNLAHFLSLELQKEQYRVDLVEEGQKALSMALQTDYDLMLLNVNLGDMMAQDFAEKLSRTKPASVIMILDHWEDLQEELEVVQRFAVSYIYKPVLIENLVARISAIFRGRDFIDQHCSLMKVPRTYRNLRIDVEHHTVYRGEEMIALTRREYDLLATLMGSKKVLTREQLLESVWKYESATETNIVDVYIRYLRSKLDVKGQKSYIKTVRGVGYTMQE

SEQ ID NO: 589 - DNA, 1110 bp, Streptococcus pneumoniae
ttgcagttgtgtaactgcttttttgaggagtttttatatattgacatacaatctagtttttactacaatcgttttaggaggatatataaaatgaagcttttgaaaaaaatgatgcaagtcgcattagcagtctttttctttggtttgctagctacaaatacggtatttgcgaataccacaggtggccgatttgttgataaggataatagaaaatattatgtaaaagatgatcataaagcaatctattggcataaaatagacggtaaaacttactattttggtgatattggagagatggttgtcggttggcaatacttagaaattcctggaacaggttatcgtgataatttattcgataaccaaccagttaatgaaattggccttcaggagaagtggtactattttggacaagatggtgctttgctagaacaaacagataaacaagtactagaggcaaaaacgtctgaaaatacaggaaaagtatacggtgaacaatatcctctatctgctgaaaagagaacttattattttgataataattatgctgtaaagacaggctggatttatgaagagggtcattggtattatttaaataagctaggaaattttggcgatgattcttacaatccactaccaattggtgaagttgctaagggttggactcaagattttcatgttactattgacattgatagaagcaaacctgctccatggtactacctagatgcttcaggtaagatgcttacagattggcaaaaagtaaacggaaaatggtattattttggctcctctggttctatggcaacaggttggaaatatgtacgaggcaaatggtattacttagataataaaaatggtgatatgaaaacaggatggcaataccttggtaacaagtggtactacctccgttcatcaggagctatggtaactggctggtatcaagatggttcaacttggtactatttagatccttctaatggagatatgaaaataggttggacaaaagtaaatggaaaatggtattatctcaattcaaatggagcaatggttacaggtagccaaactatcgatggtaaagtttataatttcgcctcatctggtgagtggatt

SEQ ID NO: 590 - protein, 370 aa, Streptococcus pneumoniae
  choline binding protein C (cbpC); Cellular location: outside; Feature of note: WYY motif; Similar to strain R6 sequence 15902381 (0.E+01)
MQLCNCFFEEFLYIDIQSSFYYNRFRRIYKMKLLKKMMQVALAVFFFGLLATNTVFANTTGGRFVDKDNRKYYVKDDHKAIYWHKIDGKTYYFGDIGEMVVGWQYLEIPGTGYRDNLFDNQPVNEIGLQEKWYYFGQDGALLEQTDKQVLEAKTSENTGKVYGEQYPLSAEKRTYYFDNNYAVKTGWIYEEGHWYYLNKLGNFGDDSYNPLPIGEVAKGWTQDFHVTIDIDRSKPAPWYYLDASGKMLTDWQKVNGKWYYFGSSGSMATGWKYVRGKWYYLDNKNGDMKTGWQYLGNKWYYLRSSGAMVTGWYQDGSTWYYLDPSNGDMKIGWTKVNGKWYYLNSNGAMVTGSQTIDGKVYNFASSGEWI

SEQ ID NO: 591 - DNA, 996 bp, Streptococcus pneumoniae
atgaaaattttgaaaaaaactatgcaagttggactgacagtatttttctttggtttgctagggaccagtacagtatttgcagatgattctgaaggatggcagtttgtccaagaaaacggaagaacctactacaaaaagggggacctcaaagaaacctactggcgagtgattgatggtaagtactattattttgattctctatctggagagatggttgtcggctggcaatatatcccgtttccatctaaaggtagtacaattggtccttacccaaatggtatcagattagaaggttttccaaagtcagagtggtactacttcgataaaaatggagtgctacaagagtttgttggttggaaaacattagagattaaaactaaagacagtgttggaagaaagtacggggaaaaacgtgaagattcagaagataaagaagagaagcgttattatacgaactattactttaatcaaaatcattctttagagacaggttggctttatgatcagtctaactggtattatctagctaagacggaaattaatggagaaaactaccttggtggtgaaagacgtgcggggtggataaacgatgattcgacttggtactacctagatccaacaactggtattatgcaaacaggttggcaatatctaggtaataagtggtactacctccgttcctcaggagcaatggccactggctggtatcaggaaggtaccacttggtattatttagaccacccaaatggcgatatgaaaacaggttggcaaaaccttgggaacaaatggtactatctccgttcatcaggagctatggcaactggttggtatcaagatggttcaacttggtactacctaaatgcaggtaatggagacatgaagacaggttggttccaggtcaatggcaactggtactatgcttatagctcaggtgctttggcagtgaatacgaccgtagatggctattctgtcaactataatggcgaatgggttcgg

SEQ ID NO: 592 - protein, 332 aa, Streptococcus pneumoniae
  choline binding protein J (cbpJ); Cellular location: outside; Feature of note: WYY motif; Similar to strain R6 sequence 15902381 (e-109)
MKILKKTMQVGLTVFFFGLLGTSTVFADDSEGWQFVQENGRTYYKKGDLKETYWRVIDGKYYYFDSLSGEMVVGWQYIPFPSKGSTIGPYPNGIRLEGFPKSEWYYFDKNGVLQEFVGWKTLEIKTKDSVGRKYGEKREDSEDKEEKRYYTNYYFNQNHSLETGWLYDQSNWYYLAKTEINGENYLGGERRAGWINDDSTWYYLDPTTGIMQTGWQYLGNKWYYLRSSGAMATGWYQEGTTWYYLDHPNGDMKTGWQNLGNKWYYLRSSGAMATGWYQDGSTWYYLNAGNGDMKTGWFQVNGNWYYAYSSGALAVNTTVDGYSVNYNGEWVR

SEQ ID NO: 593 - DNA, 1230 bp, Streptococcus pneumoniae
atgaaattattttggacaaacaacatatatagacagttgctgctaaacagctgtttttcatcattcggcgacagtattttctacctcgccattatcaattatgtggctcagtacaatttcgctccgctagcgattttactgatttccatttcagagatggttcccctactatcgcaactctttctcgggattctaggagattttcaagaaaatagagtcaaacacgcactctggattgccaaaatcaaaatcctgctctacgctattttgacagtatttctcgtcttgtcgcccttttcattagtttcagtcattatgattgtcatcatcaacctcatctctgacaccttgagctacctgtctgcctacatgatgaacgccctctacatcagtgtaattaaggacgacctgcatgatgccatggggttcaggcagtctctgatgagggttgtccgtattgtcgccaatctggctggcgcattccttatcaatgttataagtattcaaactatttcccttatcaacactctgacttttgtcattgcctttttgggcctgtatgttattcgacataccttgtatgaggttgaaaaaagaattgaaatgtcacatacagcactgagttttaagaaatattttcaacatcttaaacagtcgctggctgtgctcctgaggttaaaagataccgtcatactactgtttctgacgaccagtatgattgccatcttggatgtgtcccctcggctgattgccctccgcttcatccaacagacactagcacaactgagcattgggcaactcctcgccctgctctccatcatcatgtcttgtggagctatccttggcaatatgaccagcagtaatctatttaaaaatatccgtttcacgcacctcttggttttctgtgagatttccctattgactctaataactagtatcctttgtcaagcctatatcgtaattttcatgaccagtttcatcagttctacgattatcggcattctcagccctcgcctacaagcagctgtctttgcccatatccccagtgacaagatggggacggtgggctctgctctgagcacagtggacattctcgccccgtccctgctctccctattagccctatccatagcatcgggcgtttcggtgcagttagcattgatatttttgtatcttattttaattgctcttatcttttgtcaatggttagtcaagttcaacactcataac

SEQ ID NO: 594 - protein, 410 aa, Streptococcus pneumoniae
  conserved hypothetical protein; Cellular location: membrane; Similar to strain R6 sequence 15902188 (3.E-74)
MKLFWTNNIYRQLLLNSCFSSFGDSIFYLAIINYVAQYNFAPLAILLISISEMVPLLSQLFLGILGDFQENRVKHALWIAKIKILLYAILTVFLVLSPFSLVSVIMIVIINLISDTLSYLSAYMMNALYISVIKDDLHDAMGFRQSLMRVVRIVANLAGAFLINVISIQTISLINTLTFVIAFLGLYVIRHTLYEVEKRIEMSHTALSFKKYFQHLKQSLAVLLRLKDTVILLFLTTSMIAILDVSPRLIALRFIQQTLAQLSIGQLLALLSIIMSCGAILGNMTSSNLFKNIRFTHLLVFCEISLLTLITSILCQAYIVIFMTSFISSTIIGILSPRLQAAVFAHIPSDKMGTVGSALSTVDILAPSLLSLLALSIASGVSVQLALIFLYLILIALIFCQWLVKFNTHN

SEQ ID NO: 595 - DNA, 873 bp, Streptococcus pneumoniae
ttgtaccccccagaactggattctaaaatactctctatcatcaagaaggcagtgacaattagaacgacacacacatatgaatatcaatactcactgctatttggtgatgcaggctatctatggttactcctacatttattttctatcagtaaaaatcaatactatctacaattagcaaacgtcaccgctaaaaaattaatagagaattatgatactctagaggaaatagactttgcattgggaaaatctggtgtcctattatcattaataaaatactatcaatttaccaatgacaatactcttaaaattttcatccacaatagtataggggaaatttatcattatttcctacaaagagatacagccaaagaaagcattttagactatagctttgctcatggatattgtggaattgcatatgctttatttgcctattctaaagtcttagaaccttctatgttttataatgatctccatacattccatactgaattaaaaaaattattagaaaaagttacttctaatactgaaaatttaggaaatttacaactttcttggtgcaaaggaatttccggaataatcttatatctttgtatgtacgattgtgacggaaacaaagatattattagtaaatatcaagaatttgtttttaaccatcatctaaaaatgatgacaggatattgccacggaataactagcttactacaaaccactgtctacaatcaaaacaaattactgatgaaaaaaatccaacaggtaattttagcatgttctgaacgagatgatcacggtttactgatgtttcaaggagatagtggtaaagcagatttgtttgacttcggaataggaagcatggggtatattggtgtctat

SEQ ID NO: 596 - protein, 291 aa, Streptococcus pneumoniae
  hypothetical protein; Cellular location: cytoplasm
MYPPELDSKILSIIKKAVTIRTTHTYEYQYSLLFGDAGYLWLLLHLFSISKNQYYLQLANVTAKKLIENYDTLEEIDFALGKSGVLLSLIKYYQFTNDNTLKIFIHNSIGEIYHYFLQRDTAKESILDYSFAHGYCGIAYALFAYSKVLEPSMFYNDLHTFHTELKKLLEKVTSNTENLGNLQLSWCKGISGIILYLCMYDCDGNKDIISKYQEFVFNHHLKMMTGYCHGITSLLQTTVYNQNKLLMKKIQQVILACSERDDHGLLMFQGDSGKADLFDFGIGSMGYIGVY

SEQ ID NO: 597 - DNA, 876 bp, Streptococcus pneumoniae
atgacaaaaaaagttggtgtcggtcaggcacatagtaagataattttaataggggaacatgcggtcgtttacggttatcctgccatttccctgcctcttttggaggtggaggtgacctgtaaggtagttcctgcagagagtccttggcgcctttatgaggaggataccttgtccatggcggtttatgcctcactggagtatttgaatatcacagaagcctgcattcgttgtgagattgactcggctatccctgagaaacgggggatgggttcgtcagcggctatcagcatagcggccattcgtgcagtatttgactactatcaggctgatctgcctcatgatgtactagaaatcttggtcaatcgagctgaaatgattgcccatatgaatcctagtggtttggatgctaagacctgtcttagtgaccaacctattcgctttatcaagaacgtaggatttacagaacttgagatggatttatccgcctatttggtgattgccgatacgggtgtttatggtcatactcgtgaagccatccaagtggttcaaaataagggcaaggatgccctaccgtttttgcatgccttgggagaattaacccagcaagcagaagttgcgatttcacaaaaagatgctgaaggactgggacaaatcctcagtcaagcgcatttacatttaaaagaaattggagtcagtagccctgaggcagactttttggttgaaacgactcttagccatggtgctctgggtgccaagatgagcggtggtgggctaggaggttgtatcatagccttggtaaccaatttgacacacgcacaagaactagcagaaagattagaagagaaaggagctgttcagacatggatagagagcctg

SEQ ID NO: 598 - protein, 292 aa, Streptococcus pneumoniae
  mevalonate kinase (mvaK1); Cellular location: cytoplasm; Similar to strain R6 sequence 15902382 (e-162)
MTKKVGVGQAHSKIILIGEHAVVYGYPAISLPLLEVEVTCKVVPAESPWRLYEEDTLSMAVYASLEYLNITEACIRCEIDSAIPEKRGMGSSAAISIAAIRAVFDYYQADLPHDVLEILVNRAEMIAHMNPSGLDAKTCLSDQPIRFIKNVGFTELEMDLSAYLVIADTGVYGHTREAIQVVQNKGKDALPFLHALGELTQQAEVAISQKDAEGLGQILSQAHLHLKEIGVSSPEADFLVETTLSHGALGAKMSGGGLGGCIIALVTNLTHAQELAERLEEKGAVQTWIESL

SEQ ID NO: 599 - DNA, 951 bp, Streptococcus pneumoniae
atggatagagagcctgtaacagtacgttcctacgcaaatattgctattatcaaatattggggaaagaaaaaagaaaaagagatggtgcctgctactagcagtatttctctaactttggaaaatatgtatacagagacgaccttgtcgcctttaccagccaatgtaacagctgacgaattttacatcaatggtcagctacaaaatgaggtcgagcatgccaagatgagtaagattattgaccgttatcgtccagctggtgagggctttgtccgtatcgatactcaaaacaatatgcctacggcagcgggtctgtcctcaagttctagtggtttgtccgccctggtcaaggcttgtaatgcttatttcaagcttggattggatagaagtcagttggcacaggaagccaaatttgcctcaggttcttcttctcggagtttttatggaccactaggagcctgggataaggatagtggagaaatttaccctgtagagacagacttgaaactagctatgattatgttggtgctagaggacaagaaaaaaccaatctctagccgtgacgggatgaaactttgtgtggaaacctcgacgactttcgacgactgggttcgtcagtctgagaaggactatcaggatatgctgatttatctcaaggaaaatgattttgccaagattggagaattaacggagaaaaatgccctggctatgcatgctacgacaaagactgctagtccagccttttcttatctgacggatgcctcttatgaggctatggcctttgttcgccagcttcgtgagaaaggagaggcctgctactttaccatggatgctggtcccaatgttaaggtcttctgtcaggagaaagacttggagcatttatcagaaattttcggtcatcgttatcgcttgattgtgtcaaaaacaaaggatttgagtcaagatgattgctgt

SEQ ID NO: 600 - protein, 317 aa, Streptococcus pneumoniae
  mevalonate diphosphate decarboxylase (mvaD); Cellular location: cytoplasm; Similar to strain R6 sequence 15902383 (0.E+01)
MDREPVTVRSYANIAIIKYWGKKKEKEMVPATSSISLTLENMYTETTLSPLPANVTADEFYINGQLQNEVEHAKMSKIIDRYRPAGEGFVRIDTQNNMPTAAGLSSSSSGLSALVKACNAYFKLGLDRSQLAQEAKFASGSSSRSFYGPLGAWDKDSGEIYPVETDLKLAMIMLVLEDKKKPISSRDGMKLCVETSTTFDDWVRQSEKDYQDMLIYLKENDFAKIGELTEKNALAMHATTKTASPAFSYLTDASYEAMAFVRQLREKGEACYFTMDAGPNVKVFCQEKDLEHLSEIFGHRYRLIVSKTKDLSQDDCC

SEQ ID NO: 601 - DNA, 1005 bp, Streptococcus pneumoniae
atgattgctgttaaaacttgcggaaaactctattgggcaggtgaatatgctattttagagccagggcagttagctttgataaaggatattcccatctatatgagggctgagattgctttttctgacagctaccgtatctattcagatatgtttgatttcgcagtggacttaaggcctaatcctgactatagcttgattcaagaaacgattgctttgatgggagacttcctcgctgttcgtggtcagaatttaagacctttttctctagaaatctgtggcaaaatggaacgagaagggaaaaagtttggtctaggttctagtggcagcgtcgttgtcttggttgtcaaggctttactggctctgtatgatgtttctgttgatcaggagctcttgttcaagctgactagcgctgtcttgcttaagcgaggagacaatggttccatgggcgaccttgcctgtattgtggcagaggatttggttctctaccagtcatttgatcgccagaaggtggctgcttggttagaagaagaaaacttggcgacagttctggagcgtgattggggcttttcaatttcacaagtgaaaccaactttagaatgtgatttcttagtgggatggaccaaggaagtggctgtatcgagtcacatggtccagcaaatcaagcaaaatatcaatcaaaattttttaacttcctcaaaagaaacggtgacttctctggtagaagccttggaacaggggaaatcagaaaagattatcgatcaagtagaagtagccagcaagcttttagaaggcttgagtacagatatttacacgcctttgcttagacagttgaaagaagccagtcaagatttgcagaccgttgccaagagtagtggtgctggtggtggtgactgtggcatcgccctgagttttgatgcgcaatcaaccaaaaccttaaaaaatcgttgggccgatctggggattgagctcttatatcaagaaaggataggacatgacgacaaatcg

SEQ ID NO: 602 - protein, 335 aa, Streptococcus pneumoniae
  phosphomevalonate kinase (mvaK2); Cellular location: membrane; Similar to strain R6 sequence 15902384 (0.E+01)
MIAVKTCGKLYWAGEYAILEPGQLALIKDIPIYMRAEIAFSDSYRIYSDMFDFAVDLRPNPDYSLIQETIALMGDFLAVRGQNLRPFSLEICGKMEREGKKFGLGSSGSVVVLVVKALLALYDVSVDQELLFKLTSAVLLKRGDNGSMGDLACIVAEDLVLYQSFDRQKVAAWLEEENLATVLERDWGFSISQVKPTLECDFLVGWTKEVAVSSHMVQQIKQNINQNFLTSSKETVTSLVEALEQGKSEKIIDQVEVASKLLEGLSTDIYTPLLRQLKEASQDLQTVAKSSGAGGGDCGIALSFDAQSTKTLKNRWADLGIELLYQERIGHDDKS

SEQ ID NO: 603 - DNA, 1008 bp, Streptococcus pneumoniae
atgacgacaaatcgtaaggacgagcatatcctctatgcccttgagcagaaaagttcctataatagctttgatgaggtggagctgattcattcttccttgcctctttacaatctggatgaaatcgatctttcgacagagtttgctggtcgaaagtgggactttcctttttatatcaatgccatgactggtggaagtaataagggaagagaaatcaatcaaaagctggctcaggtggcggaatcctgtggtattttatttgtaacgggttcttatagcgcagccctcaaaaatccaacggatgattctttttctgtcaagtctagtcatcccaatctcctccttggaaccaatattggattggacaagcctgtcgagttaggacttcagactgtagaagagatgaatcctgttctattgcaagtgcatgtcaatgtcatgcaggaattactcatgcccgagggagaaaggaagtttagaagctggcaatcgcatctagcagattatagcaagcaaattcccgttcctattgtcctcaaggaagtgggctttggaatggatgccaagacaatcgaaagagcctatgaattcggtgttcgtacagtggacctatcgggtcgtggtggcaccagctttgcctatatcgaaaaccgtcgtagtggccagcgtgattacctcaatcaatggggtcagtctaccatgcaggcccttctcaatgcccaagaatggaaagataaggtcgaactcttggttagtggaggggttcggaatccgctggatatgattaagtgcttggtttttggtgctaaggctgtgggattgtcacgaaccgttctggaattggttgaaacctacacagttgaagaagtgattggcattgtccaaggctggaaagcagatctacgcttgattatgtgttcccttaactgtgccaccatagcagatctacaaaaagtagactatcttctttatggaaaattaaaagaagcaaaggatcagatgaaaaaggcg

SEQ ID NO: 604 - protein, 336 aa, Streptococcus pneumoniae
  FMN-dependent dehydrogenase family protein; Cellular location: cytoplasm; Similar to strain R6 sequence 15902385 (0.E+01)
MTTNRKDEHILYALEQKSSYNSFDEVELIHSSLPLYNLDEIDLSTEFAGRKWDFPFYINAMTGGSNKGREINQKLAQVAESCGILFVTGSYSAALKNPTDDSFSVKSSHPNLLLGTNIGLDKPVELGLQTVEEMNPVLLQVHVNVMQELLMPEGERKFRSWQSHLADYSKQIPVPIVLKEVGFGMDAKTIERAYEFGVRTVDLSGRGGTSFAYIENRRSGQRDYLNQWGQSTMQALLNAQEWKDKVELLVSGGVRNPLDMIKCLVFGAKAVGLSRTVLELVETYTVEEVIGIVQGWKADLRLIMCSLNCATIADLQKVDYLLYGKLKEAKDQMKKA

SEQ ID NO: 605 - DNA, 696 bp, Streptococcus pneumoniae
atgagaaaatttaaaatctttttatttatcgaagcctgtcttctgacaggagctctgattttgatggtatcagagcatttttcgcgttttctgctgatactattcctctttttgcttttgattcgctactacactggtaaagagggaaataatcttcttttagtagcggcaaccattctcttctttttcatcgttatgctcaatccttttgtgattctagctatttttgttgcggttatctatagcctctttcttctttacccgatgatgaaccaggaaaaagagcagaccaatttggtttttgaagaggtcgtgacggttaagaaggagaaaaatcgttggtttggaaatcttcatcatttttcaagctaccagacttgccaattcgatgatatcaatctctttcgcttcatgggcaaggacactattcatctggagagggtcatcttaaccaatcatgacaatgtcattatcctcagaaagatggtaggaacgaccaaaatcatcgtacctgtagatgtggaagtcagtctcagcgttaactgtctctatggggatttgatttttttcaaccagcccaagcgagccctccgcaatgaacactatcatcaagaaacaaaagactatctcaagagtaacaagagtgtcaagattttcttgaccactatgattggtgatgtggaggtggttagagga

SEQ ID NO: 606 - protein, 232 aa, Streptococcus pneumoniae
  conserved hypothetical protein; Cellular location: membrane; Similar to strain R6 sequence 15902386 (e-130)
MRKFKIFLFIEACLLTGALILMVSEHFSRFLLILFLFLLLIRYYTGKEGNNLLLVAATILFFFIVMLNPFVILAIFVAVIYSLFLLYPMMNQEKEQTNLVFEEVVTVKKEKNRWFGNLHHFSSYQTCQFDDINLFRFMGKDTIHLERVILTNHDNVIILRKMVGTTKIIVPVDVEVSLSVNCLYGDLIFFNQPKRALRNEHYHQETKDYLKSNKSVKIFLTTMIGDVEVVRG

SEQ ID NO: 607 - DNA, 993 bp, Streptococcus pneumoniae
atgaaaaaacaagcctatgtcattattgctctcacctccttcctatttgtcttttttttctcccacagcttgctggaaatacttgattttgactggtctatctttttgcacgatgtcgaaaaaacagaaaaatttgtctttttattgttggttttcagcatgtccatgacctgtctcttagccctgttttggcgagggatcgaagagctttctctaagaaaaatgcaggctaatctcaagcgtttattagcagggcaagaagtggttcaggttgcagatccagatttggatgccagtttcaagtccttatcaggtaaacttaaccttttgacagaggctcttcaaaaagctgaaaatcagagccttgctcaggaagaggaaatcatcgagaaggaacggaagcgaattgctcgggatttgcacgatacagtcagtcaggagttgtttgcggcccacatgattttatcgggtatcagtcagcaggctttgaaattggatagagaaaagatgcagacccagttgcagagtgtcacagctattttagaaacagcccagaaggatttgcgggttttgctcttgcatttgcgaccagttgaactggagcagaagagcttgatagaagggattcaaattcttttaaaagagcttgaggacaagagtgatcttagggttagtctcaagcagaatatgacgaaattgcctaagaaaatcgaggagcatatcttccgtatcctgcaagagttgattagcaataccctccgccatgcccaggcatcttgcctagatgtctacctctatcagacagatgttgaattgcaactgaaggtggtggacaatgggattggtttccagttagggagcttagacgacttgagttatggactgcgaaatatcaaggagcgggttgaagatatggctggaacagttcaactcttgacagctcccaagcaagggctggcggttgatatccgtattcccctgttagataaggaa

SEQ ID NO: 608 - protein, 331 aa, Streptococcus pneumoniae
  sensor histidine kinase, putative; Cellular location: outside; Similar to strain R6 sequence 15902387 (0.E+01)
MKKQAYVIIALTSFLFVFFFSHSLLEILDFDWSIFLHDVEKTEKFVFLLLVFSMSMTCLLALFWRGIEELSLRKMQANLKRLLAGQEVVQVADPDLDASFKSLSGKLNLLTEALQKAENQSLAQEEEIIEKERKRIARDLHDTVSQELFAAHMILSGISQQALKLDREKMQTQLQSVTAILETAQKDLRVLLLHLRPVELEQKSLIEGIQILLKELEDKSDLRVSLKQNMTKLPKKIEEHIFRILQELISNTLRHAQASCLDVYLYQTDVELQLKVVDNGIGFQLGSLDDLSYGLRNIKERVEDMAGTVQLLTAPKQGLAVDIRIPLLDKE

SEQ ID NO: 609 - DNA, 630 bp, Streptococcus pneumoniae
atgaaaattttactagtagatgaccatgaaatggtccgattgggcttgaaaagctactttgacctccaagacgatgtagaagttgtgggtgaggcgtccaacgggtctcaagggattgacttggccttggaactgcgtccagatgtcattgtcatggatattgtcatgcctgagatgaatgggattgacgcgaccttagcaatccttaaagaatggcctgaagccaagattttgattgtgacctcttatttggacaatgaaaaaatcatgccagtcttagatgctggtgccaaaggctatatgctcaagacttctagtgcagatgaattgcttcatgccgtcagtaaggtagctgctggcgagctggccattgagcaagaggttagcaagaaggttgaataccaccgcaatcatatggaacttcatgaagaattgactgcgcgtgagcgagatgttctccaactcatcgccaagggctacgaaaatcagcgcatcgcagatgacctctttatctctctcaagacggtcaagacccacgtgtccaatattcttgccaaacttgaagtcagcgatcgtacccaggcggctgtctatgcctttcagcaccatttggtggggcaagaggagttt

SEQ ID NO: 610 - protein, 210 aa, Streptococcus pneumoniae
  DNA-binding response regulator; Cellular location: cytoplasm; Similar to strain R6 sequence 15902388 (e-115)
MKILLVDDHEMVRLGLKSYFDLQDDVEVVGEASNGSQGIDLALELRPDVIVMDIVMPEMNGIDATLAILKEWPEAKILIVTSYLDNEKIMPVLDAGAKGYMLKTSSADELLHAVSKVAAGELAIEQEVSKKVEYHRNHMELHEELTARERDVLQLIAKGYENQRIADDLFISLKTVKTHVSNILAKLEVSDRTQAAVYAFQHHLVGQEEF

SEQ ID NO: 611 - DNA, 372 bp, Streptococcus pneumoniae
ttgcggtgcctgaaagaaataaactctataaaatattttccagaagcgaaaaaaacaaagattatcgattgggattttgcagacacttgctgggaaaaggatcctagaaaataccaatatgtggctgctaactatttgaaagcaatgcagtcttatctaaaggaaaccgatttgcctaagctagagcagttagtcgtgacaaaatccttgtgggacacggtagatatcctagatcgagtagtagggagtttggtgtatgaacaccctgaactagaagaaataatcttaatactcttcgaaaatctcttcaaaccacgtcagctctatctgcaacctcaaaacagtgttttgagcaacctgcggctagcttcc

SEQ ID NO: 612 - protein, 124 aa, Streptococcus pneumoniae
  conserved hypothetical protein
MRCLKEINSIKYFPEAKKTKIIDWDFADTCWEKDPRKYQYVAANYLKAMQSYLKETDLPKLEQLVVTKSLWDTVDILDRVVGSLVYEHPELEEIILILFENLFKPRQLYLQPQNSVLSNLRLAS

SEQ ID NO: 613 - DNA, 270 bp, Streptococcus pneumoniae
ttgagtataaaatggagcctatcagataatatctggctgagacgtgtcgctattgaccaccagttgttaagaaaagagaagaccaatactcaattaatggaaaagattctccttcataacttgaaccaaacagaattttttatcaataaagccattggctggactctgcgagactactccaaaacgaatcccacttgggtaacatgctttattgagaaaaacaaggaaagaatggctgaacttagtatcaaagaagcaagcaagtacctc

SEQ ID NO: 614 - protein, 90 aa, Streptococcus pneumoniae
  DNA alkylation repair enzyme, putative, POINT MUTATION
MSIKWSLSDNIWLRRVAIDHQLLRKEKTNTQLMEKILLHNLNQTEFFINKAIGWTLRDYSKTNPTWVTCFIEKNKERMAELSIKEASKYL

SEQ ID NO: 615 - DNA, 237 bp, Streptococcus pneumoniae
atgaagaaaactgtttataaaaaattgggtatttcaattattgcgagtactttattggctagccagttatcgacagtatctgctttgagtgttatttctagtacaggtgaagaatatgaggtaagtgagacactagaaaaaggtccagagtctaatgattcttcattatctgagatttcaccaacgtatggttcatactaccaaaagcaatcagaagtattatcggtaatgatgatt

SEQ ID NO: 616 - protein, 79 aa, Streptococcus pneumoniae
  hypothetical protein; Cellular location: outside; Similar to strain R6 sequence 15902392 (5.E-30)
MKKTVYKKLGISIIASTLLASQLSTVSALSVISSTGEEYEVSETLEKGPESNDSSLSEISPTYGSYYQKQSEVLSVMMI

SEQ ID NO: 617 - DNA, 903 bp, Streptococcus pneumoniae
ttgattaaaattgataatactttacagtatccgtattcgacttcagctatggttttatctaagtattatggagtagccgatggaatgaatgtagaagggaggggaagtgcgaattttattaaagataatgtgttaattacagcggctcacaactactacagacatgactatgggaaagaagcggatgatatttatgttcttccggctgttagtccaagtcaagaaccatttggaaagatcaaagtaaaggaagttcgttatttgaaggaatttagaaatttaaattctaaggatgcaagggaatatgacttggctttattaattctagaagagcccattggtgcaaaattagggactttgggtcttcctactagtcaaaaaaatttgacaggaataactgtgactatcacaggctatccatcatataattttaaaattcatcaaatgtatacagataaaaaacaagttttaagtgatgatggcatgttcttggattaccaagttgatactttagaggggtctagtggatctacagtttatgatgctagtcaccgtgtagtaggagtgcatactttaggagatggagctaatcaaattaacagtgcagttaaattaaatgaacgaaatttgccatttatttattcggttcttaaaggttactctcttgaaggatggaagaaaataaatggtagttggtaccattatagacaacatgataaacaaacgggttggcaggagataaatgatacttggtattatttagacagttccggtaagatgcttacagattggcaaaaagtaaatggaaaatggtattatctcaattcaaatggagcaatggttacaggtagccaaactatcgatggtaaagtttataacttcgcttcatctggtgagtggatt

SEQ ID NO: 618 - protein, 301 aa, Streptococcus pneumoniae
  choline binding protein G (cbpG); Cellular location: cytoplasm; Feature of note: WYY motif; Similar to strain R6 sequence 15902393 (e-111)
MIKIDNTLQYPYSTSAMVLSKYYGVADGMNVEGRGSANFIKDNVLITAAHNYYRHDYGKEADDIYVLPAVSPSQEPFGKIKVKEVRYLKEFRNLNSKDAREYDLALLILEEPIGAKLGTLGLPTSQKNLTGITVTITGYPSYNFKIHQMYTDKKQVLSDDGMFLDYQVDTLEGSSGSTVYDASHRVVGVHTLGDGANQINSAVKLNERNLPFIYSVLKGYSLEGWKKINGSWYHYRQHDKQTGWQEINDTWYYLDSSGKMLTDWQKVNGKWYYLNSNGAMVTGSQTIDGKVYNFASSGEWI

SEQ ID NO: 619 - DNA, 1020 bp, Streptococcus pneumoniae
atgaagcttttgaaaaaaatgatgcaaatcgcactagccacatttttcttcggtttgttagcgacaaatacagtatttgcagatgattctgaaggatggcagtttgtccaagaaaatggtagaacctactacaaaaagggggatctaaaagaaacctactggagagtgatagatgggaagtactattattttgatcctttatccggagagatggttgtcggctggcaatatatacctgctccacacaagggggttacgattggtccttctccaagaatagagattgctcttagaccagattggttttattttggtcaagatggtgtattacaagaatttgttggcaagcaagttttagaagcaaaaactgctacgaataccaacaaacatcatggggaagaatatgatagccaagcagagaaacgagtctattattttgaagatcagcgtagttatcatactttaaaaactggttggatttatgaagagggtcattggtattatttacagaaggatggtggctttgattcgcgcatcaacagattgacggttggagagctagcacgtggttgggttaaggattaccctcttacgtatgatgaagagaagctaaaagcagctccatggtactatctaaatccagcaactggcattatgcaaacaggttggcaatatctaggtaatagatggtactacctccattcgtcaggagctatggcaactggctggtataaggaaggctcaacttggtactatctagatgctgaaaatggtgatatgagaactggctggcaaaaccttgggaacaaatggtactatctccgttcatcaggagctatggcaactggttggtatcaggaaagttcgacttggtactatctaaatgcaagtaatggagatatgaaaacaggctggttccaagtcaatggtaactggtactatgcctatgattcaggtgctttagctgttaataccacagtaggtggttactacttaaactataatggtgaatgggttaag

SEQ ID NO: 620 - protein, 340 aa, Streptococcus pneumoniae
  choline binding protein F (cbpF); Cellular location: outside; Feature of note: WYY motif; Similar to strain R6 sequence 15902395 (e-164)
MKLLKKMMQIALATFFFGLLATNTVFADDSEGWQFVQENGRTYYKKGDLKETYWRVIDGKYYYFDPLSGEMVVGWQYIPAPHKGVTIGPSPRIEIALRPDWFYFGQDGVLQEFVGKQVLEAKTATNTNKHHGEEYDSQAEKRVYYFEDQRSYHTLKTGWIYEEGHWYYLQKDGGFDSRINRLTVGELARGWVKDYPLTYDEEKLKAAPWYYLNPATGIMQTGWQYLGNRWYYLHSSGAMATGWYKEGSTWYYLDAENGDMRTGWQNLGNKWYYLRSSGAMATGWYQESSTWYYLNASNGDMKTGWFQVNGNWYYAYDSGALAVNTTVGGYYLNYNGEWVK

SEQ ID NO: 621 - DNA, 486 bp, Streptococcus pneumoniae
atggaaaagtgctacacagatgtgacagaatttgccattccagcaagtactcaaaagctttacttatcaccagttttagatggctttaatagcgaaattatcgcctataatctttcaacttcacccaacttagaacaagtacaaacaatgttggaacaggcattcacagagaagcactacgagaatacgattctccatagtgaccaaggctggcaataccaacacgattcttatcatcggttcctagagagtaagggaattcaagcatccatgtcacgtaagggaaacagcccagacaatagtatgatggagtccttctttgggattctgaaatcggaaatgttttacggttatgagaagtcgtttcagtcgcttaagcaattggaacaagccattatagactatattgattactacaacaataaacgaattaaggtaaaactaaaaggacttagccctgtgcaatacagaactaaatccttcgga

SEQ ID NO: 622 - protein, 162 aa, Streptococcus pneumoniae
  probable transposase (insertionsequen)
MEKCYTDVTEFAIPASTQKLYLSPVLDGFNSEIIAYNLSTSPNLEQVQTMLEQAFTEKHYENTILHSDQGWQYQHDSYHRFLESKGIQASMSRKGNSPDNSMMESFFGILKSEMFYGYEKSFQSLKQLEQAIIDYIDYYNNKRIKVKLKGLSPVQYRTKSFG

SEQ ID NO: 623 - DNA, 829 bp, Streptococcus pneumoniae
atgactgaattttcgttagctcttcttctaaaagtcattaaactagctcgttcgacctactactatcacttgaaacagctagataaaccagataaggactaagagcttaaagctgaaattcaatccatttttatcgaacacaagggaaattatacttatcgccgggttcatttagaactaagaaatcgtggttatctggtaaatcataaaagaattcaaggcttgatgaaagtactcaatttacaagctaaaacgcgacagaaacgaaaatattcttctcataaaagacgttggcaagaaggcagagaatctcattcaaggccaatttgaaggctctaaaacaatggaaaagtgctacacagatgtgacagaatttgccattccagcaagtactcaaaagctttacttatcaccagttttagatggctttaatagcgaaattatcgcctataatctttcaacttcacccaacttagaacaagtacaaacaatgttggaacaggcattcacagagaagcactacgagaatacgattctccatagtgaccaaggctggcaataccaacacgattcttatcatcggttcctagagagtaagggaattcaagcatccatgtcacgtaagggaaacagcccagacaatagtatgatggagtccttctttgggattctgaaatcggaaatgttttacggttatgagaagtcgtttcagtcgcttaagcaattggaacaagccattatagactatattgattactacaacaataaacgaattaaggtaaaactaaaaggacttagccctgtgcaatacagaactaaatccttcgga

SEQ ID NO: 624 - protein, 33 aa, Streptococcus pneumoniae
  IS3-Spn1, transposase
MTEFSLALLLKVIKLARSTYYYHLKQLDKPDKD

SEQ ID NO: 625 - DNA, 507 bp, Streptococcus pneumoniae
atgaaactaacttatgatgataaagttcagatctatgaacttagaaaacaaggatatagcttagagaagctttcaaataaatttgggataagcaattctaatattaggtacatgattaaattgattgatcgttacggaatagagttcgtcaaaaaaggaaaaaatcgttactattctcctgatttaaaacaagaaatgagtaataaagtctgacatgaaggctggactaaagatagagtttctcttgaatacggtctcccaagtcgtacgatacttcttaactggctagcacaatacaggaaaaacgggtatactattgttgagaaaacaagagggagagtacctaaaatgggacgtaagccaaaaacgagacctgaagagaggacagaattagaacgtcttcaagcagaaaatgagtacctgagagcggagaatgccatcctaaaaaagttaagagaactccgattgaaggaggagaaagaagaaagacagaaattgttcaagaat

SEQ ID NO: 626 - skipped

SEQ ID NO: 627 - DNA, 1767 bp, Streptococcus pneumoniae
atggaagaaaaagtatcattgaaagtcagggttcaaaaactagggacatcgctttcaaatatggttatgcccaatattggagcatttattgcttggggagtattgactgccctctttatcgctgatggctatctgccaaatgaacagttagctactgttgttggtcctatgttaacgtatttattgccaatcctgattggttacacaggtggatatatgatccatggccaacgtggtgccgttgtaggagctattgctactgttggtgcaatcacaggttctagtgttcctatgtttatcggagctatggtaatgggcccactgggaggatggactatcaagaaatttgatgagaagttccaggaaaaaattcgtcccggatttgaaatgttagttaataacttctcagctggtctcgttggttttgcattattgcttttggctttctacgcaatcggtccagtcgtatcgactcttactggagctgttgggaatggtgttgaggctattgtcaatgctcgcctccttcctatggctaatattatcatcgaaccggctaaagtccttttcctcaataatgccctcaatcatggcatttttactcctctgggagtagaacaggtagctcaagctggtaagtcaattctcttcctattggaagctaatcctggaccaggtctgggaattctattagcttatgctgtattcggtaaaggttctgctaaatcttcttcttggggggcaatggttattcatttcttcggagggattcatgaaatttactttccttatgttatgatgaagcctactctatttttagctgctatggcaggaggtatctctggaacttttacttttcaactcttagacgctggtcttaaatctccagcttcaccaggttctattattgcgattatagctacggcgccaaaaggtgtttggccccatctaaatgttcttttaggtgttttagtggcagcagttgtttctttccttgtagcagcccttattcttcatgcagacaagtcaactgaggattcgctcgaagctgctcaggcggctacccaagcagctaaggctcagtctaaaggtcagttagtatcaacttctgttgatgcagttgtttcgacagactcagtggaaaaaatcattttcgcctgcgatgctggtatgggaagctctgctatgggagctagtattcttcgagataaggttaaaaaagcaggtctagagattccagtatctaatcaggcaatctcaaatttgcttgatacaccaaaaacattaattgttactcaggaagaactgacaccaagagctaaagacaagagtccaagtgctattcatgtttctgttgataatttcttagcgtcctctcgttatgatgaaattgtagcttcattaacaggagcttctccaatagcagaaattgaaggagatataccaacttcagcaccagtagatagtcaggaaagtgaccttaaccatattgatgctgtagtagttgcttatggtaaagcacagggaactgcaactatgggctgtgaaacgattcgggctatttttagaaacaagaatattcgtattccagtttctactgccaaaatttcagaattaggtgaatttaattctaaaaacataatgattgtaacaactatttctttacaggcagaagtgcagcaagcagcaccgaattctcaatttcttattgtggatagtttagtaacaacaccagaatatgacaaaatggctgctagaatgtacaaa

SEQ ID NO: 628 - protein, 589 aa, Streptococcus pneumoniae
  PTS system, mannitol-specific IIBC components; Cellular location: membrane; Similar to strain R6 sequence 15902400 (0.E+01)
MEEKVSLKVRVQKLGTSLSNMVMPNIGAFIAWGVLTALFIADGYLPNEQLATVVGPMLTYLLPILIGYTGGYMIHGQRGAVVGAIATVGAITGSSVPMFIGAMVMGPLGGWTIKKFDEKFQEKIRPGFEMLVNNFSAGLVGFALLLLAFYAIGPVVSTLTGAVGNGVEAIVNARLLPMANIIIEPAKVLFLNNALNHGIFTPLGVEQVAQAGKSILFLLEANPGPGLGILLAYAVFGKGSAKSSSWGAMVIHFFGGIHEIYFPYVMMKPTLFLAAMAGGISGTFTFQLLDAGLKSPASPGSIIAIIATAPKGVWPHLNVLLGVLVAAVVSFLVAALILHADKSTEDSLEAAQAATQAAKAQSKGQLVSTSVDAVVSTDSVEKIIFACDAGMGSSAMGASILRDKVKKAGLEIPVSNQAISNLLDTPKTLIVTQEELTPRAKDKSPSAIHVSVDNFLASSRYDEIVASLTGASPIAEIEGDIPTSAPVDSQESDLNHIDAVVVAYGKAQGTATMGCETIRAIFRNKNIRIPVSTAKISELGEFNSKNIMIVTTISLQAEVQQAAPNSQFLIVDSLVTTPEYDKMAARMYK

SEQ ID NO: 629 - DNA, 1953 bp, Streptococcus pneumoniae
atgctattaaccaaacgagaagaacaattattgaaggctttcctacatgtagggaagctttcaatgcaagatatgactgaaatcttacaggtttcatctagaacaatttatcgaactttatcagatttgacagatagcatggagcaatatggaatcgaaataacgaagcatgggaaatactatattttgactggagagttggatgatttgccgacagaacttgaagtgttagttgagtatagtccccaagaaagacaagagttgattacctatcgccttctgactgagagtggttttgtcaccaatgaagcattgcaagagtgcacgaaagtcagtaatgtaactattattcaggatatttcagatattgataagcgtcttttagactttgatctgaaaattgaacgacaaaaaggttatcggatttctggtgattcagttggtaagagaagatttttggctattttactgacaaactgtatctcagtagcagatttttcaaccggtaattttgggagctttgatattttagaagcagatagaactgggctggccagtcagattgttaataagcaactgtcaggttttccagatatggatgctaggatgaagatgttttttgcgatcttgttatctcttataggtcaggagcaaaacattgaaaattcacctaatactagtaagcaggctttggaaatttctcaaaaaatttttcaagcttactctaagcagactgcacaattttatagtattcaggaaattatctattttgcgagcatcttggatgaattaatcattaaacgtcaggacaatccgctctttacggagaaatttgatggtgaatttttctacaatatttcaaatctgattgatacggtttccatgtataccaagattgacttttttaaggacaaggttttattcaattttcttttccatcatattcggctcagtttaggcgtccctatcctttttcagggtgaaaatttgccagaatctatccagattttagttgaaaggaataaatttctttatacagtcatcagtcttttagtgaatgatatttttccgaaatatcttcatacagagtatgagtatggcatgattgccctacattttatctctagcttaggccgtagtccagagatttatccagtccgtgttttgcttttaacggatgaacgtcgggtcactagagatttattagtcagtaaaattaagagtgttgctccttttgtagagttgatagatattcaatctctagtagattaccacagtattgatctcagtcagtatgattatattttatctaccaagccgctgactaatcaggaaatcgatgtaatttctagttttccaaccgtcaaagaattgcttgaattacaggaacgacttcagtatgtacaggcacatcgtacaattgtcgcgcgtgatgctatcgctccagagaaaagttatgacttgcaagattatttaatatctagtagtcagcttttgagtcaattcgagttggttcaattggagaataatcaatcatttgagcacacggtagaacaaatcatccaatatcagaagaatgtgagtgacagagcttacctaacaagaaaattgttatctcacttccagaatagtcctatggctattcctaatactggtctggtgcttttacatagtcagtctagcaaagtaacaacaaatagttttactatgtttgaactcaaactacctatctccgcattgtcaatgaaacgagaggaagaagaggtcaaaaggtgtctgctaatgctaatgtctaaagaagctagcgaggaagctagagatttaatgacagctattagtcagtcgattattgaaaatcatctttatacagagatttacaagacgggaaatcaatccattatttatcagatgctaaatactatttttaacgaaaaaattaagaaattggagaac

SEQ ID NO: 630 - protein, 651 aa, Streptococcus pneumoniae
  transcriptional regulator, putative; Cellular location: cytoplasm; Similar to strain R6 sequence 15902401 (0.E+01)
MLLTKREEQLLKAFLHVGKLSMQDMTEILQVSSRTIYRTLSDLTDSMEQYGIEITKHGKYYILTGELDDLPTELEVLVEYSPQERQELITYRLLTESGFVTNEALQECTKVSNVTIIQDISDIDKRLLDFDLKIERQKGYRISGDSVGKRRFLAILLTNCISVADFSTGNFGSFDILEADRTGLASQIVNKQLSGFPDMDARMKMFFAILLSLIGQEQNIENSPNTSKQALEISQKIFQAYSKQTAQFYSIQEIIYFASILDELIIKRQDNPLFTEKFDGEFFYNISNLIDTVSMYTKIDFFKDKVLFNFLFHHIRLSLGVPILFQGENLPESIQILVERNKFLYTVISLLVNDIFPKYLHTEYEYGMIALHFISSLGRSPEIYPVRVLLLTDERRVTRDLLVSKIKSVAPFVELIDIQSLVDYHSIDLSQYDYILSTKPLTNQEIDVISSFPTVKELLELQERLQYVQAHRTIVARDAIAPEKSYDLQDYLISSSQLLSQFELVQLENNQSFEHTVEQIIQYQKNVSDRAYLTRKLLSHFQNSPMAIPNTGLVLLHSQSSKVTTNSFTMFELKLPISALSMKREEEEVKRCLLMLMSKEASEEARDLMTAISQSIIENHLYTEIYKTGNQSIIYQMLNTIFNEKIKKLEN

SEQ ID NO: 631 - DNA, 435 bp, Streptococcus pneumoniae
atgaaacttgaaaaacatttgattaagcttaataaacaattttctaacaaggaggaagctatttgttattgtgggcaagttctttatgagggtggatatgttaatgaagactatattgaagccatgattgagcgagataaagagctatctgtttacatgggtaactttatcgccataccgcatggaacagatgcagcaaaaaatgatgtcctcaagtctggtattacagtcgttcaagtccctagaggggttgattttgggaatgtatctaaccctcaagtggcaacggttctttttggtattgctggtattggtaatgaacacttagaaattattcagaaaatttctatcttctgtgcagatgtagataatgttcttaaactagcagatgctcagtcaaaagaggaagtattgcgcttatttgatgctgttgaa

SEQ ID NO: 632 - protein, 145 aa, Streptococcus pneumoniae
  PTS system, mannitol-specific IIA component (mtlF); Cellular location: cytoplasm; Similar to strain R6 sequence 15902402 (3.E-80)
MKLEKHLIKLNKQFSNKEEAICYCGQVLYEGGYVNEDYIEAMIERDKELSVYMGNFIAIPHGTDAAKNDVLKSGITVVQVPRGVDFGNVSNPQVATVLFGIAGIGNEHLEIIQKISIFCADVDNVLKLADAQSKEEVLRLFDAVE

SEQ ID NO: 633 - DNA, 1134 bp, Streptococcus pneumoniae
atgaaacattctgttcattttggtgccggtaatatcggtcgtggttttataggtgaaattctatttaaaaatggtttccatattgattttgtggatgtcaataatcagataattcatgctctgaatgaaaagggcaagtatgaaattgaaattgcacagaaaggacagtctcgtatagaagtaactaatgtggctggcattaatagcaaagaacatcctgagcaagtcattgaagcgattcaaaagacggatattattactactgcaatcggacctaatatactcccttttatcgccgaacttctagccaaaggaatcgaagctcgccgagttgcaggaaatacacaggcattggatgttatggcctgtgaaaatatgattggcgggtctcaatttctttatcaagaagtcaagaaatatttaagtccggaaggtttgacatttgctgataactacataggttttccaaatgctgcagtagacaggattgttccagcacaaagtcacgaagattccctttttgttgtggtcgagccctttaatgaatgggtcgtggaaaccaagcgtcttaaaaatccagatttacgtctaaaagatgtgcattatgaagaagatttagaaccctttattgagcgaaaacttttttcagtcaattctggacatgcaacttcagcttacattggtgcgcattatggtgccaagacaattttggaagctcttcaaaatcctaatattaaatctcggattgaatctgtattagctgaaattcggagtctcttgattgccaaatggaactttgataaaaaagaattggagaattatcacaaagtcattatagaacgacttgaaaaccctttcatagtggacgaggttagtcgcgtagctcgtactccaatccgaaaattaggctataatgaacgattcatccggccgatacgtgaattgaaagaactcagtttgtcatataaaaacctacttaaaacagttggctatgtctttgactatcgcgatgtaaatgatgaagaaagtattcgattaggtgaattgttggctaaacaatcagtcaaagatgttgttatacaagttacaggtttagacgaccaagaattgattgagcaaattgtagagtatatt

SEQ ID NO: 634 - protein, 378 aa, Streptococcus pneumoniae
  mannitol-1-phosphate 5-dehydrogenase (mtlD); Cellular location: cytoplasm; Similar to strain R6 sequence 15902403 (0.E+01)
MKHSVHFGAGNIGRGFIGEILFKNGFHIDFVDVNNQIIHALNEKGKYEIEIAQKGQSRIEVTNVAGINSKEHPEQVIEAIQKTDIITTAIGPNILPFIAELLAKGIEARRVAGNTQALDVMACENMIGGSQFLYQEVKKYLSPEGLTFADNYIGFPNAAVDRIVPAQSHEDSLFVVVEPFNEWVVETKRLKNPDLRLKDVHYEEDLEPFIERKLFSVNSGHATSAYIGAHYGAKTILEALQNPNIKSRIESVLAEIRSLLIAKWNFDKKELENYHKVIIERLENPFIVDEVSRVARTPIRKLGYNERFIRPIRELKELSLSYKNLLKTVGYVFDYRDVNDEESIRLGELLAKQSVKDVVIQVTGLDDQELIEQIVEYI

SEQ ID NO: 635 - DNA, 156 bp, Streptococcus pneumoniae
ttgtctttgatttttgttgttatttataaggtaaaagaagctggacaaaaagtcttcaaaatcgggaaaaggcagcctatcgggtgttcaaaaatcttgataggatgtcctttattatggaaagccttattggattttctcctcagattgagtttt

SEQ ID NO: 636 - protein, 52 aa, Streptococcus pneumoniae
  hypothetical protein; Cellular location: membrane; Similar to strain R6 sequence 15902404 (1.E-25)
MSLIFVVIYKVKEAGQKVFKIGKRQPIGCSKILIGCPLLWKALLDFLLRLSF

SEQ ID NO: 637 - DNA, 156 bp, Streptococcus pneumoniae
tatgagataggtcttgctagagatgtagcccatcatgttatttttatggacagtgggaaaattgttgaaaaaaataatgcccatcaattctttagtcgtccaagagaagaacgaaccaagcaattttggaacgaattctttcgaatgcgatctata

SEQ ID NO: 638 - protein, 52 aa, Streptococcus pneumoniae
  glutamine ABC transporter, ATP-binding protein, truncation; Cellular location: cytoplasm; Similar to strain R6 sequence 15902405 (3.E-17)
YEIGLARDVAHHVIFMDSGKIVEKNNAHQFFSRPREERTKQFWNEFFRMRSI

SEQ ID NO: 639 - DNA, 1281 bp, Streptococcus pneumoniae
atgtctgtatcatttgaaaacaaagaaacaaaccgtggtgtcttgactttcactatctctcaagaccaaatcaaaccagaattggaccgtgtcttcaagtcagtgaagaaatctcttaatgttccaggtttccgtaaaggtcaccttccacgccctatcttcgaccaaaaatttggtgaagaagctctttatcaagatgcaatgaacgcacttttgccaaacgcttatgaagcagctgtaaaagaagctggtcttgaagtggttgcccaaccaaaaattgacgtaacttcaatggaaaaaggtcaagactgggttatcactgctgaagtcgttacaaaacctgaagtaaaattgggtgactacaaaaaccttgaagtatcagttgatgtagaaaaagaagtaactgacgctgatgtcgaagagcgtatcgaacgcgaacgcaacaacctggctgaattggttatcaaggaagctgctgctgaaaacggcgacactgttgtgatcgacttcgttggttctatcgacggtgttgaatttgacggtggaaaaggtgaaaacttctcacttggacttggttcaggtcaattcatccctggtttcgaagaccaattggtaggtcactcagctggcgaaaccgttgatgttatcgtaacattcccagaagactaccaagcagaagaccttgcaggtaaagaagctaaattcgtgacaactatccacgaagtaaaagctaaagaagttccggctcttgacgatgaacttgcaaaagacattgatgaagaagttgaaacacttgctgacttgaaagaaaaatacagcaaagaattggctgctgctaaagaagaagcttacaaagatgcagttgaaggtgcagcaattgatacagctgtagaaaatgctgaaatcgtagaacttccagaagaaatgatccatgaagaagttcaccgttcagtaaatgaattccttgggaatttgcaacgtcaagggatcaaccctgacatgtacttccaaatcactggaactactcaagaagaccttcacaaccaataccaagcagaagctgagtcacgtactaagactaaccttgttatcgaagcagttgccaaagctgaaggatttgatgcttcagaagaagaaatccaaaaagaagttgagcaattggcagcagactacaacatggaagttgcacaagttcaaaacttgctttcagctgacatgttgaaacatgatatcactatcaaaaaagctgttgaattgatcacaagcacagcaacagtaaaa

SEQ ID NO: 640 - protein, 427 aa, Streptococcus pneumoniae
  trigger factor (tig); Cellular location: cytoplasm; Similar to strain R6 sequence 15902406 (0.E+01)
MSVSFENKETNRGVLTFTISQDQIKPELDRVFKSVKKSLNVPGFRKGHLPRPIFDQKFGEEALYQDAMNALLPNAYEAAVKEAGLEVVAQPKIDVTSMEKGQDWVITAEVVTKPEVKLGDYKNLEVSVDVEKEVTDADVEERIERERNNLAELVIKEAAAENGDTVVIDFVGSIDGVEFDGGKGENFSLGLGSGQFIPGFEDQLVGHSAGETVDVIVTFPEDYQAEDLAGKEAKFVTTIHEVKAKEVPALDDELAKDIDEEVETLADLKEKYSKELAAAKEEAYKDAVEGAAIDTAVENAEIVELPEEMIHEEVHRSVNEFLGNLQRQGINPDMYFQITGTTQEDLHNQYQAEAESRTKTNLVIEAVAKAEGFDASEEEIQKEVEQLAADYNMEVAQVQNLLSADMLKHDITIKKAVELITSTATVK

SEQ ID NO: 641 - DNA, 2364 bp, Streptococcus pneumoniae
atggaagtttatttttcaggaactattgaacggattatttttgaaaatcccagcaatttttatcgcatcctcctcctagaaatcgacgatacggacgcagaggattttgatgattttgaaatcattgtcacaggaaccatggctgatgtaattgagggcgaagactatactttttgggggcaaattgtccagcactccaagtatggagaacaactgcaaatcagtcgttatgatcgcgcaaaaccaactagtaagggcttggtcaagtacttttcaagtagccatttcaaggggattggtctcaagacagctcagaaaatcgtggatacctatggcgaaaataccattgacgaaattttgcaacacccagaaaagttagaaggcatcgcaggactctctgccaaaaatcgcgaggctttcgtctccactctccgtctcaactacggaacggagatgattttggccaaactagccaactacggcattcccaacaaactagcctttcagattcaagacttttacaaggaagaaacccttgatgtggttgaaaattatccctaccagctggttgaggatatcaagggtttgggctttaccattgctgaccaactagctgaggaactaggcatcgaaagtcaggctcctgaacgcttccgcgccggtctagttcacagtctttttcaggcctgtatggaaacaggggacacctatgttgaagcacgggatttgctggaacaaacccttactctccttgagtcttcccgtcccgtggaactagaccccagccaagttgcccaagagctctcctacctgatcgaagaagacaaggttcagcagattgataccaagatctttgacaacagcctctttttcgctgaggaaggcatccgcagtcacttggttcgtatccttgaaaaaggaaaacagaagagtcatgatttagaaaccattcaaaaacatatcactactgtcgagcaagaactgggaattgagtatgataacattcaaaaacaggctatctgtgatgctatccagaataaggtctttatcctgacaggtgggcctggtactggtaagacaactgttatcaatggaatcattgctgtttatgcccttttagaaggacttgacttcaggaagaaaagcaatctgcccattcttcttgctgctccaactggtcgagctgctcgtcgcatgaatgaattgacaggtttgcctagcgcgaccatacatcgccacttgggaatgacaggtgacgatgataccagtcatctggaagattacctagatgctgactttatcatcgtggatgaattctctatggtagatacttggctggccaatcaactcttctccaatatctcttctaacagtaagatcctcatcgtaggtgacagtgatcagctaccttctgtcagtcctggacaggttctagcggatctacttcatattcctttgattcctcagactcgcttggaaaaaatttatcgacaaagcaaagaatcaaccatcgtcaccctagctagtcagattcgacagggcatcttgccagctgatttcacccaaaaaaaagctgaccgttcctactttgaaattgctagtggccatattcctgccaccattgaaaaaatcttaggtgccgccctcagaaatggtattcccgcccgtgatatccaagttctggctcctatgtaccgagggacggcagggattgatgctatcaatcagctcatgcaagacctgctcaatcccccacaaaaagatcaactcagttttgaagctcctcagtgtcactatcgtaagagagacagggtcattcatttggttaacgatgctgaaatcaatgtctttaatggggatttaggagctatcacagacctgattcctggtaaatacaccgaatcgaaacaagacgagattgtcattgattttgatggtaatgaagtctcttacccccgtaacgaatggtacaagattcgcttggcctatgccatgagtattcataagtctcagggaagtgagttcccagttgtcatcctaccgattactagtgctagccgacgtatgctggagcgaaatctcatctacacagccattacacgtgccaaaagcaaactcatcttactaggcgaattacaagccttcgactatgctacccaacacatcggaactgcccgaaaaacctatctgattgaacgcttcagtgatctactggagaatgttgaagaaaagcaacaagctgtctctgaaacagtcacatcaagtgcctctgaacaatcctacatcctaaccgaagaaaactgggaccgcatcccagccatgattgggattacagacacagacctcaaagagatttttggaaaa

SEQ ID NO: 642 - protein, 788 aa, Streptococcus pneumoniae
  helicase, putative ( ); Cellular location: membrane; Similar to strain R6 sequence 15902407 (0.E+01)
MEVYFSGTIERIIFENPSNFYRILLLEIDDTDAEDFDDFEIIVTGTMADVIEGEDYTFWGQIVQHSKYGEQLQISRYDRAKPTSKGLVKYFSSSHFKGIGLKTAQKIVDTYGENTIDEILQHPEKLEGIAGLSAKNREAFVSTLRLNYGTEMILAKLANYGIPNKLAFQIQDFYKEETLDVVENYPYQLVEDIKGLGFTIADQLAEELGIESQAPERFRAGLVHSLFQACMETGDTYVEARDLLEQTLTLLESSRPVELDPSQVAQELSYLIEEDKVQQIDTKIFDNSLFFAEEGIRSHLVRILEKGKQKSHDLETIQKHITTVEQELGIEYDNIQKQAICDAIQNKVFILTGGPGTGKTTVINGIIAVYALLEGLDFRKKSNLPILLAAPTGRAARRMNELTGLPSATIHRHLGMTGDDDTSHLEDYLDADFIIVDEFSMVDTWLANQLFSNISSNSKILIVGDSDQLPSVSPGQVLADLLHIPLIPQTRLEKIYRQSKESTIVTLASQIRQGILPADFTQKKADRSYFEIASGHIPATIEKILGAALRNGIPARDIQVLAPMYRGTAGIDAINQLMQDLLNPPQKDQLSFEAPQCHYRKRDRVIHLVNDAEINVFNGDLGAITDLIPGKYTESKQDEIVIDFDGNEVSYPRNEWYKIRLAYAMSIHKSQGSEFPVVILPITSASRRMLERNLIYTAITRAKSKLILLGELQAFDYATQHIGTARKTYLIERFSDLLENVEEKQQAVSETVTSSASEQSYILTEENWDRIPAMIGITDTDLKEIFGK

SEQ ID NO: 643 - DNA, 141 bp, Streptococcus pneumoniae
ttgtttatttacaaatactcaatgaaaatcaaagaacaaactaggaagctagccgtaggctgcttaaaacagtgttttgaggttgtggatagaactgacgaagtcagctcaaaatactgttttgaggttgcagatggaagc

SEQ ID NO: 644 - protein, 47 aa, Streptococcus pneumoniae
  box element
MFIYKYSMKIKEQTRKLAVGCLKQCFEVVDRTDEVSSKYCFEVADGS

SEQ ID NO: 645 - DNA, 612 bp, Streptococcus pneumoniae
atgaattcatttaaaaatttcttaaaagagtggggattgttcctcctaattctgtcattactagctttaagtcgtatctttttttggagcaatgttcgcgtagaaggacattccatggatccgaccctagcggatggcgaaattctcttcgttgtaaaacaccttcctattgaccgttttgatatcgtggtggcccatgaggaagatggcaataaggacatcgtcaagcgcgtgattggaatgcctggcgacaccattcgttacgaaaatgataaactctacatcaatgacaaagaaacggacgagccttatctagcagactatatcaaacgcttcaaggatgacaaactccaaagcacttactcaggcaagggctttgaaggaaataaaggaactttctttagaagtatcgctcaaaaagctcaagccttcacagttgatgtcaactacaacaccaactttagctttactgttccagaaggagaataccttctcctcggagatgaccgcttggtttcgagcgacagccgccacgtaggtaccttcaaagcaaaagatatcacaggggaagctaaattccgcttatggccaatcacccgtatcggaacattt

SEQ ID NO: 646 - protein, 204 aa, Streptococcus pneumoniae
  signal peptidase I (spi); Cellular location: outside; Similar to strain R6 sequence 15902408 (e-117)
MNSFKNFLKEWGLFLLILSLLALSRIFFWSNVRVEGHSMDPTLADGEILFVVKHLPIDRFDIVVAHEEDGNKDIVKRVIGMPGDTIRYENDKLYINDKETDEPYLADYIKRFKDDKLQSTYSGKGFEGNKGTFFRSIAQKAQAFTVDVNYNTNFSFTVPEGEYLLLGDDRLVSSDSRHVGTFKAKDITGEAKFRLWPITRIGTF

SEQ ID NO: 647 - DNA, 879 bp, Streptococcus pneumoniae
atggcaagtatcacactcacaccaagcgaaaaggatattcaggcttttcttgaacactatcaaaccagtctggctcctagcaagaatccctatatccgctactttttgaaactacctcaagcaacggtttctatctatacttctggaaaaatcttgcttcagggtgaaggggctgaaaaatacgccagtttctttggctatcaagctgtagagcaaaccagcggacaaaatcttcctttaattgggacagatgaggtgggaaatggttcctactttggtgggcttgcagttgtggctgcctttgtcacacctgaccagcacgactttttacgaaaactcggtgtgggggattctaagactctgaccgaccaaaagatccgtcagattactcctattctcaaggaaaaaattcagcaccaggcactccttctctcacccagcaagtacaacgaggtcatcggagaccgctacaacgctgtttcggttaaggttgccctccataatcaggctatctatctcctccttcaaaaaggtgttcagcctgagaaaattgtgattgatgcctttaccagtgctaaaaattatgacaagtacttggcacaagaggccaatcgtttcagcaatcctatcagcttagaagaaaaggctgagggcaaatacttgtctgtcgcagtttcttctgtcattgcgcgtgatctctttctggaaaatcttgaaaatttgggacgagaactgggttatcagctcccaagtggagctggaacggcttctgacaaggtggctagccagattttgcaagcctatggtatgcagggactcagcttctgcgccaaattgcactttaaaaacactgaaaaagcgaaaaaacgcttagaaagg

SEQ ID NO: 648 - protein, 293 aa, Streptococcus pneumoniae
  ribonuclease HIII (rnhC); Cellular location: cytoplasm; Similar to strain R6 sequence 15902409 (e-160)
MASITLTPSEKDIQAFLEHYQTSLAPSKNPYIRYFLKLPQATVSIYTSGKILLQGEGAEKYASFFGYQAVEQTSGQNLPLIGTDEVGNGSYFGGLAVVAAFVTPDQHDFLRKLGVGDSKTLTDQKIRQITPILKEKIQHQALLLSPSKYNEVIGDRYNAVSVKVALHNQAIYLLLQKGVQPEKIVIDAFTSAKNYDKYLAQEANRFSNPISLEEKAEGKYLSVAVSSVIARDLFLENLENLGRELGYQLPSGAGTASDKVASQILQAYGMQGLSFCAKLHFKNTEKAKKRLER

SEQ ID NO: 649 - DNA, 309 bp, Streptococcus pneumoniae
gtgaattttatggcaaatctaaatcgattcaaatttacattcgggaaaaaatcgttaaccttgacaagcgaacatgacaacctttttatggaggaaatcgctaaggttgcgacagaaaaataccaagcaattaaagaacaaatgcctagcgcagatgatgaaacaatcgctcttttgttggcagtcaactgtttatcaactcagctcagccgtgagattgaatttgacgataaggagcaagagctagaagaactccgtcacaagcttgtgacttgtaagcaagaacagagcaagattgaggattcctta

SEQ ID NO: 650 - protein, 103 aa, Streptococcus pneumoniae
  hypothetical protein; Cellular location: cytoplasm; Similar to strain R6 sequence 15902410 (2.E-54)
MNFMANLNRFKFTFGKKSLTLTSEHDNLFMEEIAKVATEKYQAIKEQMPSADDETIALLLAVNCLSTQLSREIEFDDKEQELEELRHKLVTCKQEQSKIEDSL

SEQ ID NO: 651 - DNA, 546 bp, Streptococcus pneumoniae
atgatttcattccttcttctattggtcttggtttggggattttatatcggctatcggagaggcctgctcttacaggtttattacctgatttcagccatggcatcggcttttatggctggccagttttataaggggcttggagagcaattccatttattgctcccttatgcaaattcgcaggaaggtcaggggactttctttttcccatcggatcaactctttcagctggataaggtcttttatgcaggtatcggctacttgcttgtatttgggattgtctatagcattggtcgtttacttggtcttctcttacacttgattcctagcaaaaaactgggtggtaagttgttccaagtttcagcaggtatcttgtccatgttggtgaccttatttgtcttgcaaatggccttgacaatcttggcgaccatccccatggcagttatacaaaatcctcttgaaaagagtatcgtcgcaaaacacatcatccagagcataccggtaacaaccagttggctcaaacaaatctgggtgacaaatttaatcgga

SEQ ID NO: 652 - protein, 182 aa, Streptococcus pneumoniae
  conserved hypothetical protein; Cellular location: membrane; Similar to strain R6 sequence 15902411 (2.E-99)
MISFLLLLVLVWGFYIGYRRGLLLQVYYLISAMASAFMAGQFYKGLGEQFHLLLPYANSQEGQGTFFFPSDQLFQLDKVFYAGIGYLLVFGIVYSIGRLLGLLLHLIPSKKLGGKLFQVSAGILSMLVTLFVLQMALTILATIPMAVIQNPLEKSIVAKHIIQSIPVTTSWLKQIWVTNLIG

SEQ ID NO: 653 - DNA, 2334 bp, Streptococcus pneumoniae
atgaataagaaaatattagaaacattagagttcgataaggtcaaggccttgtttgagcctcatttgttgaccgagcagggcttggagcaattgagacaactggctccgactgccaaagcagataaaatcaaacaggcttttgctgagatgaaggaaatgcaggctcttttcgtcgagcaaccgcattttactattctctcaactaaggaaattgcaggagtctgcaagaggttggagatgggagcggatctcaatatcgaggagttcctactcttgaaacgcgtgcttcttgccagccgagaacttcaaaatttttacaccaatctggaaaatgtcagcttggaagaattagccctttggtttgagaaattacatgattttccgcaattacaaggaaatcttcaggcctttaatgatgcgggtttcattgaaaattttgccagtgaagaattggcgcgaatccgtcgaaaaatacatgatagcgagagtcaggtacgcgatgttttacaagacttgctcaagcaaaaagcgcagctgttgacggaaggaattgttgctagcagaaatggccgtcaggttttaccagtcaaaaacacctaccgcaataagattgcaggtgtcgttcatgatatttctgctagtggaaacaccgtctatatcgaaccccgtgaggtagtcaaactgagcgaagaaattgctagtctgcgagcagatgagcgctatgaaatgcttcgcattctccaagaaatttctgagcgtgtccgccctcatgcggctgagattgctaatgacgcttggattatcggtcatctggacttgattcgtgccaaggttcgatttatccaagaaagacaagcagtcgtgcctcagctgtcagaaaatcaagagattcaactgctccatgtctgccatcctttggtcaaaaatgccgtcgcaaatgatgtctattttggtcaagatttaacagctattgtcattacaggtcccaatacaggtgggaagaccatcatgctcaaaactctgggcttgacacaggtcatggcccagtcaggattgccgattttagcagacaagggaagtcgtgttggtatttttgaagaaatctttgctgatattggagatgagcagtctattgagcagagcttgtctaccttctctagtcatatgaccaatatcgtggatattcttggcaaggtcaaccaacattcactcttacttttggatgagttgggggctggtactgatccccaagagggagcagcccttgccatggctattctggaggaccttcgcctgcgtcaaatcaagaccatggcgacgacccactatccagaactcaaggcctacggtattgagacagcctttgtgcaaaatgccagtatggagtttgatactgcaactcttcgcccgacctatcgctttatgcagggtgttcctggccgaagtaatgcctttgaaattgccaaacgtctaggcctatctgaagttatcgtaggagatgccagtcagcagatcgatcaggacaatgacgtcaatcgtatcattgagcaattagaagagcagacgctggaaagccgcaaacgtttggacaatatccgtgaggtggagcaagaaaatctcaagatgaaccgtgcgctaaaaaaactctacaacgagcttaatcgtgaaaaggaaaccgagcttaacaaggcgcgtgaacaggctgctgagattgtggatatggccctaagtgaaagtgaccagattctcaaaaatctccacagtaaatcccaactcaagccccacgaaatcattgaagccaaggccaagttgaaaaaattggctcctgaaaaagtggacttgtctaaaaataaggtccttcaaaaggccaagaaaaaacgagctccaaaggtgggagatgatatcgtggttctcagttatggtcagcgtggtaccttgaccagtcaactcaaggacggtcgctgggaagcccaagttggcttgattaagatgaccttggaagagaaagagtttgatcttgttcaagcccagcaagaaaaaccagtcaagaagaaacaggtcaatgttgtgaaacgaacttctgggcgaggacctcaagctagactggatcttcgaggcaagcgctatgaagaagccatgaatgagctagataccttcatcgaccaagccttgcttaacaatatggctcaagttgatatcatccatggtatcggaacaggagtcatccgtgaaggagttaccaaatacttgcaaagaaacaaacatgtcaagagtttcggctatgccccacaaaatgctggaggcagtggtgcgactattgtcacttttaaagga

SEQ ID NO: 654 - protein, 778 aa, Streptococcus pneumoniae
  MutS2 family protein; Cellular location: cytoplasm; Similar to strain R6 sequence 15902412 (0.E+01)
MNKKILETLEFDKVKALFEPHLLTEQGLEQLRQLAPTAKADKIKQAFAEMKEMQALFVEQPHFTILSTKEIAGVCKRLEMGADLNIEEFLLLKRVLLASRELQNFYTNLENVSLEELALWFEKLHDFPQLQGNLQAFNDAGFIENFASEELARIRRKIHDSESQVRDVLQDLLKQKAQLLTEGIVASRNGRQVLPVKNTYRNKIAGVVHDISASGNTVYIEPREVVKLSEEIASLRADERYEMLRILQEISERVRPHAAEIANDAWIIGHLDLIRAKVRFIQERQAVVPQLSENQEIQLLHVCHPLVKNAVANDVYFGQDLTAIVITGPNTGGKTIMLKTLGLTQVMAQSGLPILADKGSRVGIFEEIFADIGDEQSIEQSLSTFSSHMTNIVDILGKVNQHSLLLLDELGAGTDPQEGAALAMAILEDLRLRQIKTMATTHYPELKAYGIETAFVQNASMEFDTATLRPTYRFMQGVPGRSNAFEIAKRLGLSEVIVGDASQQIDQDNDVNRIIEQLEEQTLESRKRLDNIREVEQENLKMNRALKKLYNELNREKETELNKAREQAAEIVDMALSESDQILKNLHSKSQLKPHEIIEAKAKLKKLAPEKVDLSKNKVLQKAKKKRAPKVGDDIVVLSYGQRGTLTSQLKDGRWEAQVGLIKMTLEEKEFDLVQAQQEKPVKKKQVNVVKRTSGRGPQARLDLRGKRYEEAMNELDTFIDQALLNNMAQVDIIHGIGTGVIREGVTKYLQRNKHVKSFGYAPQNAGGSGATIVTFKG

SEQ ID NO: 655 - DNA, 99 bp, Streptococcus pneumoniae
ttgagcagttgcctgccttgccccttcggtgcctttacggtctctccagagttccgtccatttacagtcatggaaaatcaaacgattccccacttctat

SEQ ID NO: 656 - protein, 33 aa, Streptococcus pneumoniae
  hypothetical protein; Cellular location: cytoplasm
MSSCLPCPFGAFTVSPEFRPFTVMENQTIPHFY

SEQ ID NO: 657 - DNA, 1320 bp, Streptococcus pneumoniae
atgttagaattgcttaaatcaatcgatgcttttgcttggggaccgcccctcttgattttattggtcggaacagggatttacctaactattcggctaggactcttgcaggttttgcgtctacccaaggcctttcagcttatttttatccaggataagggacatggtgatgtatccagttttgcagctctgtgtacagccttggcatcaactgttggaacaggaaatatcataggagttgcgacggctatcaaggttggtggaccaggagctctattttggatgtggatggcggctttctttggaatggctaccaagtatgcggaaggactcttggccatcaaataccgcaccaaggacgaccatggtgcagtagcgggaggtcccatgcattatatccttctagggatgggagaaaagtggcgaccacttgctgttttgtttgcagtagcaggagtattggttgctctcttgggaatcggaaccttcacccaagtcaactcgattgcagaatctatccaaaatacaacgacgatttcgccagccatcacagctctcgtcttgtctgtctttgtagcgattgcagtctttggtggactcaagtctatttctaaggtttcaactactgttgttccttttatggccatcatttatatcttaggaactcttacagttattttctttaatatcggaaaaatccctggcacaatcgctttagtctttacctcagcttttagtccccttgctgcggtaggtggatttgctggtgctagcgttcggatggctattcaaaatggtgtggcgcgtggtgtgttctcaaacgaatctggtctgggttctgctcctattgcagctgcagctgccaagacaaatgaaccagtagagcaaggtttgatttccatgacaggaacctttattgataccctcatcatttgtactctaactggtttgaccatcttggtaactggagtttggagcggtgacttgaatggggttgccttgactcagtcagctttctcaacaaacttttcacactttgggcctgctctcttgaccatcttccttgtactttttgcctttacaacgattctaggttggaactattacggagaacgctgttttgagttcctctttggggttcgctttatctggctctaccgtgtggtttttgtgctcatggtcttgttaggaggatttatcgagttggatatggtctggattatcgcagatatcgttaacgccttgatggctctgccaaacttgattgccctcttggtcttgtcgccagtcgttattgctgaaactaaaaagtattttgacaaa

SEQ ID NO: 658 - protein, 440 aa, Streptococcus pneumoniae
  sodium:alanine symporter family protein; Cellular location: membrane; Similar to strain R6 sequence 15902413 (0.E+01)
MLELLKSIDAFAWGPPLLILLVGTGIYLTIRLGLLQVLRLPKAFQLIFIQDKGHGDVSSFAALCTALASTVGTGNIIGVATAIKVGGPGALFWMWMAAFFGMATKYAEGLLAIKYRTKDDHGAVAGGPMHYILLGMGEKWRPLAVLFAVAGVLVALLGIGTFTQVNSIAESIQNTTTISPAITALVLSVFVAIAVFGGLKSISKVSTTVVPFMAIIYILGTLTVIFFNIGKIPGTIALVFTSAFSPLAAVGGFAGASVRMAIQNGVARGVFSNESGLGSAPIAAAAAKTNEPVEQGLISMTGTFIDTLIICTLTGLTILVTGVWSGDLNGVALTQSAFSTNFSHFGPALLTIFLVLFAFTTILGWNYYGERCFEFLFGVRFIWLYRVVFVLMVLLGGFIELDMVWIIADIVNALMALPNLIALLVLSPVVIAETKKYFDK

SEQ ID NO: 659 - DNA, 546 bp, Streptococcus pneumoniae
atgacaacatttactatccatacagtagagtcagcaccagcagaagtgaaagaaattcttgaaacagtagaaaaagacaacaatggctatattcccaacctaatcggtctcttggccaatgccccgactgttttagaagcctaccaaattgtctcatctatccaccgtcgcaacagcctgacacccgttgagcgtgaagtggtgcaaatcacggcagccgtgaccaatggttgtgccttctgtgtcgcaggtcacacagccttttccatcaaacaaatccagatgaatgatgacttgattcaagctcttcgcaatcgtactccaattgaaacagatcctaaattggataccctagctaagtttaccttggcagttatcaataccaagggtcgtgtaggagatgaagccttgtctgagtttttagaagctggctacactcaacaaaatgccttggatgtggtttttggtgtcagcctagcaatcctctgtaactatgccaacaacttagctaatacaccaattaatccagaattgcaaccttatgcc

SEQ ID NO: 660 - protein, 182 aa, Streptococcus pneumoniae
  conserved hypothetical protein (Macrophage infectivity); Cellular location: membrane; Similar to strain R6 sequence 15902414 (e-101)
MTTFTIHTVESAPAEVKEILETVEKDNNGYIPNLIGLLANAPTVLEAYQIVSSIHRRNSLTPVEREVVQITAAVTNGCAFCVAGHTAFSIKQIQMNDDLIQALRNRTPIETDPKLDTLAKFTLAVINTKGRVGDEALSEFLEAGYTQQNALDVVFGVSLAILCNYANNLANTPINPELQPYA

SEQ ID NO: 661 - DNA, 909 bp, Streptococcus pneumoniae
ttggaggttaggatgaaaaaactccccttagtattttcaggttgtttgctaggtttggcaggagctggaaatcttattttagatacgttgccggttctatcccatctttttagtctgattggtttggttttatggatttactttctaattctgcatctctttaattggaaagaaaccaagcaagaattgaccaagccccctcttttgtcaggaatggcaacctttcctatggctgggatgattttatcgacctatgtctttcgcgtattctcttatcttcctttggtagcacaagggatttggtggttttcatttctcttggatttgaccttgattgctggttttaccatcaagtttgcttgtccagggcggagggttcatgccactccaagctggacggttctctatgtggggatagcagtggctgccttgacctatcctctggtaggtattatcgaaattgcctatgcgaccttgagttttggttttctcttgaccttctatctctatccccttatttatagcgatttaaagaaacatccactcccactagccttgcttggacaagaaggaatctactgtgctcctttctctctactcttggcttctctagttcgagtaggaggaaccagcctgccgacttgggtcttgattgtcatgattttggcttctcaatccttctttttctttgttttaactcgtctgcccaacattttaaaacaaggttttcaaccagccttctcagccctcaccttcccaaccattatcacagcgacctcgctcaagatggctcagggaattttgaaacttccatttctggattacctggtattggctgaaaccattatatgcctaactattttattctttgtactaggtgcttatctgatttggttacgaaaaaaggtc

SEQ ID NO: 662 - protein, 303 aa, Streptococcus pneumoniae
  exfoliative toxin, putative; Cellular location: membrane; Similar to strain R6 sequence 15902415 (e-170)
MEVRMKKLPLVFSGCLLGLAGAGNLILDTLPVLSHLFSLIGLVLWIYFLILHLFNWKETKQELTKPPLLSGMATFPMAGMILSTYVFRVFSYLPLVAQGIWWFSFLLDLTLIAGFTIKFACPGRRVHATPSWTVLYVGIAVAALTYPLVGIIEIAYATLSFGFLLTFYLYPLIYSDLKKHPLPLALLGQEGIYCAPFSLLLASLVRVGGTSLPTWVLIVMILASQSFFFFVLTRLPNILKQGFQPAFSALTFPTIITATSLKMAQGILKLPFLDYLVLAETIICLTILFFVLGAYLIWLRKKV

SEQ ID NO: 663 - DNA, 1272 bp, Streptococcus pneumoniae
atgttagatatcaaacgtattcgtacagattttgaagctgtcgcagaaaaattagctacacgtggtgtagatgctgctgtcttgaatgaaatgaaagaaatcgatgctaaacgtcgtaacatcttggtcaaggttgaaactctcaaagcagaacgtaacacagtttctgctgagattgcccaagctaagcgcaacaaggaaaatacagatgacaagattgctgccatgcaaaatctatctgctgaggttaaagccttggatgctgaattggcagaaatcgatgctaaattgacagaatttacaacgactcttccaaatatcccagctgacagcgttcctgttggggctgacgaagacgacaatgtggaagttcgccgttggggtactccacgcgagtttgacttcgaacctaaagctcactgggatctcggtgaagaccttggtatccttgactgggaacgcggtggtaaggtaacaggcgctcgcttcctcttctataaaggcctcggtgctcgtttggaacgtgctatctacaactttatgttggatgaacatggaaaagaaggctatactgaagtcatcacaccttacatagtcaaccatgattctatgtttggtactggtcagtatccaaaatttaaggaagatacttttgaactcagcgataccaactttgtcttgattccaactgctgaagttcctctgacaaactactaccgtgatgaaatcttagacggcaaagatcttccaatctacttcactgccatgagtccgtcattccgttctgaggctggttctgccggtcgtgatacgcgtggcttgatccgtttgcaccaattccacaaggttgaaatggtcaaatttgccaaaccagaagaatcttacgaagaattggaaaaaatgacagccaacgctgaaaacattcttcaaaaactcaaccttccataccgtgtcgttgctctctctactggagatatgggcttctcagctgcgaagacttacgacttggaagtgtggattccagcacaaaacaattaccgtgaaatctcaagctgttcaaacacagaagatttccaagcccgtcgtgcccaaatccgttaccgtgatgaagcagatggcaaggtgaaactccttcataccttgaacggttctggacttgcagttggacgtacagtggctgcaattcttgaaaattaccaaaatgaagatggttctgtgaccatcccagaagcacttcgtccatacatgggtggagctgaagtcatcaaacca

SEQ ID NO: 664 - protein, 424 aa, Streptococcus pneumoniae
  seryl-tRNA synthetase (serS); Cellular location: cytoplasm; Similar to strain R6 sequence 15902416 (0.E+01)
MLDIKRIRTDFEAVAEKLATRGVDAAVLNEMKEIDAKRRNILVKVETLKAERNTVSAEIAQAKRNKENTDDKIAAMQNLSAEVKALDAELAEIDAKLTEFTTTLPNIPADSVPVGADEDDNVEVRRWGTPREFDFEPKAHWDLGEDLGILDWERGGKVTGARFLFYKGLGARLERAIYNFMLDEHGKEGYTEVITPYIVNHDSMFGTGQYPKFKEDTFELSDTNFVLIPTAEVPLTNYYRDEILDGKDLPIYFTAMSPSFRSEAGSAGRDTRGLIRLHQFHKVEMVKFAKPEESYEELEKMTANAENILQKLNLPYRVVALSTGDMGFSAAKTYDLEVWIPAQNNYREISSCSNTEDFQARRAQIRYRDEADGKVKLLHTLNGSGLAVGRTVAAILENYQNEDGSVTIPEALRPYMGGAEVIKP

SEQ ID NO: 665 - DNA, 369 bp, Streptococcus pneumoniae
atggcccaatcacttaacaaaacagtactcctcagtacgacaggcacttcctacctctctatcgctgggaaagttgggaaattccttgtcggagatcaggctttggaattttacccagatgtcaatgtcgaacaatttatccagattccttggagccatatcaatcagattggagccaatgtcactggacgcaaaatcagccgccacttcgaagtctttacagacaaaggaaaattcctctttgcttcaaaagactcaggtgccattctcaaaattgcacgcgaaaaactaggcaatgacaaggtcgtcaaacttccgaccctgattcagacaattagccaaaaatttaaaaatctatttgcaaaaaag

SEQ ID NO: 666 - protein, 123 aa, Streptococcus pneumoniae
  conserved hypothetical protein; Cellular location: cytoplasm; Similar to strain R6 sequence 15902417 (4.E-66)
MAQSLNKTVLLSTTGTSYLSIAGKVGKFLVGDQALEFYPDVNVEQFIQIPWSHINQIGANVTGRKISRHFEVFTDKGKFLFASKDSGAILKIAREKLGNDKVVKLPTLIQTISQKFKNLFAKK

SEQ ID NO: 667 - DNA, 1362 bp, Streptococcus pneumoniae
atgaaagttgttaaatttggaggtagttctcttgcctctgctagtcaattagaaaaagttttaaacatcgtcaaaagcgattcagagcgtcgttttgtagtcgtttctgcgcctggtaaacgcaatgctgaagatactaaggttacggatgccctgattaaatactaccgcgactatgttgcgggtaacgatattagcaagaaccaaagctggattatcgaccgctatgctgctatggttagtgaattgggactaaaaccagctgtgctagaaaaaatttctaaaagcattcacgccttggccactcttcctattgaagaaaatgaatttctctacgatactttcctagcagccggtgaaaataacaatgccaaattgattgctgcctactttaaccaaaatggtatcgatgcacgctatatgcaccctagagaagctgggattgtggtcacaagtgaacctggtcacgctcgcatcattccatcaagttatgacaagattgaagaattgacaaacaccaatgaagtccttgtcattcctggtttctttggtgtcactaaggaaaatcaaatctgtactttctcacgtggaggttctgatattacaggttctatcattgctgctggtgtcaaagctgacctctatgaaaactttacggacgttgatggtatctttgcagcccaccctggtattatccaccaaccacactcgattcctgagttgacctaccgtgaaatgcgcgagttggcctatgcaggcttctcagtccttcatgacgaggctcttcttcctgcctaccgtggaaaaattcctctggttatcaagaataccaacaaccctgaccatccaggtactcgtatcgttctaaaacacagtaatgatgaatttccagttgtgggaattgctggtgactcaggctttgtcagcattaacatgtcgaaatacctcatgaaccgtgaggttggatttggccgcaaggttctgcaaatcctggaagaacttaacatcggttgggaacatatgccaacaggtatcgacgatctttctatcattctccgttctcgccaactaactcccatcaaggaagaagaaatcctgcgtcagttggttcaaaaggctaaagtagatcatgcagaaatcgaacacgacctttctatcattatgattgttggtgaaaaaatgaagagccatatcggagtgactgctactgcgacacgcgctctatctgaaaacaaaatcaacatccagatgatgtctcaaggttctagtgaagtttctattatgtttgttgtcaataaagaccaagagaaagcagcaattaaagccctctacaatgccttttttggagaaagtaaggaagac

SEQ ID NO: 668 - protein, 454 aa, Streptococcus pneumoniae
  aspartate kinase; Cellular location: cytoplasm; Similar to strain R6 sequence 15902418 (0.E+01)
MKVVKFGGSSLASASQLEKVLNIVKSDSERRFVVVSAPGKRNAEDTKVTDALIKYYRDYVAGNDISKNQSWIIDRYAAMVSELGLKPAVLEKISKSIHALATLPIEENEFLYDTFLAAGENNNAKLIAAYFNQNGIDARYMHPREAGIVVTSEPGHARIIPSSYDKIEELTNTNEVLVIPGFFGVTKENQICTFSRGGSDITGSIIAAGVKADLYENFTDVDGIFAAHPGIIHQPHSIPELTYREMRELAYAGFSVLHDEALLPAYRGKIPLVIKNTNNPDHPGTRIVLKHSNDEFPVVGIAGDSGFVSINMSKYLMNREVGFGRKVLQILEELNIGWEHMPTGIDDLSIILRSRQLTPIKEEEILRQLVQKAKVDHAEIEHDLSIIMIVGEKMKSHIGVTATATRALSENKINIQMMSQGSSEVSIMFVVNKDQEKAAIKALYNAFFGESKED

SEQ ID NO: 669 - DNA, 102 bp, Streptococcus pneumoniae
ttgagtgttaaattatttcactgtcaaagtatatcttttttaggagcagaaagcaagaaaaaatcgactgaaagtgtctcagccgataagaaaggctcgctt

SEQ ID NO: 670 - protein, 34 aa, Streptococcus pneumoniae
  hypothetical protein; Cellular location: cytoplasm
MSVKLFHCQSISFLGAESKKKSTESVSADKKGSL

SEQ ID NO: 671 - DNA, 165 bp, Streptococcus pneumoniae
ttgataaataatgtgttccatcagggctcctttttattttataagcagtttatactcttcgaaaatctctttaaaccgcgtcagcttccatctgcaacctcaaaacagtattttgagctgacttcgtctagcttcttagtttgctctttgattttcattgagtgt

SEQ ID NO: 672 - protein, 55 aa, Streptococcus pneumoniae
  box element
MINNVFHQGSFLFYKQFILFENLFKPRQLPSATSKQYFELTSSSFLVCSLIFIEC

SEQ ID NO: 673 - DNA, 783 bp, Streptococcus pneumoniae
atggaacacattatttatcaacttgaagaggacttggcaatccttaccttgaaccgtcctgaggtcgcaaatggttttcatattcccatgtgtgaggagattttagaagctctgactttggcagaagaaaatccagctgtgcattttatcttaatcaatgccaatggaaaggtcttctcagttgggggagatttggtagagatgaagcgggcagtggatgaggatgatattccatcattgacaaaaatcgcagagttggtcaatacgatttcttataaaatcaagcaaatagccaaacctgttttaatggaagttgacggtgctgttgcaggtgccgcagcgaatatggctgttgcggcagatttctgtttggcgacggataaggctaagtttatccaagcctttgttggtgttggtttggctccagatgcaggggggattcatctcttgagccgcagtatcggtgtgacgcgtgctgctcaattagctatgacaggagaggctttaacggcagaaaaagccctagaatgggggttggtttaccgcgtttctgaagctgaaaaacttgaaaagacgagagaacagcttcttaaaaaattaagacgtgcttcaagtaattcctatgctgccattaagaagttggtttgggagagccaatttaaagactggcagggttacgctactttagaactgaacctacagaaatccttagctcaaacagaggatttcaaagaaggagtgcgagctcattcggagagaagaagacctaaatttacaggaaaa

SEQ ID NO: 674 - protein, 261 aa, Streptococcus pneumoniae
  enoyl-CoA hydratase/isomerase family protein; Cellular location: cytoplasm; Similar to strain R6 sequence 15902419 (e-144)
MEHIIYQLEEDLAILTLNRPEVANGFHIPMCEEILEALTLAEENPAVHFILINANGKVFSVGGDLVEMKRAVDEDDIPSLTKIAELVNTISYKIKQIAKPVLMEVDGAVAGAAANMAVAADFCLATDKAKFIQAFVGVGLAPDAGGIHLLSRSIGVTRAAQLAMTGEALTAEKALEWGLVYRVSEAEKLEKTREQLLKKLRRASSNSYAAIKKLVWESQFKDWQGYATLELNLQKSLAQTEDFKEGVRAHSERRRPKFTGK

SEQ ID NO: 675 - DNA, 432 bp, Streptococcus pneumoniae
atggactaccaacgaatcaatgaatatttaacatctatatttaacaatgtccttgtaattgaggaagtgaacttgagaggtagtcgttttaaggatatctccatcaaagaaatgcatacgattgatgtcatcggtaaggctccagacgtgactccaagtcaagtgtcaaaagagttgatggtaactcttggaactgttacgacaagtttgaacaatttagagcgtaagggctacattgagcgagttcggtcagaacaggatcgtcgtgtggtgcatctgcatttgacaaagaagggtcgcttgattcatagactgcataaacgcttccacaaggccatggtagaaaaaattattgatggcatgagcgaggaagaaattgctgtcatgggtaaaggtttgactaatctttaccaatttttggaggatttgaaa

SEQ ID NO: 676 - protein, 144 aa, Streptococcus pneumoniae
  transcriptional regulator, MarR family; Cellular location: cytoplasm; Similar to strain R6 sequence 15902420 (2.E-78)
MDYQRINEYLTSIFNNVLVIEEVNLRGSRFKDISIKEMHTIDVIGKAPDVTPSQVSKELMVTLGTVTTSLNNLERKGYIERVRSEQDRRVVHLHLTKKGRLIHRLHKRFHKAMVEKIIDGMSEEEIAVMGKGLTNLYQFLEDLK

SEQ ID NO: 677 - DNA, 972 bp, Streptococcus pneumoniae
atggcttttgcaaaaataagtcaggttgctcattatgtgccagagcaagtggttacaaatcacgacttggctcagattatggataccaatgatgagtggatttcaagtcgaacgggaatacgacaaaggcatatttcaagaacagaatctaccagtgatttggctacagaggttgctaagaaactgatggcaaaagctggaataacaggagaagaactggattttatcatcctagctaccattactccagattcgatgatgccctctacagctgctcgtgttcaagctaatattggtgctaataaagcctttgcttttgacttaaccgcggcttgcagtggatttgtatttgctctttcaactgctgaaaagtttatcgcttctggtcgctttcaaaaaggcttggtgattggtagtgaaaccctctctaaggcagtcgattggtcggatcgatcaacagctgtgttgtttggagatggtgctggtggtgtcttgttagaagctagcgagcaagagcatttcttagctgagagtctcaatagcgatggaagtcgcagcgagtgtttaacttatgggcattcaggtttacattctccattttcagatcaagaaagtgcagattcgtttttgaagatggatggacgcacagtctttgattttgccattcgagatgtagccaagtctatcaagcagactattgatgaatctcctatagaggtgacagacttggattatctgctacttcatcaagccaatgaccgtattttggataagatggctagaaaaattggtgttgaccgagccaaacttccagccaatatgatggaatatggcaataccagtgcagccagtatcccgattttactttcagagtgtgtagaacaaggtctcatccctttagatggtagccagactgttcttctatcaggcttcggtggaggcttgacctggggcacgctcattcttacaatt

SEQ ID NO: 678 - protein, 324 aa, Streptococcus pneumoniae
  3-oxoacyl-(acyl-carrier-protein) synthase III (fabH); Cellular location: membrane; Similar to strain R6 sequence 15902421 (0.E+01)
MAFAKISQVAHYVPEQVVTNHDLAQIMDTNDEWISSRTGIRQRHISRTESTSDLATEVAKKLMAKAGITGEELDFIILATITPDSMMPSTAARVQANIGANKAFAFDLTAACSGFVFALSTAEKFIASGRFQKGLVIGSETLSKAVDWSDRSTAVLFGDGAGGVLLEASEQEHFLAESLNSDGSRSECLTYGHSGLHSPFSDQESADSFLKMDGRTVFDFAIRDVAKSIKQTIDESPIEVTDLDYLLLHQANDRILDKMARKIGVDRAKLPANMMEYGNTSAASIPILLSECVEQGLIPLDGSQTVLLSGFGGGLTWGTLILTI

SEQ ID NO: 679 - DNA, 222 bp, Streptococcus pneumoniae
atggcagtatttgaaaaagtacaagaaattatcgttgaagaacttggaaaagacgcatcagaagtaacacttgaatcaacttttgatgatttggacgcagattcattggacttgttccaagtaatctcagaaatcgaagatgcttttgatatccaaatcgaagcagaaaatgacttgaaaacagttggtgacttggttgcttacgttgaagagcaagcaaaa

SEQ ID NO: 680 - protein, 74 aa, Streptococcus pneumoniae
  acyl carrier protein (acpP); Cellular location: cytoplasm; Similar to strain R6 sequence 15902422 (3.E-36)
MAVFEKVQEIIVEELGKDASEVTLESTFDDLDADSLDLFQVISEIEDAFDIQIEAENDLKTVGDLVAYVEEQAK

SEQ ID NO: 681 - DNA, 972 bp, Streptococcus pneumoniae
atgaaaacgcgtattacagaattattgaagattgattatcctattttccaaggagggatggcctgggttgctgatggtgatttggcaggggctgtttccaaggctggaggattaggaattatcggtgggggaaatgccccgaaagaagttgtcaaggccaatattgataaaatcaaatcattgactgataaaccctttggggtcaacatcatgctcttatctccctttgtggaagacatcgtggatctcgttattgaagaaggtgttaaagttgtcacaacaggagcaggaaatccaagcaagtatatggaacgtttccatgaagctgggataatcgttattcctgttgttcctagtgtcgctttagctaaacgcatggaaaaaatcggtgcagacgctgttattgcagaaggaatggaagctggggggcatatcggtaaattaacaaccatgaccttggtgcgacaggtagccacagctatatctattcctgttattgctgcaggaggaattgcggatggtgaaggtgctgcggctggctttatgctaggtgcagaggctgtacaggtggggacacggtttgtagttgcaaaagagtcgaatgcccatccaaactacaaggagaaaattttaaaagcaagggatattgatactacgatttcagctcagcactttggtcatgctgttcgtgctattaaaaatcagttgactagagattttgaactggctgaaaaagatgcctttaagcaagaagatcctgatttagaaatctttgaacaaatgggagcaggtgctctagccaaagcagttgttcacggtgatgtggatggtggctctgttatggcaggtcaaatcgcagggcttgtttctaaagaagaaacagctgaagaaatcctaaaagatttgtattacggagccgctaagaaaattcaagaagaagcctctcgctggacaggagttgtaagaaatgac

SEQ ID NO: 682 - protein, 324 aa, Streptococcus pneumoniae
  trans-2-enoyl-ACP reductase (fabK); Cellular location: membrane; Similar to strain R6 sequence 15902423 (0.E+01)
MKTRITELLKIDYPIFQGGMAWVADGDLAGAVSKAGGLGIIGGGNAPKEVVKANIDKIKSLTDKPFGVNIMLLSPFVEDIVDLVIEEGVKVVTTGAGNPSKYMERFHEAGIIVIPVVPSVALAKRMEKIGADAVIAEGMEAGGHIGKLTTMTLVRQVATAISIPVIAAGGIADGEGAAAGFMLGAEAVQVGTRFVVAKESNAHPNYKEKILKARDIDTTISAQHFGHAVRAIKNQLTRDFELAEKDAFKQEDPDLEIFEQMGAGALAKAVVHGDVDGGSVMAGQIAGLVSKEETAEEILKDLYYGAAKKIQEEASRWTGVVRND

SEQ ID NO: 683 - DNA, 918 bp, Streptococcus pneumoniae
atgactaaaacagcctttttatttgctggtcaaggtgcccagtatctagggatgggacgggatttctatgatcagtatccgattgttaaagaaacgattgatcgagcgagccaggtgctcggttatgatttgcgttatctcatcgatacggaagaagacaaactcaatcagacccgctatacgcaaccagccattctagcgacttcggttgctatctaccgtttattgcaagaaaagggctatcagcctgatatggttgctggtttgtctcttggagaatactctgccttggtggcaagtggcgccttggattttgaagatgcggttgccttggtagctaagcgtggagcctatatggaagaagcggctcctgctgactctggcaagatggtagcagttctcaatacgccagtagaggtcattgaagaagcctgtcaaaaagcttctgaacttggagtggttactccagccaactataacacacctgcacaaatcgtcattgctggagaagtggttgcagttgatcgagcggttgaacttttgcaagaagcaggtgccaaacgcttgattcctcttaaggtgtcaggtccctttcacaccgctctccttgaacctgctagccagaaactagctgaaactctagctcaggtaagtttttcagattttacttgtcccctagtcggcaatacagaagctgctgtgatgcaaaaagaggacattgctcagctcttgacgcgtcaggtcaaggaacccgttcgtttctatgaaagtattggggtcatgcaagaagcaggcataagcaactttatcgagattggaccggggaaagtcttgtcaggttttgttaaaaaaattgatcaaactgctcacttagctcatgtggaagatcaagcgagtttagtagcacttttagaaaaa

SEQ ID NO: 684 - protein, 306 aa, Streptococcus pneumoniae
  malonyl CoA-acyl carrier protein transacylase (fabD); Cellular location: membrane; Similar to strain R6 sequence 15902424 (e-169)
MTKTAFLFAGQGAQYLGMGRDFYDQYPIVKETIDRASQVLGYDLRYLIDTEEDKLNQTRYTQPAILATSVAIYRLLQEKGYQPDMVAGLSLGEYSALVASGALDFEDAVALVAKRGAYMEEAAPADSGKMVAVLNTPVEVIEEACQKASELGVVTPANYNTPAQIVIAGEVVAVDRAVELLQEAGAKRLIPLKVSGPFHTALLEPASQKLAETLAQVSFSDFTCPLVGNTEAAVMQKEDIAQLLTRQVKEPVRFYESIGVMQEAGISNFIEIGPGKVLSGFVKKIDQTAHLAHVEDQASLVALLEK

SEQ ID NO: 685 - DNA, 729 bp, Streptococcus pneumoniae
atgaaactagaacataaaaatatctttattacaggttcgagtcgtggaattggtcttgccatcgcccacaagtttgctcaagcaggagccaacattgtcttaaacagtcgtggggcaatctcagaagaattgctcgctgagttttcaaactatggtatcaaggtggttcccatttcaggagatgtatcagattttgcagacgctaagcgtatgattgatcaagctattgcagaactgggttcagtagatgttttggtcaacaatgcagggattacccaagatactcttatgctcaagatgacagaagcagattttgaaaaagtgctcaaggtcaatctgactggtgcctttaatatgacacaatcagtcttgaaaccgatgatgaaagccagagaaggtgctatcattaatatgtctagtgttgttggtttgatggggaatattggtcaagctaattatgctgcttctaaggctggcttgattggctttaccaagtctgtggcacgcgaggtcgctagtcggaatatacgagtcaatgtgattgctccaggaatgattgagtctgatatgaccgctatcctgtcagataagattaaggaagctacactagctcagattccgatgaaagaatttgggcaggcagagcaggttgcagatttgacagtatttttagcaggccaagattatctaactggacaagtggttgccattgatggtggcttaagtatg

SEQ ID NO: 686 - protein, 243 aa, Streptococcus pneumoniae
  3-oxoacyl-[acyl-carrier protein] reductase (fabG); Cellular location: cytoplasm; Similar to strain R6 sequence 15902425 (e-131)
MKLEHKNIFITGSSRGIGLAIAHKFAQAGANIVLNSRGAISEELLAEFSNYGIKVVPISGDVSDFADAKRMIDQAIAELGSVDVLVNNAGITQDTLMLKMTEADFEKVLKVNLTGAFNMTQSVLKPMMKAREGAIINMSSVVGLMGNIGQANYAASKAGLIGFTKSVAREVASRNIRVNVIAPGMIESDMTAILSDKIKEATLAQIPMKEFGQAEQVADLTVFLAGQDYLTGQVVAIDGGLSM

SEQ ID NO: 687 - DNA, 1242 bp, Streptococcus pneumoniae
gtgaaaagaatgaaactaaatcgagtagtggtaacaggttatggagtaacatctccaatcggaaatacaccagaagaattttggaatagtttagcaactgggaaaatcggcattggtggcattacaaaatttgatcatagtgactttgatgtgcataatgcggcagaaatccaagattttccgttcgataaatactttgtaaaaaaagataccaaccgttttgataactattctttatatgccttgtatgcagcccaagaggctgtaaatcatgccaatcttgatgtagaggctcttaatagggatcgttttggtgttatcgttgcatctggtattggtggaatcaaggaaattgaagatcaggtacttcgccttcatgaaaaaggacccaaacgtgtcaaaccaatgactcttccaaaagctttaccaaatatggcttctgggaatgtagccatgcgttttggtgcaaacggtgtttgtaaatctatcaatactgcctgctcttcatcaaatgatgcgattggggatgccttccgctccattaagtttggtttccaagatgtgatgttggtgggaggaacagaagcttctatcacaccttttgccatcgctggtttccaagccttaacagctctctctactacagaggatccaactcgtgcttcgatcccatttgataaggatcgcaatgggtttgttatgggtgaaggttcagggatgttggttctagaaagtcttgaacacgctgaaaaacgtggagctactatcctggctgaagtggttggttacggaaatacttgtgatgcctaccacatgacttctccacatccagaaggtcagggagctatcaaggccatcaaactagccttggaagaagctgagatttctccagagcaagtagcctatgtcaatgctcacggaacgtcaactcctgccaatgaaaaaggagaaagtggtgctatcgtagctgttcttggtaaggaagtacctgtatcatcaaccaagtcttttacaggacatttgctgggggctgcgggtgcagtagaagctatcgtcaccatcgaagctatgcgtcataactttgtaccaatgacagctgggacaagtgaagtatcagattatatcgaagctaatgtcgtttatggacaaggcttggagaaagaaattccatacgctatttcaaatacttttggttttggaggccacaatgcagttcttgctttcaaacgttgggagaataga

SEQ ID NO: 688 - protein, 414 aa, Streptococcus pneumoniae
  3-oxoacyl-(acyl-carrier-protein) synthase II (fabF); Cellular location: outside; Similar to strain R6 sequence 15902426 (0.E+01)
MKRMKLNRVVVTGYGVTSPIGNTPEEFWNSLATGKIGIGGITKFDHSDFDVHNAAEIQDFPFDKYFVKKDTNRFDNYSLYALYAAQEAVNHANLDVEALNRDRFGVIVASGIGGIKEIEDQVLRLHEKGPKRVKPMTLPKALPNMASGNVAMRFGANGVCKSINTACSSSNDAIGDAFRSIKFGFQDVMLVGGTEASITPFAIAGFQALTALSTTEDPTRASIPFDKDRNGFVMGEGSGMLVLESLEHAEKRGATILAEVVGYGNTCDAYHMTSPHPEGQGAIKAIKLALEEAEISPEQVAYVNAHGTSTPANEKGESGAIVAVLGKEVPVSSTKSFTGHLLGAAGAVEAIVTIEAMRHNFVPMTAGTSEVSDYIEANVVYGQGLEKEIPYAISNTFGFGGHNAVLAFKRWENR

SEQ ID NO: 689 - DNA, 483 bp, Streptococcus pneumoniae
atgaatttaaacgatattaaagacttgatgactcaatttgaccagtcaagtttgagagaattttcttataaaaatgggacggatgagttgcagtttagcaagaatgaagcaagacctgtgcctgaagttgcaactcaagtcgctccagcacccgttctagcaacaccgagtccagtagctcctacatctgctccagcagagactgtagcagaagaagttccagctccagctgaagcaagtgtggctactgagggaaatcttgtagagagtccacttgttggagtggtttacttggctgctggaccagataaacctgccttcgttacagttggtgatagtgtcaaaaaaggtcaaacattggtaattatcgaagccatgaaagtcatgaatgaaatcccagctcctaaggatggtgtggtaacggaaattctcgtctctaacgaagaaatggttgagtttggtaaaggattggtacgtatcaaa

SEQ ID NO: 690 - protein, 161 aa, Streptococcus pneumoniae
  acetyl-CoA carboxylase, bitoin carboxyl carrier protein (accB); Cellular location: cytoplasm; Similar to strain R6 sequence 15902427 (4.E-87)
MNLNDIKDLMTQFDQSSLREFSYKNGTDELQFSKNEARPVPEVATQVAPAPVLATPSPVAPTSAPAETVAEEVPAPAEASVATEGNLVESPLVGVVYLAAGPDKPAFVTVGDSVKKGQTLVIIEAMKVMNEIPAPKDGVVTEILVSNEEMVEFGKGLVRIK

SEQ ID NO: 691 - DNA, 420 bp, Streptococcus pneumoniae
atgatcgatattcaaggaatcaaagaagctcttccccaccgttatcctatgcttctagtggaccgtgtcttggaagtgagcgaggataccattgttgctatcaaaaatgtgaccatcaacgagcctttctttaacggccactttcctcaatacccagttatgccaggtgttgtgattatggaagccttggcgcaaactgccggtgtgttggagttatcaaaacctgaaaataaaggaaaactggtcttttacgctggtatggacaaggttaagttcaagaagcaagttgtaccaggcgaccaattggttatgacagcgacttttgtaaaacgtcgtggcaccatagctgtggttgaagcaaaggctgaagtggatggcaagcttgcagccagtggtacccttacttttgcaattgggaac

SEQ ID NO: 692 - protein, 140 aa, Streptococcus pneumoniae
  (3R)-hydroxymyristoyl-(acyl-carrier-protein) dehydratase (fabZ); Cellular location: cytoplasm; Similar to strain R6 sequence 15902428 (7.E-75)
MIDIQGIKEALPHRYPMLLVDRVLEVSEDTIVAIKNVTINEPFFNGHFPQYPVMPGVVIMEALAQTAGVLELSKPENKGKLVFYAGMDKVKFKKQVVPGDQLVMTATFVKRRGTIAVVEAKAEVDGKLAASGTLTFAIGN

SEQ ID NO: 693 - DNA, 1365 bp, Streptococcus pneumoniae
atgtttcgaaaaattttaattgccaatcgtggtgaaattgcggttcgtattatccgtgcggcacgtgaattggggattgcgacggtagcggtttattcaactgctgataaggaagctcttcatacgcttttggcagatgaagcagtttgtattggtcctggcaaggcaacagagtcttatctcaatattaatgcagttctatcagctgcagtcttgactgaggcagaagctattcaccctggttttggatttctcagtgaaaattccaaatttgcgaccatgtgtgaagaagtaggtatcaagtttatcggtccatctggtcatgttatggatatgatgggggataagatcaatgcgcgtgctcagatgattaaagcaggtgtgcctgttataccaggttcagatggagaagtgcataactctgaagaagctttgattgttgctgaaaaaattggctatcctgttatgctcaaggcttcagcaggtggaggtggtaaagggattcgtaaggttgaaaaaccagatgacctcgtttctgcctttgaaactgcctctagtgaggccaaggccaattatggcaatggtgccatgtacatagaacgggttatctatccagctcggcacattgaggttcaaatcctaggtgatgagcatggacatgtgattcacttgggtgaacgggattgttctcttcaaaggaataaccaaaaggttttggaagaaagtccctcgattgcaatcggaaaaacgctgcgtcatgaaataggtgctgctgctgttcgagcggcagagtttgttggctatgagaatgcaggaaccattgaatttcttcttgatgaagcaagtagcaatttctatttcatggagatgaatactcgtgttcaggtagaacatccagtaacagagtttgtttcaggtgttgatatcgttaaggaacagatttgcattgcggcaggtcagcctttgtctgttaagcaagaagatattgtcctacgcggtcatgccatcgagtgtcgtatcaatgcagaaaacccagcctttaactttgctccaagtccaggtaagattactaatctctatctgccaagtggtggagttggcttgcgcgtggattcagcagtttatccaggttataccattccgccttattatgatagtatgattgccaaaatcatagtacacggcgaaaatcgttttgacgccttgatgaaaatgcaacgtgccctctatgaattagaaattgaaggagtgcagaccaatgcagatttccagcttgacctcatttcagatcgcaatgtcattgctggggattatgatacttccttcttgatggaaaccttcttacctaaatatcaagaaaaagaa

SEQ ID NO: 694 - protein, 455 aa, Streptococcus pneumoniae
  acetyl-CoA carboxylase, biotin carboxylase (accC); Cellular location: cytoplasm; Similar to strain R6 sequence 15902429 (0.E+01)
MFRKILIANRGEIAVRIIRAARELGIATVAVYSTADKEALHTLLADEAVCIGPGKATESYLNINAVLSAAVLTEAEAIHPGFGFLSENSKFATMCEEVGIKFIGPSGHVMDMMGDKINARAQMIKAGVPVIPGSDGEVHNSEEALIVAEKIGYPVMLKASAGGGGKGIRKVEKPDDLVSAFETASSEAKANYGNGAMYIERVIYPARHIEVQILGDEHGHVIHLGERDCSLQRNNQKVLEESPSIAIGKTLRHEIGAAAVRAAEFVGYENAGTIEFLLDEASSNFYFMEMNTRVQVEHPVTEFVSGVDIVKEQICIAAGQPLSVKQEDIVLRGHAIECRINAENPAFNFAPSPGKITNLYLPSGGVGLRVDSAVYPGYTIPPYYDSMIAKIIVHGENRFDALMKMQRALYELEIEGVQTNADFQLDLISDRNVIAGDYDTSFLMETFLPKYQEKE

SEQ ID NO: 695 - DNA, 864 bp, Streptococcus pneumoniae
atggctctatttagtaaaaaagataagtatattcgaatcaatcccaatcgttcggttagggaaaaacctcaagctaagccagaggttccagatgaattattttcccagtgtccaggctgtaagcataccatctatcagaaggatctgggaagtgaacgtatctgtccgcactgtagctatacctttcgtatttctgcccaagaacgcttggctttgacgattgatatgggaaccttcaaagaattgtttacagggattgaaagcaaggatcccttgcatttccctggttaccaaaagaaactggcatctatgcgtgaaaaaacaggtctgcatgaagccgttgtgacaggaactgctcttattaaaggtcagactgtggctcttgggattatggattctaactttatcatggcttctatgggtacggttgtaggtgaaaaaatcactcgtttgtttgagtatgcgactgtcgaaaaattgccagttgtcctattcacagcctctggtggagcccgtatgcaggaaggaatcatgagtctcatgcagatggctaagatctctgcggcggttaaacgccattcaaatgctggtctcttttacctgaccattttgacagatccaacgactggtggtgtgacagcttctttcgctatggaaggcgatatcattctggctgaaccacagagcttggttggttttgctgggcgtcgtgtgattgaaaatacggttcgtgaaagcttgcctgaggatttccaaaaggcagaattcctattagaacatggctttgtggatgctattgtcaaaagaagagacttaccagatacgattgctagcctagtcagattgcatggagggagtcctaga

SEQ ID NO: 696 - protein, 288 aa, Streptococcus pneumoniae
  acetyl-CoA carboxylase, carboxyl transferase subunit beta (accD); Cellular location: cytoplasm; Similar to strain R6 sequence 15902430 (e-164)
MALFSKKDKYIRINPNRSVREKPQAKPEVPDELFSQCPGCKHTIYQKDLGSERICPHCSYTFRISAQERLALTIDMGTFKELFTGIESKDPLHFPGYQKKLASMREKTGLHEAVVTGTALIKGQTVALGIMDSNFIMASMGTVVGEKITRLFEYATVEKLPVVLFTASGGARMQEGIMSLMQMAKISAAVKRHSNAGLFYLTILTDPTTGGVTASFAMEGDIILAEPQSLVGFAGRRVIENTVRESLPEDFQKAEFLLEHGFVDAIVKRRDLPDTIASLVRLHGGSPR

SEQ ID NO: 697 - DNA, 765 bp, Streptococcus pneumoniae
atgaatattgcaaaaatagtcagagaagcgcgtgagcagagtcgcttgacaaccttggactttgcgacaggcatttttgatgaatttatccaattacatggtgaccgttcttttcgtgatgatggtgcagttgttggtggtattggttggcttggagaccaagctgtaacagtggttggtatccaaaaaggcaagagtttgcaagacaacctcaaacggaattttggccaaccacatccagaaggctaccgaaaggcactgcggttgatgaaacaggctgagaaatttggccgtccagttgtgacctttatcaatacagcaggtgcttatcctggtgtcggagcggaagaacgtggtcaaggggaagctatcgctcgcaatctcatggaaatgagtgacctgaaagttcctattatcgccattattatcggtgaaggtggttcaggcggggctctggctctagctgtcgcggaccgtgtctggatgctggaaaattctatctatgccattctcagtccagaaggctttgcttccattttatggaaggacggtactcgcgctatggaagcagcagaactgatgaaaatcacttcgcatgaactgttagaaatggacgtggtggataaggtgatttctgaaataggactttctagtaaagaactgattaagagtgtcaaaaaagaactccaaacggagctggctagactttcacaaaaaccgctagaagagttgctggaagaacgctatcaacgatttagaaaatac

SEQ ID NO: 698 - protein, 255 aa, Streptococcus pneumoniae
  acetyl-CoA carboxylase, carboxyl transferase subunit alpha (accA); Cellular location: membrane; Similar to strain R6 sequence 15902431 (e-142)
MNIAKIVREAREQSRLTTLDFATGIFDEFIQLHGDRSFRDDGAVVGGIGWLGDQAVTVVGIQKGKSLQDNLKRNFGQPHPEGYRKALRLMKQAEKFGRPVVTFINTAGAYPGVGAEERGQGEAIARNLMEMSDLKVPIIAIIIGEGGSGGALALAVADRVWMLENSIYAILSPEGFASILWKDGTRAMEAAELMKITSHELLEMDVVDKVISEIGLSSKELIKSVKKELQTELARLSQKPLEELLEERYQRFRKY

SEQ ID NO: 699 - DNA, 105 bp, Streptococcus pneumoniae
atgagactagaaaggtctcattttttatggaaaaatgtaattcaggtcgaaaaattgccagttgaggagatgggctataaaatagacaaaaaaagaaatatacta

SEQ ID NO: 700 - protein, 35 aa, Streptococcus pneumoniae
  hypothetical protein; Cellular location: cytoplasm
MRLERSHFLWKNVIQVEKLPVEEMGYKIDKKRNIL

SEQ ID NO: 701 - DNA, 183 bp, Streptococcus pneumoniae
atgacaggtacaaatacatttacagttctttcaactgaggacttggagcaaacttcaggtggtcttgctgtttgggaagatggatatagtagatggttatattatagagaatttgctccctatatgaggcaaggggcacttaattcttatatagatgcttggaagtacggcttccgagcaggg

SEQ ID NO: 702 - protein, 61 aa, Streptococcus pneumoniae
  hypothetical protein; Cellular location: cytoplasm; Similar to strain R6 sequence 15902432 (2.E-32)
MTGTNTFTVLSTEDLEQTSGGLAVWEDGYSRWLYYREFAPYMRQGALNSYIDAWKYGFRAG

SEQ ID NO: 703 - DNA, 516 bp, Streptococcus pneumoniae
ttggaagtacggcttccgagcagggtaatctttcaaaaaagtacgatgagaaacacaaaaaaactaagacaatttggaatatttttgcttattattttactatctacctatttaccacaaacaattggattgtatgtgacgatcattttagggttaggagctgatgtctattctcttattttaacaatgggattagtgggaagtttccttctattaatttggaggttaaaaaagaaaaagatgctctttatctttgagaaaaagagctggaactggtcatttgtcttctacttatttgcaacttatgtggtttatcagattctcggtaatttttgggcacgctatgctcatttgattaatcataggaatattcatgatgagtattttaccgtgcttttttcaaatggacaaccaacctttttatcgactatcttatcttttgtcctgcctgtaatcatcggtcctgtttttgaggagactcttgatagagggtattttatgaataccttctttccc

SEQ ID NO: 704 - protein, 172 aa, Streptococcus pneumoniae
  hypothetical protein; Cellular location: membrane; Similar to strain R6 sequence 15902433 (1.E-36)
MEVRLPSRVIFQKSTMRNTKKLRQFGIFLLIILLSTYLPQTIGLYVTIILGLGADVYSLILTMGLVGSFLLLIWRLKKKKMLFIFEKKSWNWSFVFYLFATYVVYQILGNFWARYAHLINHRNIHDEYFTVLFSNGQPTFLSTILSFVLPVIIGPVFEETLDRGYFMNTFFP

SEQ ID NO: 705 - DNA, 234 bp, Streptococcus pneumoniae
ttggatgttatcctatctgctatcatctttgggattagccatttgatactatctcacagagatccaattagtttattatattatagtctgattggtttcttttttgcccttgtttatcgttctaccgacaatctgagattaacgattctctgccatagtttttttaactttctcaatcatgcaaaacctatctggatttttgtttacaattatatctattatcatttttttaga

SEQ ID NO: 706 - protein, 78 aa, Streptococcus pneumoniae
  conserved domain protein; Cellular location: outside; Similar to strain R6 sequence 15902870 (1.E-06)
MDVILSAIIFGISHLILSHRDPISLLYYSLIGFFFALVYRSTDNLRLTILCHSFFNFLNHAKPIWIFVYNYIYYHFFR

SEQ ID NO: 707 - DNA, 99 bp, Streptococcus pneumoniae
gtgtttgatatctatcaaacactttttctttttattgttggctctataatatttgtagtgggtaaatcccctatagatattatggagcctattttattg

SEQ ID NO: 708 - protein, 33 aa, Streptococcus pneumoniae
  hypothetical protein, fusion
MFDIYQTLFLFIVGSIIFVVGKSPIDIMEPILL

SEQ ID NO: 709 - DNA, 1304 bp, Streptococcus pneumoniae
atggaacaattacattttatcacaaaattactagacattaaagaccctaatatccagattttagacatcatcaataaggatacacacaaggaaatcatcgccaaactggactacgacgccccatcttgccctgagtgcggaaaccaattgaagaaatatgactttcaaaaaccttctaaaattccttatcttgaaacgactggtatgcctactagaattctccttagaaagcgtcgattcaagtgctatcactgttcaaaaatgatggtcgctgaaacttctatcgtcaagaaaaatcaccaaatccctcgtatcatcaaccaaaagattgctcaaaagttgattgaaaagatttctatgactgatattgcccatcagctttccatctcaacttcaactgttattcgtaagctcaatgattttcactttaaacatgatttttcttgtcttcctgagattatgtcttgggatgagtatgcttttacaaagggaaagatgagcttcattgcgcaagattttaacaatctcaatatcatcactgttcttgagggtagaacacaagctatcattcgaaatcactttcttcgctacgatagagttgtccgatgtcgcgtcaaaattattactatggatatgtttagcccttactatgacttggctaaacagcttcgctttcaaattcctaggctcaggctgaaacagtctcccagactgtttcactcccgaatgctaaaatcgttcttgatcgctttcacattgtacaacatcttagccgtgccatgagtcgtgtgcgtgtccaaatcatgaatcagtttcatcgaaaatcccatgaatacaaggatatcaagcgctactggaaactcattcaacaggatagccgtagactgagtgataagcgattttatcgtcctacttttcgtatgcacttaaccaataaagagattttagacaagcttttgagccattcacaagacttgaaacaccactatcagctctatcagctcttgctgtttcacttccagaataaggaaccagagaaatttttcggacttattgaggacaatcttaagcaggctcatcctatttttcagactgtctttaaaaccttcctcaaagataaagaaaagattgtcaacgcccttcaactacactattctaatgccaaactggaagcgaccaataatctcatcaaacttatcaagcgcaatgcctttggttttcgaaactttgaaaacttcaaaaaacggatttttatcgctttgaacatcaaaaaagaaaggacgaaatttgtcctttctcgagct

SEQ ID NO: 710 - protein, 260 aa, Streptococcus pneumoniae
  IS1167, transposase FRAMESHIFT
MEQLHFITKLLDIKDPNIQILDIINKDTHKEIIAKLDYDAPSCPECGNQLKKYDFQKPSKIPYLETTGMPTRILLRKRRFKCYHCSKMMVAETSIVKKNHQIPRIINQKIAQKLIEKISMTDIAHQLSISTSTVIRKLNDFHFKHDFSCLPEIMSWDEYAFTKGKMSFIAQDFNNLNIITVLEGRTQAIIRNHFLRYDRVVRCRVKIITMDMFSPYYDLAKQLRFQIPRLRLKQSPRLFHSRMLKSFLIAFTLYNILAVP

SEQ ID NO: 711 - DNA, 525 bp, Streptococcus pneumoniae
atgagtcgtgtgcgtgtccaaatcatgaatcagtttcatcgaaaatcccatgaatacaaggatatcaagcgctactggaaactcattcaacaggatagccgtagactgagtgataagcgattttatcgtcctacttttcgtatgcacttaaccaataaagagattttagacaagcttttgagccattcacaagacttgaaacaccactatcagctctatcagctcttgctgtttcacttccagaataaggaaccagagaaatttttcggacttattgaggacaatcttaagcaggctcatcctatttttcagactgtctttaaaaccttcctcaaagataaagaaaagattgtcaacgcccttcaactacactattctaatgccaaactggaagcgaccaataatctcatcaaacttatcaagcgcaatgcctttggttttcgaaactttgaaaacttcaaaaaacggatttttatcgctttgaacatcaaaaaagaaaggacgaaatttgtcctttctcgagct

SEQ ID NO: 712 - protein, 175 aa, Streptococcus pneumoniae
  transposase
MSRVRVQIMNQFHRKSHEYKDIKRYWKLIQQDSRRLSDKRFYRPTFRMHLTNKEILDKLLSHSQDLKHHYQLYQLLLFHFQNKEPEKFFGLIEDNLKQAHPIFQTVFKTFLKDKEKIVNALQLHYSNAKLEATNNLIKLIKRNAFGFRNFENFKKRIFIALNIKKERTKFVLSRA

SEQ ID NO: 713 - DNA, 420 bp, Streptococcus pneumoniae
atgactagtccactattagaatctagacgccaactccgtaaatgcgcttttcaagctctcatgagccttgagttcggtacggatgtcgaaactgcttgtcgtttcgcctatactcatgatcgtgaagatacggatgtacaacttccagcctttttgatagacctcgtttctggtgttcaagctaaaaaggaagaactagataagcaaatcactcagcatttaaaagcaggttggaccattgaacgcttaacgctcgtggagagaaacctccttcgcttgggagtctttgaaatcacttcatttgacactcctcagctggttgctgttaatgaagctatcgagcttgcaaaggacttctccgatcaaaaatctgcccgttttatcaatggactgctcagccagtttgtaacagaagaacaa

SEQ ID NO: 714 - protein, 140 aa, Streptococcus pneumoniae
  N utilization substance protein B (nusB); Cellular location: cytoplasm; Similar to strain R6 sequence 15902434 (1.E-75)
MTSPLLESRRQLRKCAFQALMSLEFGTDVETACRFAYTHDREDTDVQLPAFLIDLVSGVQAKKEELDKQITQHLKAGWTIERLTLVERNLLRLGVFEITSFDTPQLVAVNEAIELAKDFSDQKSARFINGLLSQFVTEEQ

SEQ ID NO: 715 - DNA, 387 bp, Streptococcus pneumoniae
atgggaattgaagaacaacttggcgaaatcgttatcgccccacgtgtacttgaaaaaatcattgctatcgctactgcaaaggtagagggtgttcactctttttcaaacagatcagtgtctgataccctttcaaaactttcactcggccgtggcatttatcttaaaaacgtggacgaagaactcacagcagatatctatctctaccttgagtacggagtaaaagttcctaaggtagcggttgctatccagaaagctgtcaaagatgccgtccgtaatatggctgatgtagaactcgctgctatcaatattcacgttgcaggtatcgtcccagataaaacaccaaaaccagaattgaaagatctatttgacgaggacttcctcaatgac

SEQ ID NO: 716 - protein, 129 aa, Streptococcus pneumoniae
  conserved hypothetical protein; Cellular location: membrane; Similar to strain R6 sequence 15902435 (4.E-68)
MGIEEQLGEIVIAPRVLEKIIAIATAKVEGVHSFSNRSVSDTLSKLSLGRGIYLKNVDEELTADIYLYLEYGVKVPKVAVAIQKAVKDAVRNMADVELAAINIHVAGIVPDKTPKPELKDLFDEDFLND

SEQ ID NO: 717 - DNA, 558 bp, Streptococcus pneumoniae
atgattgaagcaagtaaattaaaagctggtatgacctttgaaacagctgacggcaaattgattcgcgttttggaagctagtcaccacaaaccaggtaaaggaaacacgatcatgcgtatgaaattgcgtgatgtccgtactggttctacatttgacacaagctaccgtccagaggaaaaatttgaacaagctattatcgagactgtcccagctcaatacttgtacaaaatggatgacacagcatacttcatgaatacagaaacttatgaccaatacgaaatccctgtagtcaatgttgaaaacgaattgctttacatccttgaaaactctgatgtgaaaatccaattctacggaactgaagtgatcggtgtcaccgttcctactactgttgagttgacagttgctgaaactcaaccatctatcaaaggtgctactgttacaggttctggtaaaccagcaacgatggaaactggacttgtcgtaaacgttccagacttcatcgaagcaggacaaaaactcgttatcaacactgcagaaggaacttacgtttctcgtgcc

SEQ ID NO: 718 - protein, 186 aa, Streptococcus pneumoniae
  translation elongation factor P (efp); Cellular location: cytoplasm; Similar to strain R6 sequence 15902436 (e-103)
MIEASKLKAGMTFETADGKLIRVLEASHHKPGKGNTIMRMKLRDVRTGSTFDTSYRPEEKFEQAIIETVPAQYLYKMDDTAYFMNTETYDQYEIPVVNVENELLYILENSDVKIQFYGTEVIGVTVPTTVELTVAETQPSIKGATVTGSGKPATMETGLVVNVPDFIEAGQKLVINTAEGTYVSRA

SEQ ID NO: 719 - DNA, 1440 bp, Streptococcus pneumoniae
atgaactttgaaacagtcatcggacttgaagtccacgtagagctcaacaccaattcaaaaatcttctcacctacttctgcccactttggaaatgaccaaaatgccaacactaacgtgattgactggtctttcccaggagttctaccagttctcaataaaggggttgttgatgccggtatcaaggctgctcttgccctcaacatggacatccacaaaaagatgcactttgaccgcaagaactacttctatcctgataaccccaaagcctaccaaatttctcagtttgatgaaccaatcggatataatggctggattgaagtcaaactagaagacggtacgaccaagaaaatcggtatcgaacgtgcccacctagaggaagacgctggtaaaaacacccatggtacagatggctactcttatgttgacctcaaccgccaaggggttcccttgattgagattgtatctgaggcagatatgcgttctcctgaagaagcctatgcttatctgacagccctcaaggaagttatccagtacgctggcatttctgacgttaagatggaggaaggttcgatgcgtgtggatgccaacatctcccttcgtccttatggtcaagagaaattcggtaccaagactgaattgaagaacctcaactccttctcaaacgttcgtaaaggtcttgaatacgaagtccaacgccaggctgaaattcttcgctcaggtggtcaaatccgccaagaaacacgccgttacgatgaagcgaataaagcaaccatcctcatgcgtgtcaaggaaggggctgctgactaccgctacttcccagaaccagacctacccctctttgaaatttctgacgagtggattgaggaaatgcggactgagttgccagagtttccaaaagaacgtcgtgcgcgttatgtatctgaccttggtttatcagactacgatgctagtcagttgactgctaataaagtcacttctgacttctttgaaaaagctgttgccctaggtggtgatgccaaacaagtctctaactggctccaaggggaagtcgctcagttcttgaatgctgaaggtaaaacactggaacaaatcgaattgacaccagaaaacttggttgaaatgattgccatcatcgaagacggtactatttcatctaagattgccaagaaagtctttgtccatctagctaaaaatggcggtggcgcgcgtgaatacgtggaaaaagcaggtatggttcaaatttcagatccagctatcttgatcccaatcatccaccaagtctttgccgataacgaagctgctgttgccgacttcaagtcaggcaaacgtaacgccgacaaggcctttacaggattccttatgaaggcaaccaaaggccaagccaacccacaagttgcccttaaactacttgcacaggaattggcgaagttgaaagaaaac

SEQ ID NO: 720 - protein, 480 aa, Streptococcus pneumoniae
  glutamyl-tRNA(Gln) amidotransferase subunit B (gatB); Cellular location: cytoplasm; Similar to strain R6 sequence 15902437 (0.E+01)
MNFETVIGLEVHVELNTNSKIFSPTSAHFGNDQNANTNVIDWSFPGVLPVLNKGVVDAGIKAALALNMDIHKKMHFDRKNYFYPDNPKAYQISQFDEPIGYNGWIEVKLEDGTTKKIGIERAHLEEDAGKNTHGTDGYSYVDLNRQGVPLIEIVSEADMRSPEEAYAYLTALKEVIQYAGISDVKMEEGSMRVDANISLRPYGQEKFGTKTELKNLNSFSNVRKGLEYEVQRQAEILRSGGQIRQETRRYDEANKATILMRVKEGAADYRYFPEPDLPLFEISDEWIEEMRTELPEFPKERRARYVSDLGLSDYDASQLTANKVTSDFFEKAVALGGDAKQVSNWLQGEVAQFLNAEGKTLEQIELTPENLVEMIAIIEDGTISSKIAKKVFVHLAKNGGGAREYVEKAGMVQISDPAILIPIIHQVFADNEAAVADFKSGKRNADKAFTGFLMKATKGQANPQVALKLLAQELAKLKEN

SEQ ID NO: 721 - DNA, 1464 bp, Streptococcus pneumoniae
atgacttttaacaataaaactattgaagagttgcacaatctccttgtctctaaggaaatttctgcaacagaattgacccaagcaacacttgaaaatatcaagtctcgtgaggaagccctcaattcatttgtcaccatcgctgaggagcaagctcttgttcaagctaaagccattgatgaagctggaattgatgctgacaatgtcctttcaggaattccacttgctgttaaggataacatctctacagacggtattctcacaactgctgcctcaaaaatgctctacaactatgagccaatctttgatgcgacagctgttgccaatgcaaaaaccaagggcatgattgtcgttggaaagaccaacatggacgaatttgctatgggtggttcaggtgaaacttcacactacggagcaactaaaaacgcttggaaccacagcaaggttcctggtgggtcatcaagtggttctgccgcagctgtagcctcaggacaagttcgcttgtcacttggttctgatactggtggttccatccgccaacctgctgccttcaacggaatcgttggtctcaaaccaacctacggaacagtttcacgtttcggtctcattgcctttggtagctcattagaccagattggaccttttgctcctactgttaaggaaaatgccctcttgctcaacgctattgccagcgaagatgctaaagactctacttctgctcctgtccgcatcgccgactttacttcaaaaatcggccaagacatcaagggtatgaaaatcgctttgcctaaggaatacctaggcgaaggaattgatccagaggttaaggaaacaatcttaaacgcggccaaacactttgaaaaattgggtgctatcgtcgaagaagtcagccttcctcactctaaatacggtgttgccgtttattacatcatcgcttcatcagaagcttcatcaaacttgcaacgcttcgacggtatccgttacggctatcgcgcagaagatgcaaccaaccttgatgaaatctatgtaaacagccgaagccaaggttttggtgaagaggtaaaacgtcgtatcatgctgggtactttcagtctttcatcaggttactatgatgcctactacaaaaaggctggtcaagtccgtaccctcatcattcaagatttcgaaaaagtcttcgcggattacgatttgattttgggtccaactgctccaagtgttgcctatgacttggattctctcaaccatgacccagttgccatgtacttagccgacctattgaccatacctgtaaacttggcaggactgcctggaatttcgattcctgctggattctctcaaggtctacctgtcggactccaattgattggtcccaagtactctgaggaaaccatttaccaagctgctgctgcttttgaagcaacaacagactaccacaaacaacaacccgtgatttttggaggtgacaac

SEQ ID NO: 722 - protein, 488 aa, Streptococcus pneumoniae
  glutamyl-tRNA(Gln) amidotransferase subunit A (gatA); Cellular location: cytoplasm; Similar to strain R6 sequence 15902438 (0.E+01)
MTFNNKTIEELHNLLVSKEISATELTQATLENIKSREEALNSFVTIAEEQALVQAKAIDEAGIDADNVLSGIPLAVKDNISTDGILTTAASKMLYNYEPIFDATAVANAKTKGMIVVGKTNMDEFAMGGSGETSHYGATKNAWNHSKVPGGSSSGSAAAVASGQVRLSLGSDTGGSIRQPAAFNGIVGLKPTYGTVSRFGLIAFGSSLDQIGPFAPTVKENALLLNAIASEDAKDSTSAPVRIADFTSKIGQDIKGMKIALPKEYLGEGIDPEVKETILNAAKHFEKLGAIVEEVSLPHSKYGVAVYYIIASSEASSNLQRFDGIRYGYRAEDATNLDEIYVNSRSQGFGEEVKRRIMLGTFSLSSGYYDAYYKKAGQVRTLIIQDFEKVFADYDLILGPTAPSVAYDLDSLNHDPVAMYLADLLTIPVNLAGLPGISIPAGFSQGLPVGLQLIGPKYSEETIYQAAAAFEATTDYHKQQPVIFGGDN

SEQ ID NO: 723 - DNA, 300 bp, Streptococcus pneumoniae
atgaaaattacgcaagaagaggtaacacacgttgccaatctttcaaaattaagattctctgaagaagaaactgctgcctttgcgaccaccttgtctaagattgttgacatggttgaattgctgggcgaagttgacacaactggtgtcgcacctactacgactatggctgaccgcaagactgtactccgccctgatgtggccgaagaaggaatagaccgtgatcgcttgtttaaaaacgtacctgaaaaagacaactactatatcaaggtgccagctatcctagacaatggaggagatgcc

SEQ ID NO: 724 - protein, 100 aa, Streptococcus pneumoniae
  glutamyl-tRNA(Gln) amidotransferase subunit C (gatC); Cellular location: cytoplasm; Similar to strain R6 sequence 15902439 (4.E-51)
MKITQEEVTHVANLSKLRFSEEETAAFATTLSKIVDMVELLGEVDTTGVAPTTTMADRKTVLRPDVAEEGIDRDRLFKNVPEKDNYYIKVPAILDNGGDA

SEQ ID NO: 725 - DNA, 1542 bp, Streptococcus pneumoniae
atgaatattcaagaagaaattaagaaacgtcgtacctttgccattatctcccacccggacgcggggaaaacaaccatcactgagcagttactctactttgggggtgagattcgtgaggctggtacggtaaaagggaagaaaacagggacttttgctaaatctgactggatggatatcgagaagcaacgtgggatttctgttacttcatctgttatgcaatttgactacgacggcaagcgcgtgaatatcttagacacgccagggcacgaggacttctcagaagatacctatcgtaccttgatggcggtggatgctgcggtcatggtcgtggactctgccaaggggatcgaggctcaaaccaagaaattgtttgaggttgtgaaacatcgtggcattccagtctttacctttatgaacaagctggaccgtgacggtcgtgagcctttggatctcttgcaagaattggaagaaatcttgggcattgctagctaccctatgaactggcctatcgggatggggaaagcctttgagggcttgtatgacctctataaccaacgtttagagctttacaaaggggatgagcgttttgccagtctagaagacggggacaaactctttggtagcaatcctttctacgagcaagtcaaggatgacattgagcttttaaatgaagccgggaatgagttttcagaggaagctattctggctggagaattgacgcctgtctttttcggttcagccctgacaaactttggtgtgcagaccttccttgaaaccttcctcaagtttgctccagaaccacatggtcacaagaaaacagacggtgaaattgtggatccttatgacaaggatttctcaggctttgtctttaaaatccaagccaacatggaccctcgtcaccgtgaccgtattgcctttgtccgtatcgtatctggcgaatttgagcgcggcatgagtgtcaatctccctcgtactggtaagggggctaaactatctaatgttacccagtttatggcggagagtcgtgagaatgtgaccaatgccgtggcaggtgatattatcggggtttacgataccggtacttatcaggttggggataccttgacggttggaaaaaacaagtttgaatttgaacccctgccaacctttacacctgagattttcatgaaagtttctgctaagaatgttatgaagcaaaaatccttccacaaggggattgagcaattggtgcaagaaggagccgttcagctttataagaattaccaaacaggtgagtacatgctaggcgctgtaggtcaactccagtttgaagtctttaaacaccgcatggaaggcgagtacaatgcggaagtagttatgaacccaatgggtaaaaagaccgttcgttggatcaagcctgaggacttggatgaacggatgtcgtcaagtcgcaatatcttagccaaagaccgttttgaccaaccagtctttctctttgaaaatgactttgccctccgctggtttgcggacaagtatccagacgtagagttagaggagaagatg

SEQ ID NO: 726 - protein, 514 aa, Streptococcus pneumoniae
  peptide chain release factor 3 (prfC); Cellular location: cytoplasm; Similar to strain R6 sequence 15902440 (0.E+01)
MNIQEEIKKRRTFAIISHPDAGKTTITEQLLYFGGEIREAGTVKGKKTGTFAKSDWMDIEKQRGISVTSSVMQFDYDGKRVNILDTPGHEDFSEDTYRTLMAVDAAVMVVDSAKGIEAQTKKLFEVVKHRGIPVFTFMNKLDRDGREPLDLLQELEEILGIASYPMNWPIGMGKAFEGLYDLYNQRLELYKGDERFASLEDGDKLFGSNPFYEQVKDDIELLNEAGNEFSEEAILAGELTPVFFGSALTNFGVQTFLETFLKFAPEPHGHKKTDGEIVDPYDKDFSGFVFKIQANMDPRHRDRIAFVRIVSGEFERGMSVNLPRTGKGAKLSNVTQFMAESRENVTNAVAGDIIGVYDTGTYQVGDTLTVGKNKFEFEPLPTFTPEIFMKVSAKNVMKQKSFHKGIEQLVQEGAVQLYKNYQTGEYMLGAVGQLQFEVFKHRMEGEYNAEVVMNPMGKKTVRWIKPEDLDERMSSSRNILAKDRFDQPVFLFENDFALRWFADKYPDVELEEKM

SEQ ID NO: 727 - DNA, 195 bp, Streptococcus pneumoniae
gtgaaagaagagaaaaaagcgattgtcttaggtgcagataatgcttatatggataaagttgaaacaacaataaaatctctttgtgttcatcattataatcttaagttttatgtttttaatgatgaccttccgcgagaatggttccaattgatggaaaaaagactagagactttgaatagtgagattgtgaatgtt

SEQ ID NO: 728 - protein, 65 aa, Streptococcus pneumoniae
  conserved hypothetical protein, POINT MUTATION, FRAMESHIFT
MKEEKKAIVLGADNAYMDKVETTIKSLCVHHYNLKFYVFNDDLPREWFQLMEKRLETLNSEIVNV

SEQ ID NO: 729 - DNA, 126 bp, Streptococcus pneumoniae
ttggacttgacggctatacccttagctgcagttagagatgatttttatacacataattttaattctggtgttctgttaatcaacgatggcatgtggagagcagaaaatgtcacgcaagacctgatt

SEQ ID NO: 730 - protein, 42 aa, Streptococcus pneumoniae
  hypothetical protein
MDLTAIPLAAVRDDFYTHNFNSGVLLINDGMWRAENVTQDLI

SEQ ID NO: 731 - DNA, 186 bp, Streptococcus pneumoniae
atggctaaagtatgttactttacaggtcgtaagactgtatcaggaaacaaccgttcacacgcgatgaaccaaacaaaacgtgccgtaaaaccaaaccttcaaaaagttactgttcttatcgatggtaaacctaaaaaagtttgggcttcagctcgtgctttgaaatcaggtaaagttgaacgcgtt

SEQ ID NO: 732 - protein, 62 aa, Streptococcus pneumoniae
  ribosomal protein L28 (rpmB); Cellular location: cytoplasm; Similar to strain R6 sequence 15902442 (9.E-32)
MAKVCYFTGRKTVSGNNRSHAMNQTKRAVKPNLQKVTVLIDGKPKKVWASARALKSGKVERV

SEQ ID NO: 733 - DNA, 363 bp, Streptococcus pneumoniae
atgactgtaaaaattaatacaaaagatggtcaaatcgaactaacagatgaagtgattgcaaccgtcgtaggtggagcagcaactgagatttttggtgtggtcggtatggctagtaaaaatgccctcaaagataatttccaagccctgctaggtaaggaaaattattctaaaggtgtcgtcgtaaaggcagccgaagatggcagtattgcagttgatgtatataccgtgttaagctacggaacaaagattagtgaagtgtcaaaaaacattcaagagcgtgttgcctttagcttggaaaaccagcttggaattactgctcagactgtaaatgtctacattcaaaatatcaaagttgtaggagaa

SEQ ID NO: 734 - protein, 121 aa, Streptococcus pneumoniae
  conserved hypothetical protein (Alkaline shock protein); Cellular location: membrane; Similar to strain R6 sequence 15902443 (9.E-62)
MTVKINTKDGQIELTDEVIATVVGGAATEIFGVVGMASKNALKDNFQALLGKENYSKGVVVKAAEDGSIAVDVYTVLSYGTKISEVSKNIQERVAFSLENQLGITAQTVNVYIQNIKVVGE

SEQ ID NO: 735 - DNA, 1665 bp, Streptococcus pneumoniae
gtgtcaaaaattactactagcttatttcaagaaatggtgcaggctgcatcaactcgcttgaataagcaagctgaatatgtcaattcattaaacgtctttccagttccagatggagatactgggacaaatatgggaatgaccattgaaaatggtgctaaagaagttgcagacaagccagcttctacagttggagaagtagcgagcattcttgccaaagggcttttgatgggtgcgcgtgggaactcaggagtgattacgtctcagcttttccgtggattttcccaagctatcaaggataaagacgagttaacaggtcaagacttggctctggccttccaatcaggtgtggaagttgcctataaggcagtgatgaaacctgttgaaggaacgattttaacagtttctcgtggagctgctatcggtgctaagaaaaaagctgagcaaacagatgacgctgttgaagtcatgcgcgcagccttggaaggtgctaaaacagctctagctaaaacaccagacatgcttccagtattgaaagaagttggcgttgtggactcaggtggtcaaggattggtcttcatctacgaaggtttcctttcagcccttactggcgaatatattgcatctgaggactttgtagcgactcctgccaacatgagtgagatgatcaatgtagagcatcataagtctgtagctggtcacgtagcgactgaggacatcacgtttggttactgtactgaaatcatggtagctcttaagcaaggtccaacctatgctaaagattttgactacgatgaattccgtaactacttggatgagcttggagattctctccttgttgttaacgatgatgaaattgtcaaagtccatgttcatacagaagatccaggacttgttatgcaagaaggtctcaaatatggtagcttggtcaaggtaaaagttgacaatatgcgtaaccaacacgaagcacaggttgagaaagaagctactcaagttatcaagtcggctgaagaaaaagagtatgctttgattgctgtggtggctggtaaaggtctagcagatatcttctgttctcaaggcgtggattatgttatcgaaggcggtcaaaccatgaacccttcaacagaagactttatcaaggctgttgaacaggttaatgcccgtaacatcatcttcttgccaaacaacaagaacatcttcatggcagctcaatctgcggcagaagttttggagcaaccagcggtagtggtagaggctcgcactcttcctcaaggtatgacaagtcttcttgcctttgatccaagcaagtccattgaagaaaaccaagagcgtatgacagctgctcttagcgatgtcgttagcggaagcgtcacaacagccgtgcgtgatacaacgatcgatggcttagaaatccatgaaaacgataatttaggtatggtggatggaaaaattcttgtgtcaaaccctgatatgcaccaaacattgactgaaaccttgaaacatatgttggatgaagacagtgaaatcgtaaccttctatgtaggtgaagacggaagcgaagaacttgccaatgaaatcgctcaagaaatcgtagaagaattcgaagacgttgaagtcgagattcaccaaggtcaacaacctgtttacccatacctatttagtgtggaa

SEQ ID NO: 736 - protein, 555 aa, Streptococcus pneumoniae
  conserved hypothetical protein; Cellular location: membrane; Similar to strain R6 sequence 15902444 (0.E+01)
MSKITTSLFQEMVQAASTRLNKQAEYVNSLNVFPVPDGDTGTNMGMTIENGAKEVADKPASTVGEVASILAKGLLMGARGNSGVITSQLFRGFSQAIKDKDELTGQDLALAFQSGVEVAYKAVMKPVEGTILTVSRGAAIGAKKKAEQTDDAVEVMRAALEGAKTALAKTPDMLPVLKEVGVVDSGGQGLVFIYEGFLSALTGEYIASEDFVATPANMSEMINVEHHKSVAGHVATEDITFGYCTEIMVALKQGPTYAKDFDYDEFRNYLDELGDSLLVVNDDEIVKVHVHTEDPGLVMQEGLKYGSLVKVKVDNMRNQHEAQVEKEATQVIKSAEEKEYALIAVVAGKGLADIFCSQGVDYVIEGGQTMNPSTEDFIKAVEQVNARNIIFLPNNKNIFMAAQSAAEVLEQPAVVVEARTLPQGMTSLLAFDPSKSIEENQERMTAALSDVVSGSVTTAVRDTTIDGLEIHENDNLGMVDGKILVSNPDMHQTLTETLKHMLDEDSEIVTFYVGEDGSEELANEIAQEIVEEFEDVEVEIHQGQQPVYPYLFSVE

SEQ ID NO: 737 - DNA, 99 bp, Streptococcus pneumoniae
atgaatgttatttttgtttttattaaaaagataccgatttcatttactaaaaagaaaaaagaactgatttctcagtccttcattaatcttattccacac

SEQ ID NO: 738 - protein, 33 aa, Streptococcus pneumoniae
  hypothetical protein; Cellular location: cytoplasm
MNVIFVFIKKIPISFTKKKKELISQSFINLIPH

SEQ ID NO: 739 - DNA, 1698 bp, Streptococcus pneumoniae
atggagaaaatcagtttagaatctcctaagacggggtcggacctagttttggaaacacttcgtgatttaggagttgataccatctttggttatcctggtggtgcggttttgcctttttatgatgcgatatataattttaaaggcattcgccacattctagggcgccatgagcaaggttgtttgcatgaagctgaaggttatgccaaatcaactggaaagttgggtgttgccgtcgtcactagtggaccaggagcaacaaatgccattacagggattgcggatgccatgagcgatagcgttccccttttggtctttacaggtcaggtggcgcgagcagggattgggaaggatgcctttcaggaggcagacatcgtgggaattaccatgccaatcactaagtacaattaccaagttcgtgagacagctgatattccgcgtatcattacggaagctgtccatatcgcaactacaggccgtccagggccagttgtaattgacctaccaaaagacatatctgctttagaaacagacttcatttattcaccagaagtgaatttaccaagttatcagccgactcttgagccgaatgatatgcaaatcaagaaaatcttgaagcaattgtccaaggctaaaaagccagtcttgttagctggtggtggaattagttatgctgaggctgctacggaactaaatgaatttgcagaacgctatcaaattccagtggtaaccagtcttttgggacaaggaacgattgcaacgagtcacccactctttcttggaatgggaggcatgcacgggtcattcgcagcaaatattgctatgacggaagcggactttatgattagtattggttctcgtttcgatgaccgtttgacggggaatcctaagactttcgctaagaatgctaaggttgcccacattgatattgacccagctgagattggcaagattatcagtgcagacattcctgtagttggagatgctaagaaggccttgcaaatgttgctagcagaaccaacagttcacaacaacactgaaaagtggattgagaaagtcactaaagacaagaatcgtgttcgttcttatgataagaaagagcgtgtggttcaaccgcaagcagttattgaacgaattggtgaattgacgaatggagatgccattgtggtaacagacgttggtcaacaccaaatgtggacagctcagtattatccctaccaaaatgaacgtcagttagtgacttcaggtggtttgggaacaatgggctttggaattccagcagcaatcggtgctaaaattgctaacccagataaggaagtagtcttgtttgttggggatggtggtttccaaatgaccaaccaggagttggctattttgaatatttacaaggtgccaatcaaggtggttatgctgaacaatcattcacttggaatggttcgccagtggcaggaatccttctatgaaggcagaacatcagagtcggtctttgatacccttcctgatttccaattgatggcgcaggcttatggtattaaaaactataagtttgacaatcctgagaccttggctcaagaccttgaagtcatcactgaggatgttcctatgctaattgaggtagatatttctcgtaaggaacaggtgttaccaatggtaccggctggtaagagtaatcatgagatgttgggggtgcagttccatgcg

SEQ ID NO: 740 - protein, 566 aa, Streptococcus pneumoniae
  acetolactate synthase, large subunit (ilvB); Cellular location: cytoplasm; Similar to strain R6 sequence 15902445 (0.E+01)
MEKISLESPKTGSDLVLETLRDLGVDTIFGYPGGAVLPFYDAIYNFKGIRHILGRHEQGCLHEAEGYAKSTGKLGVAVVTSGPGATNAITGIADAMSDSVPLLVFTGQVARAGIGKDAFQEADIVGITMPITKYNYQVRETADIPRIITEAVHIATTGRPGPVVIDLPKDISALETDFIYSPEVNLPSYQPTLEPNDMQIKKILKQLSKAKKPVLLAGGGISYAEAATELNEFAERYQIPVVTSLLGQGTIATSHPLFLGMGGMHGSFAANIAMTEADFMISIGSRFDDRLTGNPKTFAKNAKVAHIDIDPAEIGKIISADIPVVGDAKKALQMLLAEPTVHNNTEKWIEKVTKDKNRVRSYDKKERVVQPQAVIERIGELTNGDAIVVTDVGQHQMWTAQYYPYQNERQLVTSGGLGTMGFGIPAAIGAKIANPDKEVVLFVGDGGFQMTNQELAILNIYKVPIKVVMLNNHSLGMVRQWQESFYEGRTSESVFDTLPDFQLMAQAYGIKNYKFDNPETLAQDLEVITEDVPMLIEVDISRKEQVLPMVPAGKSNHEMLGVQFHA

SEQ ID NO: 741 - DNA, 474 bp, Streptococcus pneumoniae
atgcgtagaatgttaacagcaaaactacaaaatcgttcaggagtcctcaatcgctttacaggtgtcctatctcgtcgtcaggttaatattgaaagcatctctgttggagcaacagaagatccgaatgtatcgcgtatcactattattattgatgttgcttctcatgatgaagtggagcaaatcatcaaacagctcaatcgtcagattgatgtgattcgcattcgagatattacagacaagcctcatttggagcgcgaggtgattttggttaagatgtcagcgccagctgagaagagagctgagattttagcgattattcaacctttccgtgcaacagtagtagacgtagcgccaagctcgattaccattcagatgacgggaaatgcagaaaagagcgaagccctattgcgagtcattcgcccatacggtattcgcaatattgctcgaacgggtgcaactggatttacccgcgat

SEQ ID NO: 742 - protein, 158 aa, Streptococcus pneumoniae
  acetolactate synthase small subunit; Cellular location: cytoplasm; Similar to strain R6 sequence 15902446 (3.E-83)
MRRMLTAKLQNRSGVLNRFTGVLSRRQVNIESISVGATEDPNVSRITIIIDVASHDEVEQIIKQLNRQIDVIRIRDITDKPHLEREVILVKMSAPAEKRAEILAIIQPFRATVVDVAPSSITIQMTGNAEKSEALLRVIRPYGIRNIARTGATGFTRD

SEQ ID NO: 743 - DNA, 1020 bp, Streptococcus pneumoniae
atgacagttcaaatggaatatgaaaaagatgttaaagtagcagcacttgacggtaaaaaaatcgccgttatcggttatggttcacaagggcatgcgcatgctcaaaacttgcgtgattcaggtcgtgacgttattatcggtgtacgtccaggtaaatcttttgataaagcaaaagaagatggatttgatacttacacagtagcagaagctactaagttggctgatgttatcatgatcttggcgccagacgaaattcaacaagaattgtacgaagcagaaatcgctccaaacttggaagctggaaacgcagttggatttgcccatggtttcaacatccactttgaatttatcaaagttcctgcggatgtagatgtcttcatgtgtgctcctaaaggaccaggacacttggtacgtcgtacttacgaagaaggatttggtgttccagctctttatgcagtataccaagatgcaacaggaaatgctaaaaacattgctatggactggtgtaaaggtgttggagcggctcgtgtaggtcttcttgaaacaacttacaaagaagaaactgaagaagatttgtttggtgaacaagctgtactttgtggtggtttgactgcccttatcgaagcaggtttcgaagtcttgacagaagcaggttacgctccagaattggcttactttgaagttcttcacgaaatgaaattgatcgttgacttgatctacgaaggtggattcaagaaaatgcgtcaatctatttcaaacactgctgaatacggtgactatgtatcaggtccacgtgtaatcactgaacaagttaaagaaaatatgaaggctgtcttggcagacatccaaaatggtaaatttgcaaatgactttgtaaatgactataaagctggacgtccaaaattgactgcttaccgtgaacaagcagctaaccttgaaattgaaaaagttggtgcagaattgcgtaaagcaatgccattcgttggtaaaaacgacgatgatgcattcaaaatctataac

SEQ ID NO: 744 - protein, 340 aa, Streptococcus pneumoniae
  ketol-acid reductoisomerase (ilvC); Cellular location: membrane; Similar to strain R6 sequence 15902447 (0.E+01)
MTVQMEYEKDVKVAALDGKKIAVIGYGSQGHAHAQNLRDSGRDVIIGVRPGKSFDKAKEDGFDTYTVAEATKLADVIMILAPDEIQQELYEAEIAPNLEAGNAVGFAHGFNIHFEFIKVPADVDVFMCAPKGPGHLVRRTYEEGFGVPALYAVYQDATGNAKNIAMDWCKGVGAARVGLLETTYKEETEEDLFGEQAVLCGGLTALIEAGFEVLTEAGYAPELAYFEVLHEMKLIVDLIYEGGFKKMRQSISNTAEYGDYVSGPRVITEQVKENMKAVLADIQNGKFANDFVNDYKAGRPKLTAYREQAANLEIEKVGAELRKAMPFVGKNDDDAFKIYN

SEQ ID NO: 745 - DNA, 264 bp, Streptococcus pneumoniae
ttgtataatgtaattacaccgtcggtaatagtgctagcagaccaaaataaagcagattggtcgtatgatgaaaatgctgtaattaacatttatgatgatgctaattttgaagatggtaggttgcatatgaactttgaacaattcttcaaattggcacaaatagctagagaagaaggtcttgaaattcattctccgtttgagagagctggtgcgactaaatctgctcgttatatagcgaaatggattttgagaaataaaaaacat

SEQ ID NO: 746 - protein, 88 aa, Streptococcus pneumoniae
  hypothetical protein; Cellular location: cytoplasm; Similar to strain R6 sequence 15902448 (3.E-47)
MYNVITPSVIVLADQNKADWSYDENAVINIYDDANFEDGRLHMNFEQFFKLAQIAREEGLEIHSPFERAGATKSARYIAKWILRNKKH

SEQ ID NO: 747 - DNA, 354 bp, Streptococcus pneumoniae
atgaatattaccaatttgttttctatcaagacaggatgtgatgaaactgataggcaactgcaaaaactattttttcagttggatttacaattgggagaattgacagatcaactaagaaaattagattctaattttgttcctcgtagtcaatttgtagacacgttggatttgaatgatgtagaatataaagaaattttaaactattttatcttccatcgtaatgatagtgaagaaagtttggtagaatggttatatgattggatttccacaaatcgttatgaacttcctaaagagttttcgattcgtatggctcataaataccatgaaagtgttactgaagttttcggagatgaa

SEQ ID NO: 748 - protein, 118 aa, Streptococcus pneumoniae
  hypothetical protein; Cellular location: cytoplasm; Similar to strain R6 sequence 15902449 (1.E-66)
MNITNLFSIKTGCDETDRQLQKLFFQLDLQLGELTDQLRKLDSNFVPRSQFVDTLDLNDVEYKEILNYFIFHRNDSEESLVEWLYDWISTNRYELPKEFSIRMAHKYHESVTEVFGDE

SEQ ID NO: 749 - DNA, 1248 bp, Streptococcus pneumoniae
atgttaagttcaaaagatataatcaaggctcacaaggtcttgaacggtgtggttgtgaatactccactggattacgatcattatttatcggagaagtatggtgctaagatttatttgaaaaaagaaaatgcccagcgtgttcgctcctttaaaattcgtggtgcctattatgccatttcccagctcagcaaggaagaacgtgaacgtggggtagtctgcgcttctgcgggaaatcatgcgcagggagtagcctatacttgtaatgaaatgaaaattcctgctactatctttatgcccattactacgccacaacaaaagattggtcaggttcgcttttttggtggggattttgtaactattaaactagttggagatacctttgatgcctcagccaaagcagctcaagaatttacagtctctgaaaatcgtacctttattgatccttttgatgatgctcatgttcaagcaggtcaaggaacagttgcttatgagattttagaagaagctcgaaaagaatcgattgattttgatgctgtcttggttcctgttggtggtggcggtctcattgccggggtttctacctatatcaaggaaacaagtccagagattgaggttatcggagtagaggcgaatggagcgcgttccatgaaagctgcctttgaggctggaggtccagtaaaactcaaggaaattgataaatttgctgatgggattgctgtgcaaaaggtaggtcagttgacctatgaagcaactcgtcaacatattaaaactttggtaggtgtcgatgagggattgatttctgaaaccttgattgacctttactctaagcaagggatagtcgcagaacctgctggagcggctagtatcgcctctttagaggttttagctgaatatattaaggggaaaaccatttgttgtatcatttctggaggaaataatgatatcaaccgtatgccagaaatggaagagcgtgccttgatttatgatggtatcaaacattactttgtggtcaatttcccacaacgtccaggagctttgcgtgagtttgtaaatgatatcctggggccaaatgatgatatcacacgttttgagtatatcaaacgagctagcaagggaacaggcccagtattaattgggatcgctttagcagataagcatgattatgcaggtttgattcgtagaatggaaggttttgatccagcttatattaacttaaatggtaatgaaacgctttataatatgcttgtc

SEQ ID NO: 750 - protein, 416 aa, Streptococcus pneumoniae
  threonine dehydratase (ilvA); Cellular location: membrane; Similar to strain R6 sequence 15902450 (0.E+01)
MLSSKDIIKAHKVLNGVVVNTPLDYDHYLSEKYGAKIYLKKENAQRVRSFKIRGAYYAISQLSKEERERGVVCASAGNHAQGVAYTCNEMKIPATIFMPITTPQQKIGQVRFFGGDFVTIKLVGDTFDASAKAAQEFTVSENRTFIDPFDDAHVQAGQGTVAYEILEEARKESIDFDAVLVPVGGGGLIAGVSTYIKETSPEIEVIGVEANGARSMKAAFEAGGPVKLKEIDKFADGIAVQKVGQLTYEATRQHIKTLVGVDEGLISETLIDLYSKQGIVAEPAGAASIASLEVLAEYIKGKTICCIISGGNNDINRMPEMEERALIYDGIKHYFVVNFPQRPGALREFVNDILGPNDDITRFEYIKRASKGTGPVLIGIALADKHDYAGLIRRMEGFDPAYINLNGNETLYNMLV

SEQ ID NO: 751 - DNA, 213 bp, Streptococcus pneumoniae
atggctaagtcaaactttgaaaaagtagaatcagttgttggctgggttcgtgataagaaaatcacaggctaccgtatctctaaagaaacgaatgcgcgtgaaatgtctatcattgctctggcgcagggtcgtgcaaaagtaaaaaatatttcatttgaaacagccctaggcctaattgatttctatgaaaaaaattatgaaaaatttgaagat

SEQ ID NO: 752 - protein, 71 aa, Streptococcus pneumoniae
  hypothetical protein; Cellular location: cytoplasm; Similar to strain R6 sequence 15902451 (3.E-36)
MAKSNFEKVESVVGWVRDKKITGYRISKETNAREMSIIALAQGRAKVKNISFETALGLIDFYEKNYEKFED

SEQ ID NO: 753 - DNA, 738 bp, Streptococcus pneumoniae
atgacacaagcaatccttgaaattaaacacctcaaaaaatcctatggacaaaacgaagtgctaaaagacatttcactcactgtccacaagggagaggtcatctctatcatcggaagctctggaagcggaaaatcgaccttcctacgctccattaacctacttgaaacaccaactgatggacaaatcctttatcatggacaaaacgtcctcgaaaaaggctatgacctcacgcaataccgtgaaaagttggggatggttttccaatcctttaacctctttgaaaatctcaatgttcttgaaaacacaatcgtcgctcagacaactgtcctaaaacgcgaacgcacagaagctgaaaagattgccaaagaaaacctggaaaaggtcggcatgggagaacgctactggcaagccaaaccaaaacaactctcaggtggtcaaaaacaacgtgtggccatcgctcgtgccctctccatgaatccggacgctattctctttgatgaaccaacatcagctctcgatccagaaatggttggagaagtcctcaaaatcatgcaggacctggctcaggaaggcttgaccatgattgtcgtaacccatgaaatggaatttgcccgtgatgtctctcaccgtgttatctttatggataagggcgtgatcgctgaagaaggtaaaccagaagacctcttcaccaatcctaaagaagaccgaacaaaagagttccttcaacgctatctcaaa

SEQ ID NO: 754 - protein, 246 aa, Streptococcus pneumoniae
  amino acid ABC transporter, ATP-binding protein; Cellular location: cytoplasm; Similar to strain R6 sequence 15902452 (e-138)
MTQAILEIKHLKKSYGQNEVLKDISLTVHKGEVISIIGSSGSGKSTFLRSINLLETPTDGQILYHGQNVLEKGYDLTQYREKLGMVFQSFNLFENLNVLENTIVAQTTVLKRERTEAEKIAKENLEKVGMGERYWQAKPKQLSGGQKQRVAIARALSMNPDAILFDEPTSALDPEMVGEVLKIMQDLAQEGLTMIVVTHEMEFARDVSHRVIFMDKGVIAEEGKPEDLFTNPKEDRTKEFLQRYLK

SEQ ID NO: 755 - DNA, 1563 bp, Streptococcus pneumoniae
atgagaaaaatatacttatctattttcacaagtctcttgctgatgctaggacttgtcaatgttgctcaagccgatgaatatttacgcatcggtatggaagcagcatatgctccctttaactggacccaggatgatgatagcaacggagctgtcaaaatcgatgggaccaatcagtatgccaacggatacgatgttcaaatcgccaagaaaatcgctaaggacttaggtaaagaacctttggttgttaaaaccaagtgggaaggtctagtccctgcccttacttctggtaagattgacatgattatcgcaggtatgagtccaactgcagaacgcaaacaagaaattgccttttcgagcagttactatactagcgaaccagttttgcttgtcaaaaaagattctgcctacgcaagtgctaaatctttggatgactttaacggtgcaaaaatcacttctcaacaaggggtctacctttataacttgattgcacaaatcccaggtgctaaaaaagaaacagccatgggagacttcgctcaaatgcgacaagctcttgaggctggtgtcattgatgcttatgtttctgaacgtccagaagcactgactgctgaagctgcgaactctaagttcaagatgattcaagtagaacctggtttcaaaactggggaagaagatacagctatcgctatcgggcttcgtaaaaatgacaatcgtattagccaaatcaatgccagcattgaaaccatttcaaaagatgaccaagttgccttgatggatcgtatgatcaaggaacaacctgccgaagctacaacaactgaagagactagcagtagtttctttagccaagttgctaaaattctttctgaaaactggcaacaactcttgcgtggtgctggtatcactcttttaatctctatcgtcggaaccatcataggtctcattattggacttgccattggtgtcttccgtactgctcctctctctgaaaacaaagtcatttacggcctacaaaaactagtcggctgggttctcaatgtctacattgaaattttccgtggtacgccaatgattgttcaatcgatggttatctactatggaactgcccaagctttcgggatcaaccttgaccgtacactggctgctatcttcatcgtttcaatcaataccggtgcctacatgactgaaatcgtccgtggtggtatcctagcagttgacaagggacaatttgaagctgcgactgctcttggtatgacccataaccagaccatgcgtaagattgtcctacctcaggtagtccgtaacatcctacctgcaactggtaatgaatttgtcatcaatatcaaagatacatctgtattgaacgttatctctgttgtcgaactttatttctcaggaaataccgtggcaacacaaacctatcaatacttccagacatttacaatcatcgccgtgatttactttgtcctcaccttcaccgtaacacgtatcctacgctttatcgagcgcagaatggacatggatacctacactacaggtgctaaccaaatgcaaacggaggatttgaaa

SEQ ID NO: 756 - protein, 521 aa, Streptococcus pneumoniae
  amino acid ABC transporter, amino acid-binding protein/permease protein; Cellular location: membrane; Similar to strain R6 sequence 15902453 (e-172)
MRKIYLSIFTSLLLMLGLVNVAQADEYLRIGMEAAYAPFNWTQDDDSNGAVKIDGTNQYANGYDVQIAKKIAKDLGKEPLVVKTKWEGLVPALTSGKIDMIIAGMSPTAERKQEIAFSSSYYTSEPVLLVKKDSAYASAKSLDDFNGAKITSQQGVYLYNLIAQIPGAKKETAMGDFAQMRQALEAGVIDAYVSERPEALTAEAANSKFKMIQVEPGFKTGEEDTAIAIGLRKNDNRISQINASIETISKDDQVALMDRMIKEQPAEATTTEETSSSFFSQVAKILSENWQQLLRGAGITLLISIVGTIIGLIIGLAIGVFRTAPLSENKVIYGLQKLVGWVLNVYIEIFRGTPMIVQSMVIYYGTAQAFGINLDRTLAAIFIVSINTGAYMTEIVRGGILAVDKGQFEAATALGMTHNQTMRKIVLPQVVRNILPATGNEFVINIKDTSVLNVISVVELYFSGNTVATQTYQYFQTFTIIAVIYFVLTFTVTRILRFIERRMDMDTYTTGANQMQTEDLK

SEQ ID NO: 757 - DNA, 1890 bp, Streptococcus pneumoniae
ttgatgaaaaaaacttttttcttactggtgttaggcttgttttgccttcttccactctctgtttttgccattgatttcaagataaactcttatcaaggggatttgtatattcatgcagacaatacggcagagtttagacagaagatagtttaccagtttgaggaggactttaagggccaaatcgtgggacttggacgtgctggtaagatgcctagcgggtttgacattgaccctcatccaaagattcaggccgcgaaaaacggtgcagaactagcagatgtgactagcgaagtaacagaagaagcggatggttatactgtgagagtctataatccaggtcaggagggcgacatagttgaagttgacctcgtctggaacttaaaaaatttacttttcctttatgatgatatcgctgaattaaattggcaacctctgacagatagttcagagtctattgaaaagtttgaatttcatgtaaggggagacaagggggctgaaaaactctttttccatacagggaaactttttagagagggaacgattgaaaagagtaaccttgattatactatccgtttagacaatcttccggctaagcgtggagttgagttgcatgcctattggcctcggaccgattttgctagcgctagggatcagggattgaaagggaatcgtttagaagagtttaataagatagaagactcgattgttagagaaaaagatcagagtaaacaactcgttacttgggtcctcccttcgatcctttccatctccttgttattgagtgtctgcttctattttatttatagaagaaagaccactccttcagtcaaatatgccaaaaatcatcgtctctatgaaccaccaatggaattagagcctatggttttatcagaagcagtctactcgacctccttggaggaagtgagtcccttggtcaagggagctggaaaattcacctttgatcaacttattcaagctaccttgctagatgtgatagaccgtgggaatgtctctatcatttcagaaggagatgcagttggtttgaggctagtaaaagaagatggtttgtcaagctttgagaaagactgcctaaatctagctttttcaggtaaaaaagaagaaactctttccaatttgtttgcggattacaaggtatctgatagtctttatcgtagagccaaagtttctgatgaaaaacggattcaagcaagagggcttcaactcaaatcttcttttgaagaggtattgaaccagatgcaagaaggagtgagaaaacgagtttccttctgggggctcccagattattatcgtcctttaactggtggggaaaaggccttgcaagtgggtatgggtgccttgactatcctgcccctatttatcggatttggtttgttcttgtacagtttagacgttcatggctatctttacctccctttgccaatacttggttttctagggttagttttgtctgttttctattattggaagcttcgactagataatcgtgatggtgttctaaatgaagcgggagctgaggtctactatctctggaccagttttgaaaatatgttgcgtgagattgcacgattggatcaggctgaactggaaagtattgtggtctggaatcgcctcttggtctatgcgaccttatttggctatgcggacaaggttagtcatttgatgaaggttcatcagattcaagtggaaaatccagatatcaatctctatgtagcttatggctggcacagtacgttttatcattcaacagcacaaatgagccattatgctagtgtcgcaaatacagcaagcacctactctgtatcttctggaagtggaagttctggtggtggcttctctggaggcggaggtggcggcagtatcggtgccttt

SEQ ID NO: 758 - protein, 630 aa, Streptococcus pneumoniae
  hypothetical protein; Cellular location: membrane; Feature of note: RGD motif; Similar to strain R6 sequence 15902454 (0.E+01)
MMKKTFFLLVLGLFCLLPLSVFAIDFKINSYQGDLYIHADNTAEFRQKIVYQFEEDFKGQIVGLGRAGKMPSGFDIDPHPKIQAAKNGAELADVTSEVTEEADGYTVRVYNPGQEGDIVEVDLVWNLKNLLFLYDDIAELNWQPLTDSSESIEKFEFHVRGDKGAEKLFFHTGKLFREGTIEKSNLDYTIRLDNLPAKRGVELHAYWPRTDFASARDQGLKGNRLEEFNKIEDSIVREKDQSKQLVTWVLPSILSISLLLSVCFYFIYRRKTTPSVKYAKNHRLYEPPMELEPMVLSEAVYSTSLEEVSPLVKGAGKFTFDQLIQATLLDVIDRGNVSIISEGDAVGLRLVKEDGLSSFEKDCLNLAFSGKKEETLSNLFADYKVSDSLYRRAKVSDEKRIQARGLQLKSSFEEVLNQMQEGVRKRVSFWGLPDYYRPLTGGEKALQVGMGALTILPLFIGFGLFLYSLDVHGYLYLPLPILGFLGLVLSVFYYWKLRLDNRDGVLNEAGAEVYYLWTSFENMLREIARLDQAELESIVVWNRLLVYATLFGYADKVSHLMKVHQIQVENPDINLYVAYGWHSTFYHSTAQMSHYASVANTASTYSVSSGSGSSGGGFSGGGGGGSIGAF

SEQ ID NO: 759 - DNA, 168 bp, Streptococcus pneumoniae
ttgaaaaaatggactttttcaagggctttttgccgtgctctaaaatcatcgccaaatcatcaaattgaaataagaaatagtttagataaaactattgacttttcttatagtttgtcttttttctatcttccattatatcatactttttcagtctatggtagctctctt

SEQ ID NO: 760 - protein, 56 aa, Streptococcus pneumoniae
  hypothetical protein (Degenerate transposase); Cellular location: cytoplasm; Similar to strain R6 sequence 15902455 (1.E-16)
MKKWTFSRAFCRALKSSPNHQIEIRNSLDKTIDFSYSLSFFYLPLYHTFSVYGSSL

SEQ ID NO: 761 - DNA, 273 bp, Streptococcus pneumoniae
ttgacacgctaccctaatcctcagaaaaggattgaggcaggatttgataagctgatagaaattaagcgattgaccgcttctaaaattcaggatatcctctcagtcgcacctcgttctatcggaacaacatctcctgctcgtgaattcgaaatcatcaagcattacaagaggctcattgacaaggcggaaacatgtatcaatgactcgatggctgagttcaactcggtcatcacgacggttactgggattggggatcgtttagggcggtcattt

SEQ ID NO: 762 - protein, 91 aa, Streptococcus pneumoniae
  hypothetical protein
MTRYPNPQKRIEAGFDKLIEIKRLTASKIQDILSVAPRSIGTTSPAREFEIIKHYKRLIDKAETCINDSMAEFNSVITTVTGIGDRLGRSF

SEQ ID NO: 763 - DNA, 525 bp, Streptococcus pneumoniae
atgctttatgtaggcattgatatcgctaaaaataaacacgatgttacagccttgaatgttccaggaaaaactgttcttaaaccactcactttttcaaataataaagctggttttgaactcttagatctgtctattcgacagatcaaccaagactgtctcatcgctcttgaagatactggacattatgcctttaatctactgaacttcctgcatgaacaaggatataaagtttacacctacaatcctttgctcatcaaggaatttgccaaatcattatcacttcgcaagactaaaacggataagaaagacgctcatggcatcgctcttaaacttctttctgaccccaatcgtgaacaatttcaacacgataatcggcaagtagacctaaaaatactggctagacatattcatcgtctcaagaaaaacagtctgattggaaagtacaatacactcgttgtcttgatatcatctttcctgagttggataaaatcgttggaaagcattcagaatatacctaccaactct

SEQ ID NO: 764 - protein, 175 aa, Streptococcus pneumoniae
  transposase, IS116/IS110/IS902 family, degenerate; Cellular location: cytoplasm; Similar to strain R6 sequence 15902863 (e-173)
MLYVGIDIAKNKHDVTALNVPGKTVLKPLTFSNNKAGFELLDLSIRQINQDCLIALEDTGHYAFNLLNFLHEQGYKVYTYNPLLIKEFAKSLSLRKTKTDKKDAHGIALKLLSDPNREQFQHDNRQVDLKILARHIHRLKKNSLIGKYNTLVVLISSFLSWIKSLESIQNIPTNS

SEQ ID NO: 765 - DNA, 843 bp, Streptococcus pneumoniae
atgtatcttattgaaattttaaaatctatcttcttcggaattgttgaaggaattacggaatggttgccgatttccagtacaggtcacttgattttagcagaggaattcatccaataccaaaatcaaaatgaagcctttatgtccatgtttaatgtcgtgattcagcttggtgctattttagcagttatggtgatttattttaacaagctcaatccttttaaaccgaccaaggacaaacaggaagttcgtaagacttggagactatggttgaaggtcttgattgctactttacctttacttggtgtctttaaatttgatgattggtttgatacccacttccataacatggtttcagttgctctcatgttgattatctacggggttgccttcatctatttggaaaagcgcaataaagcgcgtgctatcgagccaagtgtaacagagttggacaagcttccttatacgaccgctttctatatcggactcttccaagttcttgctcttttaccagggactagccgttcaggtgcaacgattgtcggtggtttgttaaatggaaccagtcgttcagttgtgacagaatttaccttctatcttgggattcctgttatgtttggagctagtgccttaaagattttcaaatttgtgaaagccggagaactcttgagctttgggcaattgtttttgctcttggtcgcgatgggagtagcttttgcggtcagcatggtggctattcgcttcttgaccagctatgtgaaaaaacacgacttcaccctttttggtaaataccgtatcgtgcttggtagtgttttgctactttacagttttgtccgtttatttgta

SEQ ID NO: 766 - protein, 281 aa, Streptococcus pneumoniae
  bacitracin resistance protein (bacA); Cellular location: membrane; Similar to strain R6 sequence 15902457 (e-158)
MYLIEILKSIFFGIVEGITEWLPISSTGHLILAEEFIQYQNQNEAFMSMFNVVIQLGAILAVMVIYFNKLNPFKPTKDKQEVRKTWRLWLKVLIATLPLLGVFKFDDWFDTHFHNMVSVALMLIIYGVAFIYLEKRNKARAIEPSVTELDKLPYTTAFYIGLFQVLALLPGTSRSGATIVGGLLNGTSRSVVTEFTFYLGIPVMFGASALKIFKFVKAGELLSFGQLFLLLVAMGVAFAVSMVAIRFLTSYVKKHDFTLFGKYRIVLGSVLLLYSFVRLFV

SEQ ID NO: 767 - DNA, 1125 bp, Streptococcus pneumoniae
ttgaggttgcagatagagctgacgtggtttgaagagattttcgaagagtataaaaaggtgctaggcatgttgatttttcctttgttaaatgatttgtcaagaaaaatcatccatattgacatggatgccttttttgctgcagtggaaatcagggataatcctaaactcagaggaaaacctgtcattattggaagcgaccctcggcaaacaggtggacggggagtcgtttctacctgtagttatgaggcaagagcttttggtgtccattctgccatgagttccaaggaagcttatgaacgttgtccccaggctgtctttatctcagggaattatgagaaatacaagtctgtgggactccagattcgagctatttttaagcgctatacagatttgattgaacccatgagcattgacgaagcctatttggatgtgacagaaaataaactcggtatcaagtcagcggtcaaaattgctcgcctcattcaaaaagatatctggcaagaactccatctaactgcttccgcaggcgtttcttacaacaaattcttagctaaaatggcgagtgattatcaaaaaccacatggtttgacagtgattctacctgaacaggctgaggattttctcaaacaaatggatatttccaaatttcatggagtaggaaaaaagacagtagaacgtcttcatcaaatgggcgtttttactggtgctgatttacttgaagttcctgaggtaaccctaatagaccgttttggtagactaggctatgatctgtatcgaaaggctcgtggcattcacaactctccagtcaaatccaatcgcatccgtaaatcaatcggcaaggagaaaacctacgggaagattctccttgctgaggaagatatcaaaaaagagctgactcttctatcagaaaaagtcgctctcaatctacatcaacaagaaaaagctggaaaaattgtcattttgaaaatccgctacgaggacttttcaactcttaccaaacgaaaaagtcttgctcaaaaaacacaagatgctagtcagataagccaaatagccctgcaactctatgaagaattaagcaagaaagaaagaggtgtccgcctattggggattaccatgactggattt

SEQ ID NO: 768 - protein, 375 aa, Streptococcus pneumoniae
  DNA-damage inducible protein P (dinP); Cellular location: cytoplasm; Similar to strain R6 sequence 15902458 (0.E+01)
MRLQIELTWFEEIFEEYKKVLGMLIFPLLNDLSRKIIHIDMDAFFAAVEIRDNPKLRGKPVIIGSDPRQTGGRGVVSTCSYEARAFGVHSAMSSKEAYERCPQAVFISGNYEKYKSVGLQIRAIFKRYTDLIEPMSIDEAYLDVTENKLGIKSAVKIARLIQKDIWQELHLTASAGVSYNKFLAKMASDYQKPHGLTVILPEQAEDFLKQMDISKFHGVGKKTVERLHQMGVFTGADLLEVPEVTLIDRFGRLGYDLYRKARGIHNSPVKSNRIRKSIGKEKTYGKILLAEEDIKKELTLLSEKVALNLHQQEKAGKIVILKIRYEDFSTLTKRKSLAQKTQDASQISQIALQLYEELSKKERGVRLLGITMTGF

SEQ ID NO: 769 - DNA, 2322 bp, Streptococcus pneumoniae
atggttgttaagacagttgttgaagcacaagatatttttgacaaagcttgggaaggcttcaaaggcgtagattggaaagaaaaagcaagtgtatcacgatttgtacaagctaactacacaccttatgatggagacgaaagcttccttgcaggaccaacagagcgttcacttcacatcaagaaaattgtagaagaaactaaagcacactacgaagaaactcgtttcccaatggacactcgtccaacatctatcgctgatatccctgctggatttatcgacaaagaaaatgaagttatcttcggtatccaaaacgatgaactcttcaaattgaacttcatgccaaaaggtggtatccgtatggctgaaactactttgaaagaaaatggatacgaaccagacccagctgttcacgaaatcttcactaaatatgtaacaacagttaacgacggtattttccgtgcctacacttcaaatattcgtcgcgctcgtcacgcacacactgtaactggtcttccagatgcatactcacgcggacgtatcatcggtgtttacgcacgtcttgctctttacggtgcagactacttgatgcaagaaaaagtaaatgactggaatgcaatcaaagaaatcgatgaagaaacaatccgtcttcgtgaagaagtaaaccttcaataccaagcattgcaacaagttgttcgcctgggtgacctttacggggttgatgttcgcaaaccagcgatgaacgtgaaagaagcaatccaatgggttaacattgctttcatggctgtctgccgtgtgattaacggtgctgctacatctctaggtcgtgtaccaatcgtattggacatctttgcagaacgtgaccttgctcgtggtacatttactgaatcagaaatccaagaattcgttgatgatttcgttatgaaacttcgtacagttaaatttgctcgtacaaaagcttatgaccaattgtactcaggtgacccaacctttatcacaacttctatggctggtatgggtaacgacggtcgtcaccgtgttactaagatggactaccgtttcttgaacactcttgacaacatcggtaactcaccagaaccaaacttgacagttctttggactgacaaattgccatacaacttccgtcgctactgtatgcacatgagccacaaacactcttctatccaatacgaaggtgtaacaacaatggctaaagacggatatggtgaaatgagctgtatctcatgctgtgtgtctccacttgatccagaaaatgaagaacaacgccacaacatccagtacttcggtgctcgtgtaaacgttcttaaagcccttcttactggtttgaatggtggttacgacgatgttcacaaagactacaaagtatttgatatcgaaccaatccgtgacgaagttcttgaatttgaatcagttaaagcgaactttgaaaaatctcttgactggttgactgacacttacgtagatgccttgaacatcatccactacatgactgataggtacaactacgaagctgttcaaatggccttcttgccaactaaacaacgtgccaacatgggattcggtatctgtggatttgctaacactgttgatacattgtcagctatcaaatacgctacagttaaaccaatccgtgacgaagatggctacatctacgattacgaaacaatcggtgactacccacgctggggtgaagatgacccacgttcaaacgaattggcagaatggttgatcgaagcttacacaactcgtctacgtagccacaaactatacaaagacgcagaagctacagtatcacttttgacaatcacatctaacgttgcttactctaaacaaactggtaactcaccagttcacaaaggtgtatacctcaacgaagatggttctgtgaacttgtctaaacttgaattcttctcaccaggtgctaacccatctaacaaagctaaaggtggttggttgcaaaacttgaactcactttctagccttgactttagttatgcagctgacggtatctcattgactacacaagtatcacctcgcgctcttggtaagactcgtgatgaacaagttgataacttggtaacaattcttgatggttacttcgaaaacggtggacaacacgttaacttgaacgttatggacttgaacgatgtttacgaaaaaatcatgtcaggcgaagacgttatcgtacgtatctctggatactgtgtaaacactaaatacctcactccagaacaaaaaactgaattgacacaacgtgtcttccacgaagttctttcaatggatgacgccttggatgcattgagc

SEQ ID NO: 770 - protein, 774 aa, Streptococcus pneumoniae
  formate acetyltransferase (pfl); Cellular location: cytoplasm; Similar to strain R6 sequence 15902459 (0.E+01)
MVVKTVVEAQDIFDKAWEGFKGVDWKEKASVSRFVQANYTPYDGDESFLAGPTERSLHIKKIVEETKAHYEETRFPMDTRPTSIADIPAGFIDKENEVIFGIQNDELFKLNFMPKGGIRMAETTLKENGYEPDPAVHEIFTKYVTTVNDGIFRAYTSNIRRARHAHTVTGLPDAYSRGRIIGVYARLALYGADYLMQEKVNDWNAIKEIDEETIRLREEVNLQYQALQQVVRLGDLYGVDVRKPAMNVKEAIQWVNIAFMAVCRVINGAATSLGRVPIVLDIFAERDLARGTFTESEIQEFVDDFVMKLRTVKFARTKAYDQLYSGDPTFITTSMAGMGNDGRHRVTKMDYRFLNTLDNIGNSPEPNLTVLWTDKLPYNFRRYCMHMSHKHSSIQYEGVTTMAKDGYGEMSCISCCVSPLDPENEEQRHNIQYFGARVNVLKALLTGLNGGYDDVHKDYKVFDIEPIRDEVLEFESVKANFEKSLDWLTDTYVDALNIIHYMTDRYNYEAVQMAFLPTKQRANMGFGICGFANTVDTLSAIKYATVKPIRDEDGYIYDYETIGDYPRWGEDDPRSNELAEWLIEAYTTRLRSHKLYKDAEATVSLLTITSNVAYSKQTGNSPVHKGVYLNEDGSVNLSKLEFFSPGANPSNKAKGGWLQNLNSLSSLDFSYAADGISLTTQVSPRALGKTRDEQVDNLVTILDGYFENGGQHVNLNVMDLNDVYEKIMSGEDVIVRISGYCVNTKYLTPEQKTELTQRVFHEVLSMDDALDALS

SEQ ID NO: 771 - DNA, 1266 bp, Streptococcus pneumoniae
atggaacacatcaatcataccacattactcatcggaataaaagacaaaaacatcaccttaaataaagccattcagcacgatacccatatcgaagtcttcgctacacttgattatcacccacctaaatgtaaacactgtaaaggaaaacaaatcaaatacgacttccaaaagccttctaaaatcccttttatcgagattggtggtttccctagcctcattcatttgaaaaagagacgatttcaatgcaagtcctgtcggaaagtcactgtagctgaaacaactctcgttcagaaaaattgccaaatctcggaaatggtgagacagaaaattgcccaactcctactcaacagagaggctcttacacatatcgcttctaaattagccatctctacctctacctctacctctaccgtctatcgtaagctcaagcaatttcatttccaagaggattacaccactttgcctgaaatcctctcctgggatgaattctcctaccagaaggggaaattggctttcattgctcaggatttcaacactaagaaaatcatgaccattcttgataacagacgtcaaacaaccatccgaaatcatttcttcaagtactcgaaagaagctagaaaaaaagttaaagtcgtcactgttgatatgtctggaagttatatccctctcattaagaaattatttcccaatgctaaaattgttctcgatcgtttccacattgtccaacacatgagcagggctcttaatcagactagaatcaacatcatgaagcaatttgatgataaatctctggaatacagagctcttaaatattactggaaatttatcctaaaagatagtcggaaactctctcttaagcctttctatgctagaactttcagagagaccttaactcctagggagtgtctgaagaaaatctttactctagtacctgaacttaaagattactatgacctgtatcaactactcctatttcatctacaagagaagaatactgaccagttttggggcttaattcaagacacgttacctcatctcaaccgcacctttaaaaccactttgagcacatttatttgctataaaaactacatcactaacgccattgaattgccttattctaacgctaaacttgaggccactaacaaactcatcaaagacatcaagcgcaatgcctttggttttcggaactttgaaaacttcaaaaaacggatttttatcgccctgaacatcaaaaaagaaaggacgaaatttgtcctttctcaagct

SEQ ID NO: 772 - protein, 422 aa, Streptococcus pneumoniae
  IS1167, transposase; Cellular location: cytoplasm; Similar to strain R6 sequence 15903763 (e-129)
MEHINHTTLLIGIKDKNITLNKAIQHDTHIEVFATLDYHPPKCKHCKGKQIKYDFQKPSKIPFIEIGGFPSLIHLKKRRFQCKSCRKVTVAETTLVQKNCQISEMVRQKIAQLLLNREALTHIASKLAISTSTSTSTVYRKLKQFHFQEDYTTLPEILSWDEFSYQKGKLAFIAQDFNTKKIMTILDNRRQTTIRNHFFKYSKEARKKVKVVTVDMSGSYIPLIKKLFPNAKIVLDRFHIVQHMSRALNQTRINIMKQFDDKSLEYRALKYYWKFILKDSRKLSLKPFYARTFRETLTPRECLKKIFTLVPELKDYYDLYQLLLFHLQEKNTDQFWGLIQDTLPHLNRTFKTTLSTFICYKNYITNAIELPYSNAKLEATNKLIKDIKRNAFGFRNFENFKKRIFIALNIKKERTKFVLSQA

SEQ ID NO: 773 - DNA, 1527 bp, Streptococcus pneumoniae
atgctaaacaaatacattgaaaaaagaattacagataaaattaccattttaaatatattattggatattcggtctattgaactagatgaactgtctactttaacttcattacaatctaaaagtctcctaagcattttgcaggaattacaagaaacattcgaggaagagttgacatttaatttagatacgcaacaagttcaattaatcgaacaccattctcatcaaacgaattattacttccatcagctttataaccaatcaactattttaaaaatactccgcttctttctactacaaggtaatcaaagctttaacgaatttacacaaaaagagtatatttccatcgcaacaggctaccgcgtacgacaaaagtgtggcttgttactacgttcagtaggtttggaccttgtgaaaaatcaagtagttggtcctgaatatcgcattcgttttttaattgcactcctccagtttcattttggtattgagatttatgatttgaatgatggaagtatggattgggtcacacatatgattgtgcagtctaattctcaactcagtcatgaactgttagaaatcacacctgacgagtatgttcattttagcatactagtggcactcacttggaaacgtcgggaatttccacttgagttccctgagtccaaagagtttgaaaaattaaaaaacctctttatgtatccgattttgatggaacattgccaaacttacttagagccacatgccaacatgacttttactcaggaagaactggattatatctttttggtttattgttctgctaattcttcgttttccaaggacaaatggaatcaagaaaaaaagactcatactattcaactgattcttcagcatacaagaggaaagcatctactatccaagttcaagaatatcttaggaaatgacatttcgaattctctttcttttttaacagcactgactttcttaacaagaacgtttttgtttggtttacaaaatctagttccctattataattattacgaacattatgggattgaaagcgacaagccactgtatcatatttcgaaagcaattgttcaagagtggatgactgagcagaagattgaaggagttatcgaccagcatcggctgtaccttttctcactctacttgacagaaaccatcttttcctcactacctgctatcccgatttttatcattttaaataatcaagcagatgtaaacttaataaagtccattattttacggaattttactgacaaagttgcctctgttacaggatacaatattctaattagtcctcctccttcagaggagcatttgacagagccattgattattattacaacgaaagaatacctgccttacgttaaaaagcagtatcccaaagggaaacatcactttttgacgattgccttagatttgcatgttagccaacagcgtctcatctatcagacaattgtagatatccgaaaagaggcttttgacaaacgggtcgcaatgattgctaaaaaggctcactatttgtta

SEQ ID NO: 774 - protein, 509 aa, Streptococcus pneumoniae
  transcriptional regulator, putative; Cellular location: cytoplasm; Similar to strain R6 sequence 15903664 (5.E-05)
MLNKYIEKRITDKITILNILLDIRSIELDELSTLTSLQSKSLLSILQELQETFEEELTFNLDTQQVQLIEHHSHQTNYYFHQLYNQSTILKILRFFLLQGNQSFNEFTQKEYISIATGYRVRQKCGLLLRSVGLDLVKNQVVGPEYRIRFLIALLQFHFGIEIYDLNDGSMDWVTHMIVQSNSQLSHELLEITPDEYVHFSILVALTWKRREFPLEFPESKEFEKLKNLFMYPILMEHCQTYLEPHANMTFTQEELDYIFLVYCSANSSFSKDKWNQEKKTHTIQLILQHTRGKHLLSKFKNILGNDISNSLSFLTALTFLTRTFLFGLQNLVPYYNYYEHYGIESDKPLYHISKAIVQEWMTEQKIEGVIDQHRLYLFSLYLTETIFSSLPAIPIFIILNNQADVNLIKSIILRNFTDKVASVTGYNILISPPPSEEHLTEPLIIITTKEYLPYVKKQYPKGKHHFLTIALDLHVSQQRLIYQTIVDIRKEAFDKRVAMIAKKAHYLL

SEQ ID NO: 775 - DNA, 2679 bp, Streptococcus pneumoniae
atgcttaacagggagacacacatgaaaaaagtaagaaagatatttcagaaggcagttgcaggactgtgctgtatatctcagttgacagctttttcttcgatagttgctttagcagaaacgcctgaaaccagtccagcgataggaaaagtagtgattaaggagacaggcgaaggaggagcgcttctaggagatgccgtctttgagttgaaaaacaatacggatggcacaactgtttcgcaaaggacagaggcgcaaacaggagaagcgatattttcaaacataaaacctgggacatacaccttgacagaagcccaacctccagttggttataaaccctctactaaacaatggactgttgaagttgagaagaatggtcggacgactgtccaaggtgaacaggtagaaaatcgagaagaggctctatctgaccagtatccacaaacagggacttatccagatgttcaaacaccttatcagattattaaggtagatggttcggaaaaaaacggacagcacaaggcgttgaatccgaatccatatgaacgtgtgattccagaaggtacactttcaaagagaatttatcaagtgaataatttggatgataaccaatatggaatcgaattgacggttagtgggaaaacagtgtatgaacaaaaagataagtctgtgccgctggatgtcgttatcttgctcgataactcaaatagtatgagtaacattcgaaacaagaatgctcgacgtgcggaaagagctggtgaggcgacacgttctcttattgataaaattacatctgattcagaaaatagggtagcgcttgtgacttatgcttccactatctttgatgggaccgagtttacagtagaaaaaggggtagcagataaaaacggaaagcgattgaatgattctcttttttggaattatgatcagacgagttttacaaccaataccaaagattatagttatttaaagctgactaatgataagaatgacattgtagaattaaaaaataaggtacctaccgaggcagaagaccatgatggaaatagattgatgtaccaattcggtgccacttttactcagaaagctttgatgaaggcagatgagattttgacacaacaagcgagacaaaatagtcaaaaagtcattttccatattacggatggtgtcccaactatgtcgtatccgattaattttaatcatgctacgtttgctccatcatatcaaaatcaactaaatgcattttttagtaaatctcctaataaagatggaatactattaagtgattttattacgcaagcaactagtggagaacatacaattgtacgcggagatgggcaaagttaccagatgtttacagataagacagtttatgaaaaaggtgctcctgcagctttcccagttaaacctgaaaaatattctgaaatgaaggcggctggttatgcagttataggcgatccaattaatggtggatatatttggcttaattggagagagagtattctggcttatccgtttaattctaatactgctaaaattaccaatcatggtgaccctacaagatggtactataacgggaatattgctcctgatgggtatgatgtctttacggtaggtattggtattaacggagatcctggtacggatgaagcaacggctactagttttatgcaaagtatttctagtaaacctgaaaactataccaatgttactgacacgacaaaaatattggaacagttgaatcgttatttccacaccatcgtaactgaaaagaaatcaattgagaatggtacgattacagatccgatgggtgagttaattgatttgcaattgggcacagatggaagatttgatccagcagattacactttaactgcaaacgatggtagtcgcttggagaatggacaagctgtaggtggtccacaaaatgatggtggtttgttaaaaaatgcaaaagtgctctatgatacgactgagaaaaggattcgtgtaacaggtctgtaccttggaacggatgaaaaagttacgttgacctacaatgttcgtttgaatgatgagtttgtaagcaataaattttatgataccaatggtcgaacaaccttacatcctaaggaagtagaacagaacacagtgcgcgacttcccgattcctaagattcgtgatgtgcggaagtatccagaaatcacaatttcaaaagagaaaaaacttggtgacattgagtttattaaggtcaataaaaatgataaaaaaccactgagaggtgcggtctttagtcttcaaaaacaacatccggattatccagatatttatggagctattgatcaaaatggcacttatcaaaatgtgagaacaggtgaagatggtaagttgacctttaaaaatctgtcagatgggaaatatcgattatttgaaaattctgaaccagctggttataaacccgttcaaaataagcctatcgttgccttccaaatagtaaatggagaagtcagagatgtgacttcaatcgttccacaagatataccagcgggttacgagtttacgaatgataagcactatattaccaatgaacctattcctccaaagagagaatatcctcgaactggtggtatcggaatgttgccattctatctgataggttgcatgatgatgggaggagttctattatacacacggaaacatccg

SEQ ID NO: 776 - protein, 893 aa, Streptococcus pneumoniae
  cell wall surface anchor family protein; Cellular location: Peptidoglycan-bound (LPXTG); Feature of note: RGD motif
MLNRETHMKKVRKIFQKAVAGLCCISQLTAFSSIVALAETPETSPAIGKVVIKETGEGGALLGDAVFELKNNTDGTTVSQRTEAQTGEAIFSNIKPGTYTLTEAQPPVGYKPSTKQWTVEVEKNGRTTVQGEQVENREEALSDQYPQTGTYPDVQTPYQIIKVDGSEKNGQHKALNPNPYERVIPEGTLSKRIYQVNNLDDNQYGIELTVSGKTVYEQKDKSVPLDVVILLDNSNSMSNIRNKNARRAERAGEATRSLIDKITSDSENRVALVTYASTIFDGTEFTVEKGVADKNGKRLNDSLFWNYDQTSFTTNTKDYSYLKLTNDKNDIVELKNKVPTEAEDHDGNRLMYQFGATFTQKALMKADEILTQQARQNSQKVIFHITDGVPTMSYPINFNHATFAPSYQNQLNAFFSKSPNKDGILLSDFITQATSGEHTIVRGDGQSYQMFTDKTVYEKGAPAAFPVKPEKYSEMKAAGYAVIGDPINGGYIWLNWRESILAYPFNSNTAKITNHGDPTRWYYNGNIAPDGYDVFTVGIGINGDPGTDEATATSFMQSISSKPENYTNVTDTTKILEQLNRYFHTIVTEKKSIENGTITDPMGELIDLQLGTDGRFDPADYTLTANDGSRLENGQAVGGPQNDGGLLKNAKVLYDTTEKRIRVTGLYLGTDEKVTLTYNVRLNDEFVSNKFYDTNGRTTLHPKEVEQNTVRDFPIPKIRDVRKYPEITISKEKKLGDIEFIKVNKNDKKPLRGAVFSLQKQHPDYPDIYGAIDQNGTYQNVRTGEDGKLTFKNLSDGKYRLFENSEPAGYKPVQNKPIVAFQIVNGEVRDVTSIVPQDIPAGYEFTNDKHYITNEPIPPKREYPRTGGIGMLPFYLIGCMMMGGVLLYTRKHP

SEQ ID NO: 777 - DNA, 1995 bp, Streptococcus pneumoniae
atgaaatcaatcaacaaatttttaacaatgcttgctgccttattactgacagcgagtagcctgttttcagctgcaacagtttttgcggctgggacgacaacaacatctgttaccgttcataaactattggcaacagatggggatatggataaaattgcaaatgagttagaaacaggtaactatgctggtaataaagtgggtgttctacctgcaaatgcaaaagaaattgccggtgttatgttcgtttggacaaatactaataatgaaattattgatgaaaatggccaaactctaggagtgaatattgatccacaaacatttaaactctcaggggcaatgccggcaactgcaatgaaaaaattaacagaagctgaaggagctaaatttaacacggcaaatttaccagctgctaagtataaaatttatgaaattcacagtttatcaacttatgtcggtgaagatggagcaaccttaacaggttctaaagcagttccaattgaaattgaattaccattgaacgatgttgtggatgcgcatgtgtatccaaaaaatacagaagcaaagccaaaaattgataaagatttcaaaggtaaagcaaatccagatacaccacgtgtagataaagatacacctgtgaaccaccaagttggagatgttgtagagtacgaaattgttacaaaaattccagcacttgctaattatgcaacagcaaactggagcgatagaatgactgaaggtttggcattcaacaaaggtacagtgaaagtaactgttgatgatgttgcacttgaagcaggtgattatgctctaacagaagtagcaactggttttgatttgaaattaacagatgctggtttagctaaagtgaatgaccaaaacgctgaaaaaactgtgaaaatcacttattcggcaacattgaatgacaaagcaattgtagaagtaccagaatctaatgatgtaacatttaactatggtaataatccagatcacgggaatactccaaagccgaataagccaaatgaaaacggcgatttgacattgaccaagacatgggttgatgctacaggtgcaccaattccggctggagctgaagcaacgttcgatttggttaatgctcagactggtaaagttgtacaaactgtaactttgacaacagacaaaaatacagttactgttaacggattggataaaaatacagaatataaattcgttgaacgtagtataaaagggtattcagcagattatcaagaaatcactacagctggagaaattgctgtcaagaactggaaagacgaaaatccaaaaccacttgatccaacagagccaaaagttgttacatatggtaaaaagtttgtcaaagttaatgataaagataatcgtttagctggggcagaatttgtaattgcaaatgctgataatgctggtcaatatttagcacgtaaagcagataaagtgagtcaagaagagaagcagttggttgttacaacaaaggatgctttagatagagcagttgctgcttataacgctcttactgcacaacaacaaactcagcaagaaaaagagaaagttgacaaagctcaagctgcttataatgctgctgtgattgctgccaacaatgcatttgaatgggtggcagataaggacaatgaaaatgttgtgaaattagtttctgatgcacaaggtcgctttgaaattacaggccttcttgcaggtacatattacttagaagaaacaaaacagcctgctggttatgcattactaactagccgtcagaaatttgaagtcactgcaacttcttattcagcgactggacaaggcattgagtatactgctggttcaggtaaagatgacgctacaaaagtagtcaacaaaaaaatcactatcccacaaacgggtggtattggtacaattatctttgctgtagcgggggctgcgattatgggtattgcagtgtacgcatatgttaaaaacaacaaagatgaggatcaacttgct

SEQ ID NO: 778 - protein, 665 aa, Streptococcus pneumoniae
  cell wall surface anchor family protein; Cellular location: Peptidoglycan-bound (LPXTG)
MKSINKFLTMLAALLLTASSLFSAATVFAAGTTTTSVTVHKLLATDGDMDKIANELETGNYAGNKVGVLPANAKEIAGVMFVWTNTNNEIIDENGQTLGVNIDPQTFKLSGAMPATAMKKLTEAEGAKFNTANLPAAKYKIYEIHSLSTYVGEDGATLTGSKAVPIEIELPLNDVVDAHVYPKNTEAKPKIDKDFKGKANPDTPRVDKDTPVNHQVGDVVEYEIVTKIPALANYATANWSDRMTEGLAFNKGTVKVTVDDVALEAGDYALTEVATGFDLKLTDAGLAKVNDQNAEKTVKITYSATLNDKAIVEVPESNDVTFNYGNNPDHGNTPKPNKPNENGDLTLTKTWVDATGAPIPAGAEATFDLVNAQTGKVVQTVTLTTDKNTVTVNGLDKNTEYKFVERSIKGYSADYQEITTAGEIAVKNWKDENPKPLDPTEPKVVTYGKKFVKVNDKDNRLAGAEFVIANADNAGQYLARKADKVSQEEKQLVVTTKDALDRAVAAYNALTAQQQTQQEKEKVDKAQAAYNAAVIAANNAFEWVADKDNENVVKLVSDAQGRFEITGLLAGTYYLEETKQPAGYALLTSRQKFEVTATSYSATGQGIEYTAGSGKDDATKVVNKKITIPQTGGIGTIIFAVAGAAIMGIAVYAYVKNNKDEDQLA

SEQ ID NO: 779 - DNA, 1206 bp, Streptococcus pneumoniae
ttgatgacaatgcagaaaatgcagaaaatgattagtcgtatcttctttgttatggctctgtgtttttctcttgtatggggtgcacatgcagtccaagcgcaagaagatcacacgttggtcttgcaattggagaactatcaggaggtggttagtcaattgccatctcgtgatggtcatcggttgcaagtatggaagttggatgattcgtattcctatgatgatcgggtgcaaattgtaagagacttgcattcgtgggatgagaataaactttcttctttcaaaaagacttcgtttgagatgaccttccttgagaatcagattgaagtatctcatattccaaatggtctttactatgttcgctctattatccagacggatgcggtttcttatccagctgaatttctttttgaaatgacagatcaaacggtagagcctttggtcattgtagcgaaaaaaacagatacaatgacaacaaaggtgaagctgataaaggtggatcaagaccacaatcgcttggagggtgtcggctttaaattggtatcagtagcaagagatgtttctgaaaaagaggttcccttgattggagaataccgttacagttcttctggtcaagtagggagaactctctatactgataaaaatggagagatttttgtgacaaatcttcctcttgggaactatcgtttcaaggaggtggagccactggcaggctatgctgttacgacgctggatacggatgtccagctggtagatcatcagctggtgacgattacggttgtcaatcagaaattaccacgtggcaatgttgactttatgaaggtggatggtcggaccaatacctctcttcaaggggcaatgttcaaagtcatgaaagaagaaagcggacactatactcctgttcttcaaaatggtaaggaagtagttgtaacatcagggaaagatggtcgtttccgagtggaaggtctagagtatgggacatactatttatgggagctccaagctccaactggttatgttcaattaacatcgcctgtttcctttacaatcgggaaagatactcgtaaggaactggtaacagtggttaaaaataacaagcgaccacggattgatgtgccagatacaggggaagaaaccttgtatatcttgatgcttgttgccattttgttgtttggtagtggttattatcttacgaaaaaaccaaataac

SEQ ID NO: 780 - protein, 402 aa, Streptococcus pneumoniae
  cell wall surface anchor family protein; Cellular location: Peptidoglycan-bound (LPXTG)
MMTMQKMQKMISRIFFVMALCFSLVWGAHAVQAQEDHTLVLQLENYQEVVSQLPSRDGHRLQVWKLDDSYSYDDRVQIVRDLHSWDENKLSSFKKTSFEMTFLENQIEVSHIPNGLYYVRSIIQTDAVSYPAEFLFEMTDQTVEPLVIVAKKTDTMTTKVKLIKVDQDHNRLEGVGFKLVSVARDVSEKEVPLIGEYRYSSSGQVGRTLYTDKNGEIFVTNLPLGNYRFKEVEPLAGYAVTTLDTDVQLVDHQLVTITVVNQKLPRGNVDFMKVDGRTNTSLQGAMFKVMKEESGHYTPVLQNGKEVVVTSGKDGRFRVEGLEYGTYYLWELQAPTGYVQLTSPVSFTIGKDTRKELVTVVKNNKRPRIDVPDTGEETLYILMLVAILLFGSGYYLTKKPNN

SEQ ID NO: 781 - DNA, 129 bp, Streptococcus pneumoniae
ttgtttttaccatttttatcagcatccctttatcttcaaactcatcattttatcgcttttcctaacagacaatcctatctgctaagagaaacgagaaaatctcatttctttctgattcaccatccattt

SEQ ID NO: 782 - protein, 43 aa, Streptococcus pneumoniae
  hypothetical protein; Cellular location: cytoplasm
MFLPFLSASLYLQTHHFIAFPNRQSYLLRETRKSHFFLIHHPF

SEQ ID NO: 783 - DNA, 912 bp, Streptococcus pneumoniae
atgctgataaaaatggtaaaaacaaaaaagcaaaaacgaaataatctcctattaggagtggtatttttcattggaatggcggtaatggcgtatccgctggtgtctcgcttgtattatcgagtggaatcaaatcaacaaattgctgactttgataaggaaaaagcaacgttggatgaggctgacattgatgaacgaatgaaattggcacaagccttcaatgactctttgaataatgtagtgagtggcgatccttggtcggaagaaatgaagaaaaaagggcgagcagagtatgcacgtatgttagaaatccatgagcggatggggcatgtggaaatccccgttattgacgtggatttgccggtttatgctggtactgctgaagaggtattgcagcaaggggctgggcatctagagggaacttctctgccgatcggaggcaattcgacccatgcggtgattacggcacatacaggtttgccaacagctaagatgtttacggatttgaccaaacttaaagttggggataagttttatgtgcacaatatcaaggaagtgatggcctatcaagtggatcaagtaaaggtgattgagccgacgaactttgatgatttattgattgtaccaggtcatgattatgtgaccttgctgacttgtacgccatacatgatcaatacccatcgtctattggttcgggggcatcggataccgtacgtagcagaggttgaggaagaatttattgcagcaaacaaactcagtcatctctatcgctacctgttttatgtggcagttggtttgattgtgattcttttatggattattcgacgcttgcgcaagaagaaaaaacaaccggaaaaggctttgaaggcgctgaaagcagcaaggaaggaagtgaaggtggaggatggacaacag

SEQ ID NO: 784 - protein, 304 aa, Streptococcus pneumoniae
  sortase, putative; Cellular location: membrane; Similar to strain R6 sequence 15903141 (7.E-09)
MLIKMVKTKKQKRNNLLLGVVFFIGMAVMAYPLVSRLYYRVESNQQIADFDKEKATLDEADIDERMKLAQAFNDSLNNVVSGDPWSEEMKKKGRAEYARMLEIHERMGHVEIPVIDVDLPVYAGTAEEVLQQGAGHLEGTSLPIGGNSTHAVITAHTGLPTAKMFTDLTKLKVGDKFYVHNIKEVMAYQVDQVKVIEPTNFDDLLIVPGHDYVTLLTCTPYMINTHRLLVRGHRIPYVAEVEEEFIAANKLSHLYRYLFYVAVGLIVILLWIIRRLRKKKKQPEKALKALKAARKEVKVEDGQQ

SEQ ID NO: 785 - DNA, 147 bp, Streptococcus pneumoniae
atggattattcgacgcttgcgcaagaagaaaaaacaaccggaaaaggctttgaaggcgctgaaagcagcaaggaaggaagtgaaggtggaggatggacaacagtagacgttcacgaaaaaaaggcacaaaaaagaagaaacatccgc

SEQ ID NO: 786 - protein, 49 aa, Streptococcus pneumoniae
  hypothetical protein
MDYSTLAQEEKTTGKGFEGAESSKEGSEGGGWTTVDVHEKKAQKRRNIR

SEQ ID NO: 787 - DNA, 786 bp, Streptococcus pneumoniae
ttggtgtctcgttattattatcgtattgagtcaaacgaggttattaaagagtttgatgagacggtttcccagatggataaggcagaacttgaggagcgttggcgcttggctcaagccttcaatgcgaccttgaaaccatctgaaattcttgatccttttacagagcaagagaaaaagaaaggcgtctcagaatatgccaatatgctaaaggtccatgagcggattggctatgtggaaattcctgcgattgatcaggaaattccgatgtatgtcggaacgagtgaggacattcttcagaaaggggcagggctgttagaaggggcttcgctgcctgttggaggtgaaaatacccatacagtgatcactgctcacagaggattgccaacggcagaattgttcagtcaattggataagatgaaaaaaggggatatcttttatcttcacgttttagatcaggtgttggcctaccaagtggatcagatagtgacggtggagccgaatgactttgagcctgtcttgattcaacatggggaagattatgcgaccttgttgacttgtacaccgtatatgattaacagtcatcgtctgttggtacgtgggaagcggattccgtatacggcaccaattgcagagcggaatcgagcggtgagagagcgtgggcaattctggttgtggttattactaggagcgatggcggtcatccttctcttgctgtatcgcgtgtatcgtaatcgacggattgtcaaaggactagaaaagcaattggaggggcgtcatgtcaaggac

SEQ ID NO: 788 - protein, 262 aa, Streptococcus pneumoniae
  sortase, putative; Cellular location: membrane; Similar to strain R6 sequence 15903141 (1.E-08)
MVSRYYYRIESNEVIKEFDETVSQMDKAELEERWRLAQAFNATLKPSEILDPFTEQEKKKGVSEYANMLKVHERIGYVEIPAIDQEIPMYVGTSEDILQKGAGLLEGASLPVGGENTHTVITAHRGLPTAELFSQLDKMKKGDIFYLHVLDQVLAYQVDQIVTVEPNDFEPVLIQHGEDYATLLTCTPYMINSHRLLVRGKRIPYTAPIAERNRAVRERGQFWLWLLLGAMAVILLLLYRVYRNRRIVKGLEKQLEGRHVKD

SEQ ID NO: 789 - DNA, 849 bp, Streptococcus pneumoniae
atgtcaaggactaaactacgagccttattgggatacttgttgatgttggtagcctgtttgattcctatttattgttttggacagatggtgttgcagtctcttggacaggtgaaaggtcatgctacatttgtgaaatccatgacaactgaaatgtaccaagaacaacagaaccattctctcgcctacaatcaacgcttggcttcgcaaaatcgcattgtagatccttttttggcggagggatatgaggtcaattaccaagtgtctgacgaccctgatgcagtctatggttacttgtctattccaagtttggaaatcatggagccggtttatttgggagcagattatcatcatttagggatgggcttggctcatgtggatggtacaccgctgcctctggatggtacagggattcgctcagtgattgctgggcaccgtgcagagccaagccatgtctttttccgccatttggatcagctaaaagttggagatgctctttattatgataatggccaggaaattgtagaatatcagatgatggacacagagattattttaccgtcggaatgggaaaaattagaatcggttagctctaaaaatatcatgaccttgataacctgcgatccgattcctacctttaataaacgcttattagtgaattttgaacgagtcgctgtttatcaaaaatcagatccacaaacagctgcagttgcgagggttgcttttacgaaagaaggacaatctgtatcgcgtgttgcaacctctcaatggttgtaccgtgggctagtggtactggcatttctgggaatcctgtttgttttgtggaagctagcacgtttactacgagggaaa

SEQ ID NO: 790 - protein, 283 aa, Streptococcus pneumoniae
  sortase, putative; Cellular location: membrane; Similar to strain R6 sequence 15903141 (1.E-05)
MSRTKLRALLGYLLMLVACLIPIYCFGQMVLQSLGQVKGHATFVKSMTTEMYQEQQNHSLAYNQRLASQNRIVDPFLAEGYEVNYQVSDDPDAVYGYLSIPSLEIMEPVYLGADYHHLGMGLAHVDGTPLPLDGTGIRSVIAGHRAEPSHVFFRHLDQLKVGDALYYDNGQEIVEYQMMDTEIILPSEWEKLESVSSKNIMTLITCDPIPTFNKRLLVNFERVAVYQKSDPQTAAVARVAFTKEGQSVSRVATSQWLYRGLVVLAFLGILFVLWKLARLLRGK

SEQ ID NO: 791 - DNA, 108 bp, Streptococcus pneumoniae
gtgctagcttccacaaaacaaacaggattcccagaaatgccagtaccactagcccacggtacaaccattgagaggttgcaacacgcgatacagattgtccttctttcg

SEQ ID NO: 792 - protein, 36 aa, Streptococcus pneumoniae
  hypothetical protein
MLASTKQTGFPEMPVPLAHGTTIERLQHAIQIVLLS

SEQ ID NO: 793 - DNA, 759 bp, Streptococcus pneumoniae
atgagctttattgcgcaagattttgaaaagctcgatatcatcactgttcttgaaggtagaacacaagctgtcatccgagatcactttcttaaatatgatagagccgtccgatgtcgcgtcaaaattattactatggatatgtttagtccttactatgacttagctagacaacttttcccgtgtgctaaaatcgttcttgatcgctttcacattgtacaacatcttagccgtgctatgagtcgtgtgcgtgtccaaatcatgaatcagtttcatcgaaaatcccatgaatacaaggctatcaagcgctactggaaactcattcaacaggatagccgtaaactcagcgataaacatttttatcgccctacttttcgtatgcatttaaccaataaagagattttagacaagcttttgagctattcacaagacttgaaacatcactatcagctctatcaactcttgctgtttcactttcagaataaggaaccggagaaatttttcgaacttatcgaggacaatcttaagcaggttcatcctatttttcagactgtctttaaaaccttcctcaaagataaagaaaaggttatcaacgcccttcaactacactattctaatgccaaactggaagcgaccaataatctcatcaaacttatcaagcgcaatgcctttggttttcgaaactttgaaaacttcaaaaaacggatttttatcgctctgaatatcaaaaaagaaaggacaaaatttgtcctttctcgagct

SEQ ID NO: 794 - protein, 253 aa, Streptococcus pneumoniae
  transposase
MSFIAQDFEKLDIITVLEGRTQAVIRDHFLKYDRAVRCRVKIITMDMFSPYYDLARQLFPCAKIVLDRFHIVQHLSRAMSRVRVQIMNQFHRKSHEYKAIKRYWKLIQQDSRKLSDKHFYRPTFRMHLTNKEILDKLLSYSQDLKHHYQLYQLLLFHFQNKEPEKFFELIEDNLKQVHPIFQTVFKTFLKDKEKVINALQLHYSNAKLEATNNLIKLIKRNAFGFRNFENFKKRIFIALNIKKERTKFVLSRA

SEQ ID NO: 795 - DNA, 1274 bp, Streptococcus pneumoniae
atggaacaattacattttatcacaaaattactagacattaaagaccctaatatccagattttagacatcatcaataaggatacacacaaggaaatcatcgccaaactggactacgacgccccatcttgccctgagtgcggaaaccaattgaagaaatatgactttcaaaaaccgtctaagatcccttacctcgaaacaactggtatgccttctagaattctccttagaaaacgccgtttcaagtgctatcactgttcaaaaatgatggtcgctgaaacttctatcgtcaagaagaatcatcaaattcctcgtattatcaaccaaaaaattgcgcaaaagttgattgagaagatttctatgaccgatattgctcatcagctggccatttcaacttcaactgtcattcgcaagctcaatgattctcactttgagcatgatttttcgcgtcttcctgagattatgtcctgggacgttgaaacagtccggggagtgactgtttcaatcgggagatggagatgagctttattgcgcaagattttgaaaagctcgatatcatcactgttcttgaaggtagaacacaagctgtcatccgagatcactttcttaaatatgatagagccgtccgatgtcgcgtcaaaattattactatggatatgtttagtccttactatgacttagctagacaacttttcccgtgtgctaaaatcgttcttgatcgctttcacattgtacaacatcttagccgtgctatgagtcgtgtgcgtgtccaaatcatgaatcagtttcatcgaaaatcccatgaatacaaggctatcaagcgctactggaaactcattcaacaggatagccgtaaactcagcgataaacatttttatcgccctacttttcgtatgcatttaaccaataaagagattttagacaagcttttgagctattcacaagacttgaaacatcactatcagctctatcaactcttgctgtttcactttcagaataaggaaccggagaaatttttcgaacttatcgaggacaatcttaagcaggttcatcctatttttcagactgtctttaaaaccttcctcaaagataaagaaaaggttatcaacgcccttcaactacactattctaatgccaaactggaagcgaccaataatctcatcaaacttatcaagcgcaatgcctttggttttcgaaactttgaaaacttcaaaaaacggatttttatcgctctgaatatcaaaaaagaaaggacaaaatttgtcctttctcgagct

SEQ ID NO: 796 - protein, 172 aa, Streptococcus pneumoniae
  IS1167, transposase FRAMESHIFT
MEQLHFITKLLDIKDPNIQILDIINKDTHKEIIAKLDYDAPSCPECGNQLKKYDFQKPSKIPYLETTGMPSRILLRKRRFKCYHCSKMMVAETSIVKKNHQIPRIINQKIAQKLIEKISMTDIAHQLAISTSTVIRKLNDSHFEHDFSRLPEIMSWDVETVRGVTVSIGRWR

SEQ ID NO: 797 - DNA, 147 bp, Streptococcus pneumoniae
atggataaaatgaaaccggtcttccaagccctaaataaggaattaattcaggaaaatctgactttaacaattatctgtgtcggtggttatgtcttagaatatcatggtttacgtgccacacaagatgttgatgcttttatggctcta

SEQ ID NO: 798 - protein, 49 aa, Streptococcus pneumoniae
  hypothetical protein; Cellular location: cytoplasm
MDKMKPVFQALNKELIQENLTLTIICVGGYVLEYHGLRATQDVDAFMAL

SEQ ID NO: 799 - DNA, 282 bp, Streptococcus pneumoniae
atggattggtacgattatatgatacaggcatccaaacaatcacaattcaacgcaagccattggtttcgctatttgcgaaaagttatttttgaagactattcttatttaacaaaccaagatgtagaaaagttgctagactccaaagaactaacccgttttcaaaaaattagcttgaagtatgcctttcaagagcatactccaactcataaatatgtgatttcattaaataaacctgctaagttaaccaatgttcaaaaattgatggagaaatacaaacatgga

SEQ ID NO: 800 - protein, 94 aa, Streptococcus pneumoniae
  conserved hypothetical protein; Cellular location: cytoplasm; Similar to strain R6 sequence 15902461 (9.E-53)
MDWYDYMIQASKQSQFNASHWFRYLRKVIFEDYSYLTNQDVEKLLDSKELTRFQKISLKYAFQEHTPTHKYVISLNKPAKLTNVQKLMEKYKHG

SEQ ID NO: 801 - DNA, 171 bp, Streptococcus pneumoniae
ttgcttattatcaatcgtttttttagcttatttgtcttagattggtatagaactgagctatggattaatactcttgtatcttatcctgttcctaaatatgttggtagaaaaatgaagcagttgttacgagtgtctgtattggaaaaaattttgtctatagaattctttaaa

SEQ ID NO: 802 - protein, 57 aa, Streptococcus pneumoniae
  hypothetical protein; Cellular location: cytoplasm; Similar to strain R6 sequence 15902462 (2.E-23)
MLIINRFFSLFVLDWYRTELWINTLVSYPVPKYVGRKMKQLLRVSVLEKILSIEFFK

SEQ ID NO: 803 - DNA, 1221 bp, Streptococcus pneumoniae
atgattacaaaacaatcagcctttttacaaaatagagccactatactggagtttctatatcgaaatccagcaacatcccgtacagatattgttaatgaaacaggacttactccagcaacaacgactaacatcataaaagagctaagcgaacagtccctcatatacgaaactggtgatgaatttagcgagttttccggatctggaagacgtagaaaaactatttctatcacagataatattccgtatgttgttggaggtattgaaataaacgtcctaggtatctttctcagtctatgtgacttacaagggaaaactcttttcgagacagaaattttgaatgaagattatcctatttcagaaatcaattccaccattaccaatatgataaaaacagctatagagtacgtccctttggaaacaaaattacttggatttggcttatcaatacctggacattataacaaagactccggaagtatcattacaaacaaccccatatgggaatcttttaatttattaaatgtaattaaaagattcaattttccttttattgtaaaaaataatatcgattgtatggctataggacaatacctttttaatccacacaatacccccgataactttattttcctacacgctggattaggtatttacacttcctttttcacaaaagaaaaaataggagcctctaaaaatccttatatcggagaaattggacacaccattgtcgaattgaatgggcaatattgtgaatgcggaaaaaaaggttgtttacaaacatatatttcggatgcttggttaatcaaacacgcccaattattatttaaaaattcccaactaactgtactaaaaagccttgtaaagactgaaaaagacattcatttagacacccttttaacggcttataatttaggcgactccgctttacgtcaacaaattgataaaggagtcaatttattagccacttctattgcaaatctcctcctcatcaatcctgctgataaaatctatatcaacagtcaattgcttaattatcaacctttcactcatgaagtcagggataaaatccaagaccagctccacttcgttccctttactcgtaatatagaaattgaaattttaccttacaacaaacatcgtggaagtataggagcttgtgcattagctatcgtcgcttttttcatagaacatagcaatgtattacaagatattatttcacct

SEQ ID NO: 804 - protein, 407 aa, Streptococcus pneumoniae
  ROK family protein; Cellular location: membrane; Similar to strain R6 sequence 15902464 (0.E+01)
MITKQSAFLQNRATILEFLYRNPATSRTDIVNETGLTPATTTNIIKELSEQSLIYETGDEFSEFSGSGRRRKTISITDNIPYVVGGIEINVLGIFLSLCDLQGKTLFETEILNEDYPISEINSTITNMIKTAIEYVPLETKLLGFGLSIPGHYNKDSGSIITNNPIWESFNLLNVIKRFNFPFIVKNNIDCMAIGQYLFNPHNTPDNFIFLHAGLGIYTSFFTKEKIGASKNPYIGEIGHTIVELNGQYCECGKKGCLQTYISDAWLIKHAQLLFKNSQLTVLKSLVKTEKDIHLDTLLTAYNLGDSALRQQIDKGVNLLATSIANLLLINPADKIYINSQLLNYQPFTHEVRDKIQDQLHFVPFTRNIEIEILPYNKHRGSIGACALAIVAFFIEHSNVLQDIISP

SEQ ID NO: 805 - DNA, 1323 bp, Streptococcus pneumoniae
gtgatgaacaatattttagcgtttttagaaacaaaagtcgctccgtttggtgaaaaagttggcaaccaacggcatttgaaagctattcgtgaaggatttatgatggcaatgcctttgattttagtcggctctttatttcttattctaatcagttggcctcaagaggcttttacaaattggctgaatagtgttggattgctaagtatcttgacaactatgaatcagtcaacagtagcgattatctccttggtcgcttgtttcggtattgcctacaggttgtcggaaggatatggtacagatggtccgtcggcagggatcatagccttatccagttttgtattgatggcacctcgtttttcgagtatggtttatgataaaaatggggagcaggtcaagcagttatttggcggcgcaataccattttctagcctgaatgcatcttctttgtttatggcgattactattggattggttacagcagagatttatcgtatgtttatccagcgcggaattacgataaaaatgccaagtggtgtcccagatgtagtaagtaaatcattttcagctcttttatctggttttactacttttgttttgtgggctttggtcttaaaaggtcttgaagcggcaggagttgcaggaggtctcaacggactcctaggtgcaattgttggaacaccgcttaagttaattgcaggaacgcttccaggtatgattctatgtgttattgtaaactcattcttttggttctgtggagttaatgggggacaagttttaaatgcttttgtagacccagtttggttacaatttactacagaaaaccaagaagctgtggctgcaggacaaacactccaacacattattacattaccgtttaaagatttatttgtatttattggtggcggtggagcgactattggtcttgcgatttgtctcttcctatttagtaagagtcgtgcgaataaaacattaggtaagctagctattataccgtctatttttaatatcaatacagctattctatttacgtttccaacagttttaaatccgattatgctgattccgtttattgctactcctacaatcaatgccttgattacctatgtatcaatggctgtaggattagtaccctatacaacaggtgtaatccttccgtggacaatgccaccgattataggaggcttccttgcaacaggggctagttggcgaggagctctattacaagttgttttgattttggtttctgtagcaatttattatccattcttcaaaattgcagataaacgcaatcttgaaaaagaaaaagctactgttggagggaaa

SEQ ID NO: 806 - protein, 441 aa, Streptococcus pneumoniae
  PTS system, cellobiose-specific IIC component (licC); Cellular location: membrane; Similar to strain R6 sequence 15902465 (0.E+01)
MMNNILAFLETKVAPFGEKVGNQRHLKAIREGFMMAMPLILVGSLFLILISWPQEAFTNWLNSVGLLSILTTMNQSTVAIISLVACFGIAYRLSEGYGTDGPSAGIIALSSFVLMAPRFSSMVYDKNGEQVKQLFGGAIPFSSLNASSLFMAITIGLVTAEIYRMFIQRGITIKMPSGVPDVVSKSFSALLSGFTTFVLWALVLKGLEAAGVAGGLNGLLGAIVGTPLKLIAGTLPGMILCVIVNSFFWFCGVNGGQVLNAFVDPVWLQFTTENQEAVAAGQTLQHIITLPFKDLFVFIGGGGATIGLAICLFLFSKSRANKTLGKLAIIPSIFNINTAILFTFPTVLNPIMLIPFIATPTINALITYVSMAVGLVPYTTGVILPWTMPPIIGGFLATGASWRGALLQVVLILVSVAIYYPFFKIADKRNLEKEKATVGGK

SEQ ID NO: 807 - DNA, 1938 bp, Streptococcus pneumoniae
ttgcagataaacgcaatcttgaaaaagaaaaagctactgttggagggaaataagatggttatcagagtatttgatcaacagaaaaatacttattctagctttgccttagaggaattaagttactatatgaatcgggtctttaagactaacatagagcttgtcgaggagaaggaagcggatatttttgtaggattagtcaataaagaggacagaaaagaccatgttcttatctcattagacaagggtaaggggagaattgagtctaatacaattgtaggtttacttattggaatttaccgaatgtttcatgaatttggggttgtgtatactagaccagggcgcagacatgactttgttccagagttacgatttgaagattttttagataaacagctatctatagatgaaacagccagttactatcataggggagtatgtatagagggagcggattcatttgaaaatatactagatttcattgattggctacctaagattgggatgaacagttttttcatccagtttgaaaatccttactcttttttgaaacgttggtatgaacatgaatttaatccatatctaaataaagaacaattttcaaatgaattagtacaagaattgagtgataggttggataaagaattgcaaaaaagaggtcttattcatcatcgtgttggtcatggatggacaggtgaagttttaggttactcttcaaaatttggctgggaatcaggtcttagtatttcagaggagaagaaaccctatgtcgctgaaataaacgggaaacgagaattgtttaatacggctccgattttaaccagcctggatttttcaaatccagatgtagctgataagatggtagaaattatcaaggattatgccaagaaaagacctgatgttaactacttacatgtatggttgtcggatgctcgtaataatatttgtgaatgcgaaaactgtagacaagaattggtttcggatcagtatattcgtattctcaatcaattggatagggctttaacgagtgagggattagatacaaagatttgttttctgctttatcatgagttgttatgggcacctcagaaagaaaaattagataatcctgaacgctttaccatgatgtttgcaccgattacaagaacatttgaaatgagttatgcagatgtagattttgacaattccatacctacgcctaaaccttatatgcgtaataaaattatacttccgaattctcttgaggaaaatttatcttatctttttgagtggcaaaaagcatttaaaggagatagtttcgtatatgactatcctttagggcgtgctcattatggcgatttaggctatatgaaaattagtcaaactatttacagagatgtatcttatctttccaacctacatttgaacgggtacatttcgtgtcaagaattacgtgccggattccctcataattttcctaattatgtcatgggggaaatgctctggaagaagacaagaagttatgaagaattgattgaagaatacttttctgctttgtatggggaaaattggcagtctgttgttgaatatttagaaaaattatccatttattcctcttgtgattattttaatgcaattggcagccgtcaaagtgatgttttagcgaatcattattatatagcttacaatctagctgataattttttaccaattattgaggaaaatatttctaagttattaaatagtcaaaaggatgaatggaaacagctcagttatcatcgtgaatatgttgttaagatggcgaaggctttatatcttcaagcaactggaaaaacaaggcaagctcaagatgaatggagaaatgtgttgaattatatccgtgggcacgaattgctatttcaatctaatttggatgtttatcgtgtaattgaagtagcaaaaaattacgctggtttccactta

SEQ ID NO: 808 - protein, 646 aa, Streptococcus pneumoniae
  hypothetical protein; Cellular location: cytoplasm; Similar to strain R6 sequence 15902466 (0.E+01)
MQINAILKKKKLLLEGNKMVIRVFDQQKNTYSSFALEELSYYMNRVFKTNIELVEEKEADIFVGLVNKEDRKDHVLISLDKGKGRIESNTIVGLLIGIYRMFHEFGVVYTRPGRRHDFVPELRFEDFLDKQLSIDETASYYHRGVCIEGADSFENILDFIDWLPKIGMNSFFIQFENPYSFLKRWYEHEFNPYLNKEQFSNELVQELSDRLDKELQKRGLIHHRVGHGWTGEVLGYSSKFGWESGLSISEEKKPYVAEINGKRELFNTAPILTSLDFSNPDVADKMVEIIKDYAKKRPDVNYLHVWLSDARNNICECENCRQELVSDQYIRILNQLDRALTSEGLDTKICFLLYHELLWAPQKEKLDNPERFTMMFAPITRTFEMSYADVDFDNSIPTPKPYMRNKIILPNSLEENLSYLFEWQKAFKGDSFVYDYPLGRAHYGDLGYMKISQTIYRDVSYLSNLHLNGYISCQELRAGFPHNFPNYVMGEMLWKKTRSYEELIEEYFSALYGENWQSVVEYLEKLSIYSSCDYFNAIGSRQSDVLANHYYIAYNLADNFLPIIEENISKLLNSQKDEWKQLSYHREYVVKMAKALYLQATGKTRQAQDEWRNVLNYIRGHELLFQSNLDVYRVIEVAKNYAGFHL

SEQ ID NO: 809 - DNA, 342 bp, Streptococcus pneumoniae
atgaaatcaaaagaagaaataaatatgcttggttttacaattgtcgcttacgcaggagatgcaaggtcagatttgatggatgctttggcgtttgcgagagatggatattttgaacaggcaagagaattggttgagtctgcaaacgactcaatagtgtctgcccatcgagaacagactaatttattagcggaggaggcatatggagataattttgaagtgagctttattatgattcatggtcaagatactttgatgacaacgatgctattgtatgatcaggtaaagttttttattgatgaatatgaacgaattcgaaagattgaagaacatattggtttgcaa

SEQ ID NO: 810 - protein, 114 aa, Streptococcus pneumoniae
  PTS system, lactose-specific IIA component (lacF); Cellular location: outside; Similar to strain R6 sequence 15902467 (4.E-61)
MKSKEEINMLGFTIVAYAGDARSDLMDALAFARDGYFEQARELVESANDSIVSAHREQTNLLAEEAYGDNFEVSFIMIHGQDTLMTTMLLYDQVKFFIDEYERIRKIEEHIGLQ

SEQ ID NO: 811 - DNA, 1410 bp, Streptococcus pneumoniae
atggaaaatttacaggttaaagccttaccgaaggagtttttattaggaactgctaccgctgcttatcaagtagagggtgcaactagggtagatggcaaaggaataaatatgtgggatgtttatttgcaagaaaatagtccgttcttaccagatccagctagtgatttttattatcgttacgaagaggatatagctttggcggcagaacatggtttgcaggctttgcgtttatctatttcttgggttcgtatatttcctgatatagatggggatgctaatgtattagctgttcattattaccatagagtttttcagtcttgcttaaaacataatgtgattccgtttgtttctttacatcattttgattcgcctcagaaaatgttagaaacaggggattggttgaacagagagaatattgatcgtttcatacgatatgctcgcttttgtttccaagaatttacagaagtcaagcattggtttacaatcaatgaactgatgtctcttgctgcaggtcaatatataggaggtcagtttcctccaaatcatcattttcaattatctgaagcaattcaagcgaatcataatatgttgttggcgcatgctcttgcagtcctcgaatttcatcaattagggattgagggaaaggtaggttgtattcatgctttaaagccaggctatcctattgatgggcaaaaagaaaatattttggcagctaaacggtatgatgtttataataataaatttctattagatggaacttttttgggctactacagtgaggacacgctttttcacttgaatcaaatattggaagctaataattctagctttattattgaagatggtgatttagaaattatgaagagagctgcacctcttaatacgatgtttgggatgaattattatcgttcagaatttattcgtgaatacaaaggtgaaaatagacaagaatttaattcaacaggaataaaaggacagtcttcttttaaattaaatgctctaggtgaatttgtaaaaaaacctggtattccgacaacagattgggattggaatatttatcctcaagggttatttgatatgttgcttcgtatcaaagaagaatatcctcaacatccggtcatttatttaactgaaaatggtacagcccttaaagaagttaagccagagggcgagaatgatattattgatgacagtaagagaatccgttatattgagcaacatttacacaaagttttagaggctcgagatagaggagtcaatattcaaggctattttatatggtctttgcaagatcaattttcttgggcgaatggctacaataagcgatatggtcttttctttgttgattatgaaacacagaagagatatattaagaaaagtgctctttgggtaaaagggctaaaacggaat

SEQ ID NO: 812 - protein, 470 aa, Streptococcus pneumoniae
  6-phospho-beta-galactosidase (lacG); Cellular location: cytoplasm; Similar to strain R6 sequence 15902468 (0.E+01)
MENLQVKALPKEFLLGTATAAYQVEGATRVDGKGINMWDVYLQENSPFLPDPASDFYYRYEEDIALAAEHGLQALRLSISWVRIFPDIDGDANVLAVHYYHRVFQSCLKHNVIPFVSLHHFDSPQKMLETGDWLNRENIDRFIRYARFCFQEFTEVKHWFTINELMSLAAGQYIGGQFPPNHHFQLSEAIQANHNMLLAHALAVLEFHQLGIEGKVGCIHALKPGYPIDGQKENILAAKRYDVYNNKFLLDGTFLGYYSEDTLFHLNQILEANNSSFIIEDGDLEIMKRAAPLNTMFGMNYYRSEFIREYKGENRQEFNSTGIKGQSSFKLNALGEFVKKPGIPTTDWDWNIYPQGLFDMLLRIKEEYPQHPVIYLTENGTALKEVKPEGENDIIDDSKRIRYIEQHLHKVLEARDRGVNIQGYFIWSLQDQFSWANGYNKRYGLFFVDYETQKRYIKKSALWVKGLKRN

SEQ ID NO: 813 - DNA, 1677 bp, Streptococcus pneumoniae
atggataagctagtcgctgccattgaaaagcaacaagggaaatttgaaaaaatttctactaataactatatgatggctattaaagatggattcattgctactatgcctttaattatgttttcaagctttttgatgattattattatgattcctaaaaatttcggagtagagttaccgagtccagctattgtctggatgagaaaagtgtatatgttaaccatgggagttttgggtattattgtttcagggactgttggaaagtcattagttggaaatgttaacagaaaaatgcctcacggaaaggtaataaatgatatttctgcaatgttggcagccatatgtagttatctggtattaactgtaacgcttgtagttgatgagaagacgggatctacaagtttgtcgacaaactatttaggatctcaaggattgataacttcgtttgtcagtgcctttattactgtaaatgtttaccgattctgtattaagcgagacattactattcatttacctaaggaagttcctggggctatatcacaagcttttagagatattttccctttttcttttgttttacttattagtggtttgttagatattgtatctcggtttagtttagatgttccttttgcccaagtatttcaacaactattgactcctatttttaagggggcagaatcatatcctgctatgatgttgatttggtttatgtgtgctttgctttggtttgttggaattcatggaccatctattgtcttacctgctgttacagctttgcaactgagcaatatggaagagaatgctcaacttcttgcaaatgggcagttcccttatcattctttaacacctaatttcgggaattatatcgctgctattggaggaacgggggctacctttgttgtaccatttattttgattttctttatgcggtctaaacaattaaaatcggtaggtaaagctacaattactcctgttttatttgcggtaaatgaacctcttctatttggtatgcctgttattttgaatccctatctttttgtcccttttttgatgactccaccagtgaatgtatttctaggaaaggtctttattgatttctttggaatgaatggattttatatccagttaccttggacctttcctggtcccttgggattgttaattggaacgaattttcaacttatctcctttgtatttttatctttgattttagttgtcgacatattgatttatttgccattctgtagagcgtatgatagacagttactggtgaaagaagatattgcaagctcaaatgatattattttagaggaggatacaagtgaaataattcctggtgagatagatgaaataaaaagtaaggagttgaaagtactggttctttgtgcagggtctggaacaagtgcgcaattagccaatgcaattaacgagggggctaacttaacagaggttagagtgattgcgaattcaggagcgtacggagctcattatgatattatgggtgtttatgatttaattattctggccccacaagttcggagttattatagagagatgaaggtggatgcagaaagattaggtattcagatagttgctaccagaggaatggaatatattcatttaacaaagagtccaagtaaagccttacaatttgtattggagcattaccaagctgtg

SEQ ID NO: 814 - protein, 559 aa, Streptococcus pneumoniae
  PTS system, lactose-specific IIBC components (lacE); Cellular location: membrane; Similar to strain R6 sequence 15902469 (0.E+01)
MDKLVAAIEKQQGKFEKISTNNYMMAIKDGFIATMPLIMFSSFLMIIIMIPKNFGVELPSPAIVWMRKVYMLTMGVLGIIVSGTVGKSLVGNVNRKMPHGKVINDISAMLAAICSYLVLTVTLVVDEKTGSTSLSTNYLGSQGLITSFVSAFITVNVYRFCIKRDITIHLPKEVPGAISQAFRDIFPFSFVLLISGLLDIVSRFSLDVPFAQVFQQLLTPIFKGAESYPAMMLIWFMCALLWFVGIHGPSIVLPAVTALQLSNMEENAQLLANGQFPYHSLTPNFGNYIAAIGGTGATFVVPFILIFFMRSKQLKSVGKATITPVLFAVNEPLLFGMPVILNPYLFVPFLMTPPVNVFLGKVFIDFFGMNGFYIQLPWTFPGPLGLLIGTNFQLISFVFLSLILVVDILIYLPFCRAYDRQLLVKEDIASSNDIILEEDTSEIIPGEIDEIKSKELKVLVLCAGSGTSAQLANAINEGANLTEVRVIANSGAYGAHYDIMGVYDLIILAPQVRSYYREMKVDAERLGIQIVATRGMEYIHLTKSPSKALQFVLEHYQAV

SEQ ID NO: 815 - DNA, 1437 bp, Streptococcus pneumoniae
atgaataaaagtatgattcgttacctcctttcaaaattacttttgattgaagctgttcttcttttggttcctgttgcgattgctgtctattaccgtgaatcgagccaagtctttacagccctcttttcgaccatagggattctcgtattgttaggcggttcagggagtttacagaagccaaaaaatcaacggatttatgccaaggagggagtcttgatcgttgccctctgttggatcctttggtctttctttggtggtctcccctttgtcttttctgggcaaatccccagccttattgatgccttttttgaaattagttctggatttacaactactggagcaagtattttgaacgacgtttcggttctcagccgttccctcctcttctggcgaagttttacccacttgattggagggatgggagtgcttgtttttgcacttgctattatggacaatgccaaaaatagccacctagaggtgatgaaggctgaggttccaggtcctgtttttggcaaggttgtatccaaactaaaaaacactgcccagattctctatctcctttatctagctctcttctccctctttgtcatcatctattatctagccggtatgcctctctacgatagttttgttattgctatggggacagcgggaactggaggctttaccgtctataacgacggaattgcccactatggcagctcactgattacctatctggtcagtatcggagttctggtttttggagtaaatttcaacctctactactacctcatgctccgtcgcatcaaggccttctttggagatgaagagcttagggcttacttggtcattgtactggtttctacaggcttgattagcctcaacaccctctacctctacccagggttttcaaagagctttgaaatgaccttcttccaggtttccaacatcattacaacaactggttttggatatggagatattaccaactggcccctcttctcccagtttatcctccttttcctcatggcaatcggtggctctgctggatcaactgcaggtggactcaagattattcgaggcctcatcctttcaaaaattgccaaaaaccaaattttgtcaatcctatcgccccaccgtgttttgaccctccatgttaataaaacggtgattgacaaagatacccagcataagattctcaagtactttgtcatctatgctatgattttgctagcgcttatctttattgtcagcctagatagcaatgattttctggtcgtgaccagcgctgtctttagctgtttcaataatatcgggcctattctaggaaccacttctagtttctcaatctttagtcccatctcaaaaattctcctatcctttgcaatgattgcagggcgcttggagatttacccaatcctccttctctttatgaagagaacttggtctaagaga

SEQ ID NO: 816 - protein, 479 aa, Streptococcus pneumoniae
  potassium uptake protein, Trk family; Cellular location: membrane; Similar to strain R6 sequence 15902470 (0.E+01)
MNKSMIRYLLSKLLLIEAVLLLVPVAIAVYYRESSQVFTALFSTIGILVLLGGSGSLQKPKNQRIYAKEGVLIVALCWILWSFFGGLPFVFSGQIPSLIDAFFEISSGFTTTGASILNDVSVLSRSLLFWRSFTHLIGGMGVLVFALAIMDNAKNSHLEVMKAEVPGPVFGKVVSKLKNTAQILYLLYLALFSLFVIIYYLAGMPLYDSFVIAMGTAGTGGFTVYNDGIAHYGSSLITYLVSIGVLVFGVNFNLYYYLMLRRIKAFFGDEELRAYLVIVLVSTGLISLNTLYLYPGFSKSFEMTFFQVSNIITTTGFGYGDITNWPLFSQFILLFLMAIGGSAGSTAGGLKIIRGLILSKIAKNQILSILSPHRVLTLHVNKTVIDKDTQHKILKYFVIYAMILLALIFIVSLDSNDFLVVTSAVFSCFNNIGPILGTTSSFSIFSPISKILLSFAMIAGRLEIYPILLLFMKRTWSKR

SEQ ID NO: 817 - DNA, 1347 bp, Streptococcus pneumoniae
atgaaaattatccttgtcggagggggaaaagttggttttgccctctgtcgctccttggttgcagaaaagcatgatgttttgctgattgagcaagacgaagctgttctcaatcatattgtcagtcgctttgatatcattggtatccttggtaacggggccgattttgccattcttgagcaagccagcgtccaagattgtgatatctttatcgccctgactgagcacgatgaagtcaacatgattgcagcagttctagccaagaaaatgggagctaaagaaactatcgttcgggtgcggaaccctgaatattctaactcttatttcaaggaaaagaatattctcggtttttctcttatcgttaatcctgagctcttggctgcccgcgctatcgcgaatatcattgacttccccaacgccctgtctgtcgaacgctttgctggtggacgcgttagcctcatggaatttgtcgtcaagtccaccagcggtctttgccaaatgcccatttctgattttcgtaaaaaatttggtaatgtcattgtctgtgcgatagagagggatcatcaaattatcattccaagcggtgacatgactgtacaggataaagatagaatctttgtcactggtaaccgtgtcgatatgatactcttccataattattttaaatcacgcgccgtgaagagccttctcatcgttggggcaggtagaattgcctattatctacttggtattctcaaagatagtcgtatcgatacaaaagtcattgaaatcaatcctgaaatcgccagcttctttagcgagaaattcccaaatctctacatcgttcaaggagatggaaccgcaaaagatatcctgctggaagaaagtgctcaacactatgatgccgttgcgactctaacaggagtcgatgaggaaaatctgattacatctatgttccttgacagggtaggtgtacagaaaaatattactaaggtcaatcgtaccagtctcctcgagattatcaatgcgcctgatttttcaagtatcatcacacctaaaagcatcgctgtagatacgattatgcactttattcgtggtcgagttaatgcccagtattcagaccttcaagctatgcaccatctagccaatggccaaatcgaaaccctgcaattccatatcaaggaagccaataaaatgactgccaaacctctttctcaactgaaattgaaaaaaggggttcttattgcagccattattcgaaagggcaagactattttcccaactggggaggatatgttggaagttggagacaagctcctagtaacaaccttgttgccaaacatcaccaagatttatgacttgatcgcgagg

SEQ ID NO: 818 - protein, 449 aa, Streptococcus pneumoniae
  potassium uptake protein, Trk family; Cellular location: membrane; Similar to strain R6 sequence 15902471 (0.E+01)
MKIILVGGGKVGFALCRSLVAEKHDVLLIEQDEAVLNHIVSRFDIIGILGNGADFAILEQASVQDCDIFIALTEHDEVNMIAAVLAKKMGAKETIVRVRNPEYSNSYFKEKNILGFSLIVNPELLAARAIANIIDFPNALSVERFAGGRVSLMEFVVKSTSGLCQMPISDFRKKFGNVIVCAIERDHQIIIPSGDMTVQDKDRIFVTGNRVDMILFHNYFKSRAVKSLLIVGAGRIAYYLLGILKDSRIDTKVIEINPEIASFFSEKFPNLYIVQGDGTAKDILLEESAQHYDAVATLTGVDEENLITSMFLDRVGVQKNITKVNRTSLLEIINAPDFSSIITPKSIAVDTIMHFIRGRVNAQYSDLQAMHHLANGQIETLQFHIKEANKMTAKPLSQLKLKKGVLIAAIIRKGKTIFPTGEDMLEVGDKLLVTTLLPNITKIYDLIAR

SEQ ID NO: 819 - DNA, 873 bp, Streptococcus pneumoniae
atgataaaggatatacaaggagataaaatgaataataatttactggtattacaatcagactttggtctggttgatggtgcggtatcggctatgattggagtggctttagaagagtctccaaccttaaaaatacatcacttgacgcacgatatcacgccttataatatttttgaggggagctatcgtctctttcagacggtggattactggcctgagggaacgacgtttgtatcggttgtcgatccaggtgtcggttcgaaacgtaagagtgtagttgccaagactgcaaaaaatcaatacattgtcacgccagataatgggacgctttcctttatcaagaaacacgttggcattgtagccattcgtgagatttctgaggtggccaataggcgtcaaaacacagagcattcttataccttccacggtcgtgatgtctatgcctatactggtgctaaactggccagtggtcacattacttttgaggaagtagggccagagctcagtgtggaacagattgtagagcttccagtcgtagcgaccatcatagaagatcatctggtgaagggagccattgatattctggatgtgcgtttcggttcgctttggacctctatcacacgggaagaattttacaagctggaaccagaatttggtgatcgttttgaagtgaccatctatcatgctgatatgctggtctatcaaaatcaggttgtctatggcaaatcatttgcagatgtgagaattgggcaacccatcctttacatcaactctctctatcgtttaggtttggctatcaaccaaggttcctttgccaaggcctataatgtaggtgtcggttcatcttggaccattgaaataaagaaaatagaagga

SEQ ID NO: 820 - protein, 291 aa, Streptococcus pneumoniae
  conserved hypothetical protein; Cellular location: cytoplasm; Similar to strain R6 sequence 15902472 (e-167)
MIKDIQGDKMNNNLLVLQSDFGLVDGAVSAMIGVALEESPTLKIHHLTHDITPYNIFEGSYRLFQTVDYWPEGTTFVSVVDPGVGSKRKSVVAKTAKNQYIVTPDNGTLSFIKKHVGIVAIREISEVANRRQNTEHSYTFHGRDVYAYTGAKLASGHITFEEVGPELSVEQIVELPVVATIIEDHLVKGAIDILDVRFGSLWTSITREEFYKLEPEFGDRFEVTIYHADMLVYQNQVVYGKSFADVRIGQPILYINSLYRLGLAINQGSFAKAYNVGVGSSWTIEIKKIEG

SEQ ID NO: 821 - DNA, 546 bp, Streptococcus pneumoniae
atggaaatcaaatttacaattaaacaagttgttgctgtcggaattggcgctgccctctttgtcgtcatcgggatgatcaacattccaacccctgttccaaatacaagcatccagcttcagtatgcggtacaagcgctactttctattatttttggaccgattatcggtttgcttgtcgggttgattggtcatgcaatcaaggactctcttgttggttatggtctatggtggacttggattatcgctagcggactctttggtttagttgtgggactttttagaaagtacgttcgcgtgatcaatggtgtttttgactggaaagatattcttatttttaatctcattcaactacttgcaaatgcccttgtttggggtgtcttggcaccacttggagatgttgtgatttatcaagaagcggcagaaaaagtatttgcacaagggattgttgcgggaattgccaatggtgtatctgtagctattgcaggaactcttctcttacttgcctatgcaggaacccaaactcgtgcaggaagtttgaaaaaggac

SEQ ID NO: 822 - protein, 182 aa, Streptococcus pneumoniae
  conserved hypothetical protein; Cellular location: membrane; Similar to strain R6 sequence 15902473 (2.E-99)
MEIKFTIKQVVAVGIGAALFVVIGMINIPTPVPNTSIQLQYAVQALLSIIFGPIIGLLVGLIGHAIKDSLVGYGLWWTWIIASGLFGLVVGLFRKYVRVINGVFDWKDILIFNLIQLLANALVWGVLAPLGDVVIYQEAAEKVFAQGIVAGIANGVSVAIAGTLLLLAYAGTQTRAGSLKKD

SEQ ID NO: 823 - DNA, 255 bp, Streptococcus pneumoniae
atgaaaatcaaagagcaaactaggaagctagccgcaggttgctcaaaacagtgttttgagattgtggatagaactgacgaagtcgactcaaaacatggttttgaggttgtagatgaaactgacgaagtcagtaaccatacctacggcaaggcgaagctgacgtggtttgaagagattttcgaagagtataaaatgatggggaaggctgggcaactagtctttttcgatgtttatagattagttaggcaagtaagc

SEQ ID NO: 824 - protein, 85 aa, Streptococcus pneumoniae
  box element
MKIKEQTRKLAAGCSKQCFEIVDRTDEVDSKHGFEVVDETDEVSNHTYGKAKLTWFEEIFEEYKMMGKAGQLVFFDVYRLVRQVS

SEQ ID NO: 825 - DNA, 1680 bp, Streptococcus pneumoniae
atgaaagaagctataattgagtggaaggatttctctttccggtatgaaacacaacaagaaccgaccttgcaagggatagacttgaccatttacaagggagagaaagtcttaattgttggaccatctgggtcaggtaaatctaccttgggtcagtgtttgaatgggattattcccaatatttacaagggtcagacatatggagaatttttgataaagggtcaagtagcctttgatatgagcatctatgataagtctcatctggttagcacagttttgcaggatacagatgggcagtttattggcttgtctgtggcagaagatttggcgtttgctctggaaaatgatgtgacagccctagatgagatgaaaggtcgtgtttataaatgggctgaaaagctggaccttcttcctttactggatcagcgtcctcaggatttgtcaggtggacaaaagcagcgagtcagtctggctggtgtcttgattgatgaaagtccgattctcttgtttgatgagccactcgccaatctagatcccaagtcaggtcaggatattatcgaattgattgaccagattcataaggaagaggggacgacgactcttattatcgagcaccgtttggaggacgttctgcatcgccctgtggatcggattgtcttgataaacgatggtcgtatcctttttaatgggagccctgaccagttgcttgcgactgatttattgactcaaaatggaattcgagaacccctttatctaacgactctccgtcaattaggtgtggacttagtcaaggaagaacaattagcgaatctggataacttgtctatctcaaaaggtcaggttcagttgcagaatgaactggcaaaagaaaccccagcattgcagtcactctttagactagaggaagtatctttttcttatgatgatagaccgattttaaaatccctacatttagatattaaaaagggtgaaaagattgctattgtcggaaaaaatggagcagggaaatcaactctagccaaggctataagtagctttattcagacggaaggacgctatctttgggaaaaacaggatataaaaggcgattctgttgcagagcgggcggaacgagtaggatatgtgctacaaaatcctaatcaaatgatttcaaccaatatgatttttgatgaggtggctctagggctccgtttgcgaggtgtggatgagaaggaaattgaaacgagagtatatgaaaccttgaaaatctgtggactttatgaattccgtaattggcctatttctgccctgtcatttggtcagaaaaaacgtgtcaccattgcttcaattttggtcttaggagctgaaattattctcctagatgaaccgactgcaggtcaagatcagaagaactatactgagattatggaatttctcgaagagttacatcaaaaagggcataccattgtcatgattacccatgatatgcaattgatgctggattattcagaccgggtccttgtcatggtggatggagaattgattgccgatactgttccagccagtctgttgagcgatcctgagctgttagtaaaagccaatctaaaagaaacctccatctttaacttggctaagaaactagatgtggatccactggatttaacggcattttacaaagaaaggagagagggatgcaagctaaat

SEQ ID NO: 826 - protein, 560 aa, Streptococcus pneumoniae
  ABC transporter, ATP-binding protein; Cellular location: membrane; Similar to strain R6 sequence 15902474 (0.E+01)
MKEAIIEWKDFSFRYETQQEPTLQGIDLTIYKGEKVLIVGPSGSGKSTLGQCLNGIIPNIYKGQTYGEFLIKGQVAFDMSIYDKSHLVSTVLQDTDGQFIGLSVAEDLAFALENDVTALDEMKGRVYKWAEKLDLLPLLDQRPQDLSGGQKQRVSLAGVLIDESPILLFDEPLANLDPKSGQDIIELIDQIHKEEGTTTLIIEHRLEDVLHRPVDRIVLINDGRILFNGSPDQLLATDLLTQNGIREPLYLTTLRQLGVDLVKEEQLANLDNLSISKGQVQLQNELAKETPALQSLFRLEEVSFSYDDRPILKSLHLDIKKGEKIAIVGKNGAGKSTLAKAISSFIQTEGRYLWEKQDIKGDSVAERAERVGYVLQNPNQMISTNMIFDEVALGLRLRGVDEKEIETRVYETLKICGLYEFRNWPISALSFGQKKRVTIASILVLGAEIILLDEPTAGQDQKNYTEIMEFLEELHQKGHTIVMITHDMQLMLDYSDRVLVMVDGELIADTVPASLLSDPELLVKANLKETSIFNLAKKLDVDPLDLTAFYKERREGCKLN

SEQ ID NO: 827 - DNA, 723 bp, Streptococcus pneumoniae
atgcaagctaaattaatcggttaccagcatagagatactgtgattcatcgcttgtcaggagctgggaaacttctctttttcattctggtatcattggcggccatgattagctatgataccagaatgctcttgctgattgccatcttttcagtctttctcctctatttatcagaaattcgctttaaagatgtttcctttgtagccgtttttgcgacgatatttgccgttttaaacgttttgatggtctatctcttttctcccgagtatggggttggactttatggagagagaagtgtgatttggcagggaatcggtgtctacactctaaccagccaggagctcttttatctgctaaatttggccattaagtatctttgcaccattcctctggctattatctttttgatgacaacccatcctagtcagtttgcttccagtttaaatcaaattggtgtgccctataagattgcttattctgtcagcctgaccttgcgctatattccagatttgcaggaagaattctttactatcaagatgtctcaggaggcgcgtgggatggaattatccaagaaagcttctcttatgcaacgaatcaaaggcaatctgctcattattacgcccttgatttttagctcgctagaacgcattgataccattgcgactgccatggagttcgccgctttgggaaagagaaaaaacgcacatggtatagttatcaggcct

SEQ ID NO: 828 - protein, 241 aa, Streptococcus pneumoniae
  conserved hypothetical protein with frameshift (ABC transporter); Cellular location: membrane; Similar to strain R6 sequence 15902475 (e-151)
MQAKLIGYQHRDTVIHRLSGAGKLLFFILVSLAAMISYDTRMLLLIAIFSVFLLYLSEIRFKDVSFVAVFATIFAVLNVLMVYLFSPEYGVGLYGERSVIWQGIGVYTLTSQELFYLLNLAIKYLCTIPLAIIFLMTTHPSQFASSLNQIGVPYKIAYSVSLTLRYIPDLQEEFFTIKMSQEARGMELSKKASLMQRIKGNLLIITPLIFSSLERIDTIATAMEFAALGKRKNAHGIVIRP

SEQ ID NO: 829 - DNA, 105 bp, Streptococcus pneumoniae
ttgaaaaaaggagactatattaccttgctcttggcaaccttgtttttagtagttagtttactacttatcttgcagaatcagggacgattttacaacccttggaaa

SEQ ID NO: 830 - protein, 35 aa, Streptococcus pneumoniae
  hypothetical protein
MKKGDYITLLLATLFLVVSLLLILQNQGRFYNPWK

SEQ ID NO: 831 - DNA, 501 bp, Streptococcus pneumoniae
atgacaaatcacattgtattatttgaacctcaaattccacaaaatacgggcaatatcgcgcgtacttgcgctgcgaccaattctcccctccacatcatcaagcctatgggctttcctattgatgaccgcaagatgaagcgggctggattggattactgggataagctagagatttatttttacgagagtttggaagatttcatatctcagatgaagggaaaactctatctgatttcgaaattcgcggaaaaagtctattctgaggtggatttatcgactgacgaggaccattattttctctttggacgtgaagacaagggcttacctgaagattttatgcgagaacatcctgagaaggctctccgtattcccatgaatgatgaacatgtccgcagtctcaatgtgtctaataccgtctgcatgattgtctatgaggctcttcgccagcagaactttgcaggtcttgagctcgtccatacctatgaagtggataaattgaaa

SEQ ID NO: 832 - protein, 167 aa, Streptococcus pneumoniae
  spoU rRNA methylase family protein; Cellular location: cytoplasm; Similar to strain R6 sequence 15902476 (2.E-95)
MTNHIVLFEPQIPQNTGNIARTCAATNSPLHIIKPMGFPIDDRKMKRAGLDYWDKLEIYFYESLEDFISQMKGKLYLISKFAEKVYSEVDLSTDEDHYFLFGREDKGLPEDFMREHPEKALRIPMNDEHVRSLNVSNTVCMIVYEALRQQNFAGLELVHTYEVDKLK

SEQ ID NO: 833 - DNA, 216 bp, Streptococcus pneumoniae
ttggaaaggattcctctatctattctcactttttatatcccaaaagttccctcttactctattaaagaaaaacaaagcaagtggttacaatccggctataaatctatcaaaacagacaaggctattctttcgtcttctcccatccagactatactgtcggttgtggaatctcaccacatcagcttgcgctcacggacttctttaaagagaaggaaa

SEQ ID NO: 834 - protein, 72 aa, Streptococcus pneumoniae
  hypothetical protein; Cellular location: cytoplasm
MERIPLSILTFYIPKVPSYSIKEKQSKWLQSGYKSIKTDKAILSSSPIQTILSVVESHHISLRSRTSLKRRK

SEQ ID NO: 835 - DNA, 561 bp, Streptococcus pneumoniae
atgacaaacacacgtcgactttcgaccattgcaattctatcagccatctcatttgtgctgatgtactttgactttccgcttttaccagcggcatctttcctcaagatcgaatttagtatcttgccagtccttgtgggtctggtggtcatggatttgcctgctgctctaggagtgctcttgcttcgctcactcttgaaattgcttcttaacagccaaggagtgaatacttacattggtttgccgatgaatatcgtagctttgggagtttttgtcatcgtatttgctttgatttggaaaaaggaacggacaacccttcgtttcctactaggctctctagctggaactattggtttaaccttggccatgttggttctcaactatgtttatgctgttcctttgtacgctaagtttgctaactttgatattggaaaaattttgggactttccaactacctaatgaccatggtattaccttttaacttgattgaaggtgttatcttttccgtttcattctggttgttgtatgttctcttgaaaccaaccttaaaacattatgagaga

SEQ ID NO: 836 - protein, 187 aa, Streptococcus pneumoniae
  conserved hypothetical protein; Cellular location: membrane; Similar to strain R6 sequence 15902477 (e-101)
MTNTRRLSTIAILSAISFVLMYFDFPLLPAASFLKIEFSILPVLVGLVVMDLPAALGVLLLRSLLKLLLNSQGVNTYIGLPMNIVALGVFVIVFALIWKKERTTLRFLLGSLAGTIGLTLAMLVLNYVYAVPLYAKFANFDIGKILGLSNYLMTMVLPFNLIEGVIFSVSFWLLYVLLKPTLKHYER

SEQ ID NO: 837 - DNA, 648 bp, Streptococcus pneumoniae
atgagagataaacaaacatttttaatgaagggcagttttgcccttttacttttcgttattcttggctacatggtcaaattttaccctgaaatgttggtcaattttgaccaatcgattcagactgccattcgaggagacttaccagattatttgactattctttttcgagccctcacacgtctgattgatatcccagtgattatcacttgggttgtcattacagcttttgtcttttatcgtaagcgatggaagatagaaagtttcttcatgctgggaaatctggctttggcaggtcttttaatcgtgacctttaaaaatatctaccagcgcccacgaccagctattttacatctggtggaggagaagggattttccttcccaagtgggcattctctagctgtaacgctgatggtagggactttgattgttattcttagtcagcggattaaagatcaggtctggagaaaaatcgtacaaatcgtccttggcctctacctagtcagtgtgctggtatcaagagtctatctgggagttcattacccatcagacgtccttgccagtctctgtgtgggcttgggagtcctgtttatcgagtttcccttttatgacaagctccgcttccaatggcgatttaaaggcaaacagaag

SEQ ID NO: 838 - protein, 216 aa, Streptococcus pneumoniae
  PAP2 family protein; Cellular location: membrane; Feature of note: RGD motif; Similar to strain R6 sequence 15902478 (e-119)
MRDKQTFLMKGSFALLLFVILGYMVKFYPEMLVNFDQSIQTAIRGDLPDYLTILFRALTRLIDIPVIITWVVITAFVFYRKRWKIESFFMLGNLALAGLLIVTFKNIYQRPRPAILHLVEEKGFSFPSGHSLAVTLMVGTLIVILSQRIKDQVWRKIVQIVLGLYLVSVLVSRVYLGVHYPSDVLASLCVGLGVLFIEFPFYDKLRFQWRFKGKQK

SEQ ID NO: 839 - DNA, 387 bp, Streptococcus pneumoniae
atgaaagtcaatatagcagatcttcatctgactcaactatatttatcagaaaagaagttgcaagatattcagatgctttaccagtcggcagaaacaatccaagtcgatccaatcagtattcttgcctttggagattgtttgctgattacagatgggcatcacagggcttatcaggctttattggcaggtcgggatacgatttctgctgagtgggatagagatggtggtgatgaactatatcatctctatgcgcaagcttgcgaggaaagaaagatttactctgtttttgatttagaagatcgtatcctagctcaagatgggtatgaagcaaaatggtataactggtgtgatggttttaatcaagcagcaactcttttgttgaaaagg

SEQ ID NO: 840 - protein, 129 aa, Streptococcus pneumoniae
  hypothetical protein; Cellular location: membrane; Similar to strain R6 sequence 15902479 (5.E-72)
MKVNIADLHLTQLYLSEKKLQDIQMLYQSAETIQVDPISILAFGDCLLITDGHHRAYQALLAGRDTISAEWDRDGGDELYHLYAQACEERKIYSVFDLEDRILAQDGYEAKWYNWCDGFNQAATLLLKR

SEQ ID NO: 841 - DNA, 153 bp, Streptococcus pneumoniae
ttgtgttttgttccttattataaggtcaatcattgtgaggaagcttttgcttggtatcaggatgtgaacttggtttacctcgtagatggggtgaagcttccttacagtcaagccgaccttggaagccatgtattcctatttggatcggcatgg

SEQ ID NO: 842 - protein, 51 aa, Streptococcus pneumoniae
  hypothetical protein; Cellular location: cytoplasm; Similar to strain R6 sequence 15902480 (3.E-20)
MCFVPYYKVNHCEEAFAWYQDVNLVYLVDGVKLPYSQADLGSHVFLFGSAW

SEQ ID NO: 843 - DNA, 321 bp, Streptococcus pneumoniae
atgtattcctatttggatcggcatggtgagcttttttggattgaagtcaaggagaagggagaatggtttccaattggggatattacactatctcaggataatctccccattgtgattgggaattccgcttaccaacatcgaggacttggaaaaaagattctaagtgctttgattgaattggctcgagtaaaaggatggaaagaattgagagtcaagaaaatctacacctacaatcatgcttctaggaggtgtttcaagtcgcttggatttgtggaaaatggagcaacagaaaaaggaatgagttttatattggaattagtc

SEQ ID NO: 844 - protein, 107 aa, Streptococcus pneumoniae
  conserved domain protein; Cellular location: cytoplasm; Similar to strain R6 sequence 15902480 (1.E-58)
MYSYLDRHGELFWIEVKEKGEWFPIGDITLSQDNLPIVIGNSAYQHRGLGKKILSALIELARVKGWKELRVKKIYTYNHASRRCFKSLGFVENGATEKGMSFILELV

SEQ ID NO: 845 - DNA, 600 bp, Streptococcus pneumoniae
atgaggagaaacgctttggaattagaagtatttgctgggcaagaaaaaagtgaactatctatgattgaggtagcgcgtgctatcttggaacttcgtggtcgcgatcatgagatgcattttagcgatcttgtaaacgaaattcaaaactaccttggaacatcaaacagcgatatccgcgaagctttgcctttgttctacacagagttgaactttgacggtagcttcatctcacttggggacaacaaatggggtcttcgttcatggtatggtgtggacgaaatcgacgaagaaatcatcgctcttgaagaaaatgacgacgatgaagtagcaccaaaagctaagaaaaaacgtgtcaatgcctttatggatggtgattcagatgccattgactacaatgcagatgatccagaagacgaagatgcatacgaagcagatccagctctttcatacgatgatgaaaatccagatgatgaaaaaaatgaagtggaagcttatgatgcagaaatcaacgaaatcgctccagatgacttgggagaagatgtggatctcaacgaagacgacgacgagttttcagatgacgatgctgaaaccagcgaggaa

SEQ ID NO: 846 - protein, 200 aa, Streptococcus pneumoniae
  DNA-directed RNA polymerase, delta subunit, putative; Cellular location: cytoplasm; Similar to strain R6 sequence 15902481 (e-115)
MRRNALELEVFAGQEKSELSMIEVARAILELRGRDHEMHFSDLVNEIQNYLGTSNSDIREALPLFYTELNFDGSFISLGDNKWGLRSWYGVDEIDEEIIALEENDDDEVAPKAKKKRVNAFMDGDSDAIDYNADDPEDEDAYEADPALSYDDENPDDEKNEVEAYDAEINEIAPDDLGEDVDLNEDDDEFSDDDAETSEE

SEQ ID NO: 847 - DNA, 135 bp, Streptococcus pneumoniae
gtgttcctgactttgtcagtcttatctacaacctcaaaacagtgttttgagcagcctacggctagtttcctagcttgctctttgattttcattgagtataaaatacaagaagataacttcttgaaaaaacaaaaa

SEQ ID NO: 848 - protein, 45 aa, Streptococcus pneumoniae
  box element
MFLTLSVLSTTSKQCFEQPTASFLACSLIFIEYKIQEDNFLKKQK

SEQ ID NO: 849 - DNA, 1605 bp, Streptococcus pneumoniae
atgtctacgaaatatatttttgtaactggtggtgtggtatcgtccattgggaaagggattgtggcagcgagtctaggccgtctcttgaaaaatcgtggtctcaaagtaaccattcaaaagtttgacccttatatcaatattgatccgggaaccatgagtccttaccagcacggggaagtttttgtgacagatgacggagctgagacagatttggacttgggtcactatgaacgtttcatcgatatcaatctcaacaaatattccaacgtgacaactgggaaaatttacagtgaagttcttcgtaaagaacgccgtggagaataccttggggcaactgttcaagtcattcctcatatcacagatgctttgaaagaaaaaatcaagcgtgccgctctaacgaccgactctgatgtcattatcacagaggttggtggaacagtaggagatatcgagtccttgccattcctagaggctcttcgtcagatgaaggcagatgtgggtgcggataatgtcatgtatatccatacaaccttgcttccttacctcaaggctgctggtgaaatgaaaaccaaaccaacccaacactctgtcaaagaattgcgtggcttgggaatccaaccaaatatgttggttattcgtacagaagagccagctggtcaaggaattaaaaataaactggcccagttctgtgatgtggcaccagaagccgttatcgaatcgttggatgttgaacacctttaccaaattccactgaacttgcaggcacaagggatggaccaaattgtttgtgatcatttgaaattagacgcaccagcagcggatatgacagaatggtcagccatggtggacaaggtcatgaacctcaagaaacaagttaagatttcccttgttggtaagtatgtggagttgcaagatgcctatatctcagtggtcgaagccttgaaacactctggctatgtcaatgatgcagaagttaaaatcaattgggtcaatgccaatgatgtgacagcagagaatgtagcagaactcttgtctgatgcggacgggatcatcgtaccaggtggttttggtcaacgtggtacagaagggaaaatccaagccatccgctatgcgcgtgaaaatgatgttccaatgttgggagtctgcttgggaatgcagttgacatgtatcgagtttgctcgtcacgttttaggtcttgaaggtgccaattctgcagagcttgcaccagaaacaaaataccctatcattgatatcatgcgtgatcagattgatattgaggatatgggtggaacccttcgtttgggactttatccgtctaagttgaaacgtggctctaaggctgctgctgcttatcacaatcaagaagtggtgcaacgccgtcaccgtcaccgttatgagtttaataatgccttccgtgagcagtttgaggcagcaggttttgtcttttcaggagtttctccagacaatcgtttggtagaaatcgtggaaattcctgaaaataaattctttgtagcttgtcagtatcaccctgaactgtcaagccgtccaaaccgaccagaagaactctacactgcctttgttactgcagcagttgagaacagcaat

SEQ ID NO: 850 - protein, 535 aa, Streptococcus pneumoniae
  CTP synthase (pyrG); Cellular location: cytoplasm; Similar to strain R6 sequence 15902482 (0.E+01)
MSTKYIFVTGGVVSSIGKGIVAASLGRLLKNRGLKVTIQKFDPYINIDPGTMSPYQHGEVFVTDDGAETDLDLGHYERFIDINLNKYSNVTTGKIYSEVLRKERRGEYLGATVQVIPHITDALKEKIKRAALTTDSDVIITEVGGTVGDIESLPFLEALRQMKADVGADNVMYIHTTLLPYLKAAGEMKTKPTQHSVKELRGLGIQPNMLVIRTEEPAGQGIKNKLAQFCDVAPEAVIESLDVEHLYQIPLNLQAQGMDQIVCDHLKLDAPAADMTEWSAMVDKVMNLKKQVKISLVGKYVELQDAYISVVEALKHSGYVNDAEVKINWVNANDVTAENVAELLSDADGIIVPGGFGQRGTEGKIQAIRYARENDVPMLGVCLGMQLTCIEFARHVLGLEGANSAELAPETKYPIIDIMRDQIDIEDMGGTLRLGLYPSKLKRGSKAAAAYHNQEVVQRRHRHRYEFNNAFREQFEAAGFVFSGVSPDNRLVEIVEIPENKFFVACQYHPELSSRPNRPEELYTAFVTAAVENSN

SEQ ID NO: 851 - DNA, 1344 bp, Streptococcus pneumoniae; identical to SEQ ID NO: 517

SEQ ID NO: 852 - protein, 448 aa, Streptococcus pneumoniae; identical to SEQ ID NO: 486
  IS1380-Spn1, transposase; Cellular location: cytoplasm; Similar to strain R6 sequence 15904024 (e-149)

SEQ ID NO: 853 - DNA, 1629 bp, Streptococcus pneumoniae
atgtccattaattggcaggaaattttatttcactttttaggtggtctggggctattcttatatagcatcaagaccatgggagacggtttacaacaagctgctggagatcgccttcgtttttacattgacaaatatactagtaatcctttctttggagttctggttggtattgggatgactgctctaattcagtctagttctggtgtaacagttatcacagtcggcctggtcagtgccggtctcttaaccttacgtcaggctatcgggattgtcatgggtgctaatattgggacaactgtcacatcctttctcatcggttttaaattaggtaactatgccctacctatgctctttatcggtgccgtctgtcttttttttacgaaaaatcggacagtcaataatatcggacgcatcctctttggtgtcggtggtatcttttttgccctcaatctcatgagcggcgcaatggctccactcaaggatttacaggtctttaaggactatatgattgagctaagtaagaatcctgttttgggtgtctttgtcggtactggcttgaccttgctaattcaagcttcttcggctaccattgggattttacaaaacctctacgccggcaatctaattgatctacagggagctttgccagttctatttggtgacaatatcgggacaaccattacagccatcattgcctctttaggggctaatattgcagctaaacgggtagcaggagctcatgttgccttcaacgttatcggaacagttgtctgcgttatttttctagttccttttactgtcctgattcattggtttgaagctacgctaaatctagcaccggaaatgaccatcgcctttgctcacggaacctttaatattaccaacaccattgtccaatttccatttatcggagctctggcttactttgtaaccaagattattcctggagaggacgaggttgtcaaatacgaacccttatatcttgatgaacatttcatcaaacaggccccatctatcgctctaggaaatgctaagaaagagctcttgcacttaggaaactacgctgctaaagcctttgacctttcctataagtacatcattgacttggatgaaaaagttgctgaaaaagggcataaaaccgaagaagcaattaacaccatcgatgagcaattaacacgttatctcattgccctttcaagcgaagctctcagccaaaaagaaagtgaagtgcttaccaatatccttgattcctcccgtgatttggaacggattggagaccacacggaggctctactcaatctgactgactatcttcaacggaaaaatgttgaattttctgatgccgccttgaaagaattagaggaagtttaccgccaaactagtgactttatcaaagatgctctggatagtgtggaaaacaatgatattgaaaaagcacgcagtcttgtagaacgtcatgaagcaatcaataagatagaacgtgttctcagaaaaacccacatcaaacgcctcaacaaaggcgaatgttcaacacaagctggggtcaactttatcgacatcatctcacactacactcgtgtatcagaccacgctatgaaccttgctgaaaaggtttttgcagaacaaatc

SEQ ID NO: 854 - protein, 543 aa, Streptococcus pneumoniae
  Na/Pi cotransporter II-related protein; Cellular location: membrane; Similar to strain R6 sequence 15902483 (0.E+01)
MSINWQEILFHFLGGLGLFLYSIKTMGDGLQQAAGDRLRFYIDKYTSNPFFGVLVGIGMTALIQSSSGVTVITVGLVSAGLLTLRQAIGIVMGANIGTTVTSFLIGFKLGNYALPMLFIGAVCLFFTKNRTVNNIGRILFGVGGIFFALNLMSGAMAPLKDLQVFKDYMIELSKNPVLGVFVGTGLTLLIQASSATIGILQNLYAGNLIDLQGALPVLFGDNIGTTITAIIASLGANIAAKRVAGAHVAFNVIGTVVCVIFLVPFTVLIHWFEATLNLAPEMTIAFAHGTFNITNTIVQFPFIGALAYFVTKIIPGEDEVVKYEPLYLDEHFIKQAPSIALGNAKKELLHLGNYAAKAFDLSYKYIIDLDEKVAEKGHKTEEAINTIDEQLTRYLIALSSEALSQKESEVLTNILDSSRDLERIGDHTEALLNLTDYLQRKNVEFSDAALKELEEVYRQTSDFIKDALDSVENNDIEKARSLVERHEAINKIERVLRKTHIKRLNKGECSTQAGVNFIDIISHYTRVSDHAMNLAEKVFAEQI

SEQ ID NO: 855 - DNA, 108 bp, Streptococcus pneumoniae
gtgattatcatggttctagagtttgataaaaaactacagaatataaagcgctttcttgaaaacaacaaaatcaatcttttaggaggagaaaatgaagaatccattttt

SEQ ID NO: 856 - protein, 36 aa, Streptococcus pneumoniae
  hypothetical protein; Cellular location: cytoplasm
MIIMVLEFDKKLQNIKRFLENNKINLLGGENEESIF

SEQ ID NO: 857 - DNA, 4977 bp, Streptococcus pneumoniae
atgaagaatccattttttgaaagacgttgtcgttacagtattcgtaagttatcagtaggagcctgctcgctgatgattggtgctgttttatttgctggtccagccttggctgaagaaactgcagttcctgaaaatagcggagctaatacagagcttgtttcaggagagagtgagcattcgaccaatgaagctgataagcagaatgaaggggaacatgctagagaaaacaagctagaaaaggcagaaggagtagcgatagcatctgaaactgcttcgccagcaagcaatgaagctgcaactactgaaactgcagaagcagctagcgcagctaaaccagaggaaaaagcaagtgaggtggttgcagaaacaccatctgcagaagcaaaacctaagtctgacaaggaaacagaagcaaagcccgaagcaactaaccaaggggatgagtctaaaccagcagcagaagctaataagactgaaaaagaagtccagccagatgtccctaaaaatacagaaaaaacattaaaaccaaaggaaatcaaatttaattcttgggaagaattgttaaaatgggaaccaggtgctcgtgaagatgatgctattaaccgcggatctgttgtcctcgcttcacgtcggacaggtcatttagtcaatgaaaaagctagcaaggaagcaaaagttcaagccttatcaaacaccaattctaaagcaaaagaccatgcttctgttggtggagaagagttcaaggcctatgcttttgactattggcaatatctagattcaatggtcttctgggaaggtctcgtaccaactcctgacgttattgatgcaggtcaccgtaacggggttcctgtatacggtacactcttcttcaactggtctaatagtattgcagatcaagaaagatttgctgaagctttgaagcaagacgcagatggtagcttcccaattgcccgtaaattggtagacatggccaagtattatggctatgatggctatttcatcaaccaagaaacaactggagatttggttaaacctcttggagaaaagatgcgccagtttatgctctatagcaaggaatatgctgctaaggtaaaccatccaatcaagtattcttggtacgatgccatgacctataactatggacgttatcatcaagatggtttgggagaatacaactaccaattcatgcaaccagaaggagataaggttccggcagataacttctttgctaactttaactgggataaggctaaaaatgattacactattgcaactgccaactggattggtcgtaatccttatgatgtatttgcaggtttggaattgcaacagggtggttcctacaagacaaaggttaagtggaatgacattttagacgaaaatgggaaattgcgcctttctcttggtttatttgccccagataccattacaagtttaggaaaaactggtgaagattatcataaaaatgaagatatcttctttacaggttatcaaggagaccctactggccaaaaaccaggtgacaaagattggtatggtattgctaacctagttgcggaccgtacgccagcggtaggtaatacttttactacttcttttaatacaggtcatggtaaaaaatggttcgtagatggtaaggtttctaaggattctgagtggaattatcgttcagtatcaggtgttcttccaacatggcgctggtggcagacttcaacaggggaaaaacttcgtgcagaatatgattttacagatgcctataatggcggaaattcccttaaattctctggtgatgtagccggtaagacagatcaggatgtgagactttattctactaagttagaagtaactgagaagaccaaacttcgtgttgcccacaagggaggaaaaggttctaaagtttatatggcattctctacaactccagactacaaattcgatgatgcagatgcatggaaagagctaaccctttctgacaactggacaaatgaagaatttgatcttagctcactagcgggtaaaaccatctatgcagtcaaactatttttcgagcatgaaggtgctgtaaaagattatcagtttaacctaggacaattaactatctcggacaatcaccaagagccacaatcgccgacaagcttttctgtagtgaaacaatctcttaaaaatgcccaagaagcggaagcagttgtgcaatttaaaggcaacaaggatgcagatttctatgaagtttatgaaaaagatggagacagctggaaattactaactggctcatcttctacaactatttatctaccaaaagttagccgctcagcaagtgctcagggtacaactcaagaactgaaggttgtagcagtcggtaaaaatggagttcgttcagaagctgcaaccacaacctttgattggggtatgactgtaaaagataccagcctaccaaaaccactagctgaaaatatcgttccaggtgcaacagttattgatagtactttccctaagactgaaggtggagaaggtattgaaggtatgttgaacggtaccattactagcttgtcagataaatggtcttcagctcagttgagtggtagtgtggatattcgtttgaccaagccacgtaccgttgttagatgggtcatggatcatgcaggagctggtggtgagtctgttaacgatggcttgatgaacactaaagactttgacctttattataaagatgcagatggtgagtggaagctagctaaggaagtccgtggtaacaaagcacacgtgacagatatcactcttgataaaccaatcactgctcaagactggcgcttgaatgttgtcacttctgacaatggaactccatggaaggctattcgtatctataactggaaaatgtatgaaaagcttgatactgagagtgtcaatattccgatggccaaggctgcagcccgttctctaggcaataacaaggtacaagttggctttgcagatgtaccggctggagcaactattaccgtttatgataatccaaattctcaaactccgctcgcaaccttgaagagcgaagttggaggagacctagcaagtgcaccattggatttgacaaatcaatctggtcttctttattatcgtacccagttgccaggcaaggaaattagtaatgtcctagcagtttccgttccaaaagatgacagaagaatcaagtcagtcagcctagaaacaggacctaagaaaacaagctacgccgaaggggaggatttggaccttagaggtggtgttcttcgagttcagtatgaaggaggaactgaggacgaactcattcgcctaactcacgcaggtgtatcagtatcaggttttgatacgcatcataagggagaacagaatcttactctccaatatttgggacaaccggtaaatgctaatttgtcagtgactgtcactggccaagacgaagcaagtccgaaaactattttgggaattgaagtaagtcaggaaccgaaaaaagattacctagttggtgatagcttagacttgtctgaaggacgctttgcagtggcttatagcaatgacaccatggaagaacattcctttactgatgagggagttgaaatttctggttacgatgctcaaaagactggtcgtcaaaccttgacgcttcattaccaaggccatgaagttagctttgatgttttggtatctccaaaagcagcattgaacgatgagtacctcaaacaaaaattagcagaagttgaagctgctaagaacaaggtggtctataactttgcttcatcagaagtaaaagaagccttcttgaaagcaattgaagcggccgaacaagtgttgaaagaccatgaaactagcacccaagatcaagtcaatgaccgacttaataaattgacagaagctcataaagctctgaatggtcaagagaaatttacggaagaaaagacagagcttgatcgcttaacaggtgaggttcaagaactcttggctgccaaaccaaaccatccttcaggttctgccctagctccgcttcttgagaaaaacaaggccttggttgaaaaagtagatttgagtccagaagagcttacaacagcgaaacagagtctaaaagatctggttgctttattgaaagaagacaagccagcagtcttttctgatagtaaaacaggtgttgaagtacacttctcaaataaagagaagactgtcatcaagggtttgaaagtagagcgtgttcaagcaagtgctgaagagaagaaatactttgctggagaagatgctcatgtctttgaaatagaaggtttggatgaaaaaggtcaagatgttgatctctcttatgcttctattgtgaaaatcccaattgaaaaagataagaaagttaagaaagtatttttcttacctgaaggcaaagaggcagtagaattggcttttgaacaaacggatagtcatgttatctttacagcacctcactttactcattatgcctttgtttatgaatctgctgaaaaaccacaacctgctaaaccagcaccacaaaacacagtccttccaaaacctacttatcaaccgacttctgatcaacaaaaggctcctaaattggaagttcaagaggaaaaggttgcctttcatcgtcaagagcatgaaaatactgagatgctagttggggaacaacgagtcatcatacagggacgagatggactgttaagacatgtctttgaagttgatgaaaacggtcagcgtcgtcttcgttcaacagaagtcatccaagaagcgattccagaaattgttgaaattggaacaaaagtaaaaacagtaccagcagtagtagctacacaggaaaaaccagctcaaaatacagcagttaaatcagaagaagcaagcaaacaattgccaaatacaggaacagctgatgctaatgaagccctaatagcaggcttagccagccttggtcttgctagtttagccttgaccttgagacggaaaagagaagataaagat

SEQ ID NO: 858 - protein, 1659 aa, Streptococcus pneumoniae
  endo-beta-N-acetylglucosaminidase, putative; Cellular location: Peptidoglycan-bound (LPXTG); Similar to strain R6 sequence 15902484 (0.E+01)
MKNPFFERRCRYSIRKLSVGACSLMIGAVLFAGPALAEETAVPENSGANTELVSGESEHSTNEADKQNEGEHARENKLEKAEGVAIASETASPASNEAATTETAEAASAAKPEEKASEVVAETPSAEAKPKSDKETEAKPEATNQGDESKPAAEANKTEKEVQPDVPKNTEKTLKPKEIKFNSWEELLKWEPGAREDDAINRGSVVLASRRTGHLVNEKASKEAKVQALSNTNSKAKDHASVGGEEFKAYAFDYWQYLDSMVFWEGLVPTPDVIDAGHRNGVPVYGTLFFNWSNSIADQERFAEALKQDADGSFPIARKLVDMAKYYGYDGYFINQETTGDLVKPLGEKMRQFMLYSKEYAAKVNHPIKYSWYDAMTYNYGRYHQDGLGEYNYQFMQPEGDKVPADNFFANFNWDKAKNDYTIATANWIGRNPYDVFAGLELQQGGSYKTKVKWNDILDENGKLRLSLGLFAPDTITSLGKTGEDYHKNEDIFFTGYQGDPTGQKPGDKDWYGIANLVADRTPAVGNTFTTSFNTGHGKKWFVDGKVSKDSEWNYRSVSGVLPTWRWWQTSTGEKLRAEYDFTDAYNGGNSLKFSGDVAGKTDQDVRLYSTKLEVTEKTKLRVAHKGGKGSKVYMAFSTTPDYKFDDADAWKELTLSDNWTNEEFDLSSLAGKTIYAVKLFFEHEGAVKDYQFNLGQLTISDNHQEPQSPTSFSVVKQSLKNAQEAEAVVQFKGNKDADFYEVYEKDGDSWKLLTGSSSTTIYLPKVSRSASAQGTTQELKVVAVGKNGVRSEAATTTFDWGMTVKDTSLPKPLAENIVPGATVIDSTFPKTEGGEGIEGMLNGTITSLSDKWSSAQLSGSVDIRLTKPRTVVRWVMDHAGAGGESVNDGLMNTKDFDLYYKDADGEWKLAKEVRGNKAHVTDITLDKPITAQDWRLNVVTSDNGTPWKAIRIYNWKMYEKLDTESVNIPMAKAAARSLGNNKVQVGFADVPAGATITVYDNPNSQTPLATLKSEVGGDLASAPLDLTNQSGLLYYRTQLPGKEISNVLAVSVPKDDRRIKSVSLETGPKKTSYAEGEDLDLRGGVLRVQYEGGTEDELIRLTHAGVSVSGFDTHHKGEQNLTLQYLGQPVNANLSVTVTGQDEASPKTILGIEVSQEPKKDYLVGDSLDLSEGRFAVAYSNDTMEEHSFTDEGVEISGYDAQKTGRQTLTLHYQGHEVSFDVLVSPKAALNDEYLKQKLAEVEAAKNKVVYNFASSEVKEAFLKAIEAAEQVLKDHETSTQDQVNDRLNKLTEAHKALNGQEKFTEEKTELDRLTGEVQELLAAKPNHPSGSALAPLLEKNKALVEKVDLSPEELTTAKQSLKDLVALLKEDKPAVFSDSKTGVEVHFSNKEKTVIKGLKVERVQASAEEKKYFAGEDAHVFEIEGLDEKGQDVDLSYASIVKIPIEKDKKVKKVFFLPEGKEAVELAFEQTDSHVIFTAPHFTHYAFVYESAEKPQPAKPAPQNTVLPKPTYQPTSDQQKAPKLEVQEEKVAFHRQEHENTEMLVGEQRVIIQGRDGLLRHVFEVDENGQRRLRSTEVIQEAIPEIVEIGTKVKTVPAVVATQEKPAQNTAVKSEEASKQLPNTGTADANEALIAGLASLGLASLALTLRRKREDKD

SEQ ID NO: 859 - DNA, 1194 bp, Streptococcus pneumoniae
atggcaaaacttactgttaaagacgttgacttgaaaggtaaaaaagtcctcgttcgtgttgacttcaacgtaccattgaaagatggcgtaatcactaacgataaccgtatcacagcagctcttccaactattaagtacatcatcgaacaaggtggacgtgcaattcttttctctcaccttggacgtgtgaaagaagaagctgataaagctggtaaatcacttgctcctgtagcagctgacttggcagcaaaacttggtcaagatgttgttttcccaggtgtcactcgtggtgctgaattagaagcggcaatcaacgctcttgaagatggacaagttctcttggttgaaaacactcgttacgaagatgttgacggcaagaaagaatctaaaaacgatcctgaacttggtaaatactgggcatcacttggagatggtatcttcgtaaacgatgcattcggtacagctcaccgtgcacacgcatctaacgttggtatctcagcaaacgttgaaaaagcagttgctggtttccttcttgaaaacgaaattgcctacatccaagaagcagttgaaactccagaacgtccattcgtggctatccttggtggttcaaaagtttcagacaagatcggtgttatcgaaaacttgcttgaaaaagctgataacgtccttatcggtggtgggatgacttacacattctacaaagcacaaggtatcgaaatcggtaactcacttgtagaagaagacaaattggatgttgcgaaagctcttcttgaaaaagcaaatggtaaattgatcttgccagttgactcaaaagaagctaacgcatttgctggttacactgaagtgcgtgacactgaaggtgaagcagtttctgaaggcttccttggtcttgacatcggtccaaaatctatcgccaaatttgacgaagctttgactggtgccaaaacagtcgtatggaacggacctatgggtgtatttgaaaacccagatttccaagctggtacaatcggtgtgatggacgctatcgtgaaacaaccaggagttaaatcaatcatcggtggtggtgactcagctgccgcagcgattaaccttggccgtgcagacaagttctcatggattagtacgggtggtggagcatcaatggaacttcttgaaggtaaggttcttccaggacttgcagccttgacagaaaaa

SEQ ID NO: 860 - protein, 398 aa, Streptococcus pneumoniae
  phosphoglycerate kinase (pgk); Cellular location: cytoplasm; Similar to strain R6 sequence 15902485 (0.E+01)
MAKLTVKDVDLKGKKVLVRVDFNVPLKDGVITNDNRITAALPTIKYIIEQGGRAILFSHLGRVKEEADKAGKSLAPVAADLAAKLGQDVVFPGVTRGAELEAAINALEDGQVLLVENTRYEDVDGKKESKNDPELGKYWASLGDGIFVNDAFGTAHRAHASNVGISANVEKAVAGFLLENEIAYIQEAVETPERPFVAILGGSKVSDKIGVIENLLEKADNVLIGGGMTYTFYKAQGIEIGNSLVEEDKLDVAKALLEKANGKLILPVDSKEANAFAGYTEVRDTEGEAVSEGFLGLDIGPKSIAKFDEALTGAKTVVWNGPMGVFENPDFQAGTIGVMDAIVKQPGVKSIIGGGDSAAAAINLGRADKFSWISTGGGASMELLEGKVLPGLAALTEK

SEQ ID NO: 861 - DNA, 525 bp, Streptococcus pneumoniae
atgagttattttaaaaaatataaattcgataaatcccagttcaaacttggtatgcgaacctttaaaacaggtattgctgtttttctagttctcttgatttttggcttttttggctggaaaggtcttcaaattggtgctttgacagccgtttttagcctgagggagagttttgatgagagtgttcattttgggacttcgcgtattctaggaaatagtatcggtggactctatgccttggtcttcttcttattaaatacctttttccacgaagccttttgggtgaccttggtagttgttccaatctgcaccatgttaaccattatgacaaatgtagccatgaataacaaagcaggggttattggtggtgtagcagctatgttaatcattaccctatcaattccaagtggtgagacaattttgtacgtgtttgtgcgtgtattagaaacgtttatgggagtttttgtcgcaattatcgtaaattacgatattgatcgtattcgtctctttttagagaaaaaagaaaaa

SEQ ID NO: 862 - protein, 175 aa, Streptococcus pneumoniae
  conserved domain protein; Cellular location: membrane; Similar to strain R6 sequence 15902486 (1.E-96)
MSYFKKYKFDKSQFKLGMRTFKTGIAVFLVLLIFGFFGWKGLQIGALTAVFSLRESFDESVHFGTSRILGNSIGGLYALVFFLLNTFFHEAFWVTLVVVPICTMLTIMTNVAMNNKAGVIGGVAAMLIITLSIPSGETILYVFVRVLETFMGVFVAIIVNYDIDRIRLFLEKKEK

SEQ ID NO: 863 - DNA, 354 bp, Streptococcus pneumoniae
atgaaggaaaaagaatttcgccgaaatatggctgtttttcctatcggcagtgttatgaagttgaccgatctatcggcgcgtcagattcgttattatgaagatcaagagttgatcaagcccgatcgaaacgaaggaaatcgtcgcatgtattccttgaatgacatggatcgtctgcttgaaatcaaagattatatctctgaaggttataatatcgctgccattaagaaaaaatatgctgaacgtgaagcgaaatccaagaaagcggttagtcagactgaagtacgtcgtgcacttcacaatgaactcctccaacaggggcgttttgcttcagtacagtcaccttttggtcgcggt

SEQ ID NO: 864 - protein, 118 aa, Streptococcus pneumoniae
  transcriptional regulator, MerR family; Cellular location: cytoplasm; Similar to strain R6 sequence 15902487 (2.E-63)
MKEKEFRRNMAVFPIGSVMKLTDLSARQIRYYEDQELIKPDRNEGNRRMYSLNDMDRLLEIKDYISEGYNIAAIKKKYAEREAKSKKAVSQTEVRRALHNELLQQGRFASVQSPFGRG

SEQ ID NO: 865 - DNA, 1344 bp, Streptococcus pneumoniae
atgccaatcacagctgcagatattcgtcgtgaagtcaaggaaaaaaatgttacctttattcgtcttatgttctcagatattttgggaaccatgaaaaacgtcgaaattcctgctacagatgaacagttagataaggtcttgtcgaacaaggttatgtttgatggatcttctattgaaggttttgtacgtatcaatgagtcggatatgtacttgtacccggacttggatacatggacagtcttcccttggggagatgaaaatggaagtgttgcaggtctgatctgtgatgtctatacaacagaaggtgaaccatttgcgggtgaccctcgtggtaatttgaaacgagctcttcgtcacatggaagaagttggattcaaatccttcaaccttggtccagagccagaattcttcctatttaagttggatgaaaatggggacccaacacttgaagtgaatgacaagggtggctactttgacttggcacctactgaccttgcggacaacacacgtcgtgagattgtgaatgtcttgaccaaaatgggatttgaagtagaagcgagtcaccacgaggttgcggttggacagcatgagattgactttaagtacgatgaagttctccgtgcttgtgataagattcaaatctttaagcttgttgttaaaaccattgctcgcaaacacggactttacgcaacatttatggcgaagccaaaatttggtattgctggatcaggtatgcactgtaatatgtccttgtttgatgcagaaggaaataacgccttctttgatccaaatgatccaaaaggaatgcagttgtcagaaacagcttaccatttcctaggcggtttgatcaagcatgcttacaactatactgccatcatgaacccaacagttaactcatacaaacgtttggttccaggttatgaagcgcctgtttacattgcttgggctggtcgtaaccgttcgccacttgtgcgcgtacctgcttcacgtggtatgggaactcgtcttgagttgcgttcagtggatccaatggcgaacccttacgttgctatggctgttcttttggaagttggtttgtatggtattgaaaataaaatcgaagcaccagctcctatcgaagaaaatatctacatcatgacagcagaagagcgcaaggaagctggtattacagaccttccatcaactcttcacaacgctttgaaagctttgacagaagatgaagtggttaaagctgctctcggagatcacatctatactagcttccttgaagccaaacgaatcgaatgggcaagttatgcaaccttcgtttcacaatgggaaattgataattatttagacctttac

SEQ ID NO: 866 - protein, 448 aa, Streptococcus pneumoniae
  glutamine synthetase, type 1 (glnA); Cellular location: cytoplasm; Similar to strain R6 sequence 15902488 (0.E+01)
MPITAADIRREVKEKNVTFIRLMFSDILGTMKNVEIPATDEQLDKVLSNKVMFDGSSIEGFVRINESDMYLYPDLDTWTVFPWGDENGSVAGLICDVYTTEGEPFAGDPRGNLKRALRHMEEVGFKSFNLGPEPEFFLFKLDENGDPTLEVNDKGGYFDLAPTDLADNTRREIVNVLTKMGFEVEASHHEVAVGQHEIDFKYDEVLRACDKIQIFKLVVKTIARKHGLYATFMAKPKFGIAGSGMHCNMSLFDAEGNNAFFDPNDPKGMQLSETAYHFLGGLIKHAYNYTAIMNPTVNSYKRLVPGYEAPVYIAWAGRNRSPLVRVPASRGMGTRLELRSVDPMANPYVAMAVLLEVGLYGIENKIEAPAPIEENIYIMTAEERKEAGITDLPSTLHNALKALTEDEVVKAALGDHIYTSFLEAKRIEWASYATFVSQWEIDNYLDLY

SEQ ID NO: 867 - DNA, 117 bp, Streptococcus pneumoniae
ttgcccgatattgtttttgaaattgaatttttccatagtgactccttaattttcttctacacgtctgatgataaatctaattcgcaaaagagtcaagaggatttttcgaaaaataaa

SEQ ID NO: 868 - protein, 39 aa, Streptococcus pneumoniae
  hypothetical protein; Cellular location: cytoplasm
MPDIVFEIEFFHSDSLIFFYTSDDKSNSQKSQEDFSKNK

SEQ ID NO: 869 - DNA, 135 bp, Streptococcus pneumoniae
ttgaatcctgatcgagcggaagaatatttctgccgaggttgccaaggggaaaatcctgaagatattgaattttatgatgaacaattacaggcagaaaaggtggaggatttgaatattcgattggaagtaaaaaat

SEQ ID NO: 870 - protein, 45 aa, Streptococcus pneumoniae
  hypothetical protein; Cellular location: cytoplasm
MNPDRAEEYFCRGCQGENPEDIEFYDEQLQAEKVEDLNIRLEVKN

SEQ ID NO: 871 - DNA, 1278 bp, Streptococcus pneumoniae
gtgaggataaaatcaatttattggaattttgggcaaaataagccagagaaatcctttaggtatatagatacgtctagtattgatagaaaaaagaacataatcaactacaaaaatctacaatatctttcacctgaacaagcgccttcccgtgctagaaaattagtttcgcagaatagtgtcttattttcaacagttagaccatatctaaaaaatattgctgtagttagagaacttaaagagtatttgatagctagtacagcatttattgttttggatactttacttaacgaaacatatttgaaatattatttattatcagataattttatcaatcgtgttaataataaatctactggaacaagttatcctgcaatcaatgattataattttaatctattattaattgctctccccccactatccgaacaacaacgaatagtagaagcaatcgaatcagctttagaaaaagtagatgaatatgctgaaagttataatagactagaacagctagataaagaatttccagataaactaaaaaaatctattcttcaatatgctatgcaaggaaaattagttgaacaagacccaaatgatgaatcagtcgaagttttacttgaaaaaatacgagcagaaaaacaaaaactctttgaagaaggcaagattaaaaagaaagatttggacatttctattgtttcccaaggagatgataactcttattatgaggaagtaccttgtgaaataccagaaagttgggaatgggtgaggttaaacgatataacctcctacattcaaagagggaagtctccaaaatattcaaatattcctatataccctgtgattgctcagaaatgtaatcaatggtctggcttttctattgacttagcaagatttattgatcccgaaacagttcatagttaccagaaagaaagattactaagagatggtgatttaatgtggaattcaacaggtctaggtacgttaggacgattagctatttaccatgaaaataaaaatccttatggctgggctgttgcagatagccatgttacagttataagagtcttatcgggggttattaattgccatttcatctataattttctttcctctcctattgttcagtcagttattgaagaaaaagcgtcgggtagtacaaaacaaaaagaattattaacgaaaactataaaagaatatttaatccccctcccaccccttcctgaacaatccagaatcgttgataaaatcgaacaatttttcgcccatattgacgcactaatt

SEQ ID NO: 872 - protein, 426 aa, Streptococcus pneumoniae
  type I restriction-modification system, S subunit, putative; Cellular location: cytoplasm; Similar to strain R6 sequence 15902492 (e-171)
MRIKSIYWNFGQNKPEKSFRYIDTSSIDRKKNIINYKNLQYLSPEQAPSRARKLVSQNSVLFSTVRPYLKNIAVVRELKEYLIASTAFIVLDTLLNETYLKYYLLSDNFINRVNNKSTGTSYPAINDYNFNLLLIALPPLSEQQRIVEAIESALEKVDEYAESYNRLEQLDKEFPDKLKKSILQYAMQGKLVEQDPNDESVEVLLEKIRAEKQKLFEEGKIKKKDLDISIVSQGDDNSYYEEVPCEIPESWEWVRLNDITSYIQRGKSPKYSNIPIYPVIAQKCNQWSGFSIDLARFIDPETVHSYQKERLLRDGDLMWNSTGLGTLGRLAIYHENKNPYGWAVADSHVTVIRVLSGVINCHFIYNFLSSPIVQSVIEEKASGSTKQKELLTKTIKEYLIPLPPLPEQSRIVDKIEQFFAHIDALI

SEQ ID NO: 873 - DNA, 795 bp, Streptococcus pneumoniae
ttgaaagattttgaattacatttgaagaaagctggtttagctgaaaatactgtgcgttcgtacctttatggtgttcgatttttcttggagaattacgaactcaaaatggaagatttatttgaatacaaaggatatttattagacaattttaaacctaaaactgtcaatttgcgactacaaggagtaaataaatatctggcttttattggtcatgatgatttgaaattaaaatttgtcaaagtacagcaaaaaccgtttttagaagatgtcattagccatgctgattacctttttcttaaacgtagtttgaaaaaagatggtattttaaaatggcattttgtcgtttggtttttaggtgcaactggggctcgtgtaagtgaacttattaaactaaaagtagagcatgtagaaatcggttattttgacatttactcaaaaggtggtaaaattcgtagactgtacattcctaaaaaattaagaaatagttgtcttagttggttagaatcagaaaatcgccgaagtggttatttatttttgaataaatttaacgaaccaattacagcaagaggagttgctcaacagttaaaaaattatgctgataaatacaaaatgaatcctaaagtaatttaccctcattcttttaggcatttatttgctaagaattttttagcgaagtataatgatattgccttgcttgcagatttgatgggacacgaaagtatagaaactactcgaatttatctaaggaaaacagctactgaacaacaaaatattgtagataaaattgttaattgg

SEQ ID NO: 874 - protein, 265 aa, Streptococcus pneumoniae
  integrase/recombinase, phage integrase family; Cellular location: cytoplasm; Similar to strain R6 sequence 15902491 (e-154)
MKDFELHLKKAGLAENTVRSYLYGVRFFLENYELKMEDLFEYKGYLLDNFKPKTVNLRLQGVNKYLAFIGHDDLKLKFVKVQQKPFLEDVISHADYLFLKRSLKKDGILKWHFVVWFLGATGARVSELIKLKVEHVEIGYFDIYSKGGKIRRLYIPKKLRNSCLSWLESENRRSGYLFLNKFNEPITARGVAQQLKNYADKYKMNPKVIYPHSFRHLFAKNFLAKYNDIALLADLMGHESIETTRIYLRKTATEQQNIVDKIVNW

SEQ ID NO: 875 - DNA, 597 bp, Streptococcus pneumoniae
gtggtcaaactgactacctgctatttttgtgattatggctcttattatgggaatatacctatgaattgggttgttataaaaataaaagatattttttcaataaatacaggtctttcttacaagaagggcgatttaagcattaataataaaggtgttagaattatacgtggtggtaatattaagcctttagaattttctctgttggataatgattactacattgatacacaattcatctcctctgagcaagtttatttaaaacataatcagctaataacacctgtatcaacctctttagaacatattggaaagtttgcaagaatcgataaagactatgatggtgttgtggctggtggatttattttccaattaacaccattcgaaagttcagagattatttcaaaatttctattatttaacttgtcctctccgttattttataaacaattgaaagcaataactaaactatcaggtcaagctttatataatattcctaaaactacactgagcgagctattaattccgttagctccttttgaggaacaggaacttattactcaaaaagttgagaaactttttgaaaaagtaaatcaactt

SEQ ID NO: 876 - protein, 199 aa, Streptococcus pneumoniae
  type I restriction-modification system, S subunit, putative; Cellular location: cytoplasm; Similar to strain R6 sequence 15902490 (3.E-98)
MVKLTTCYFCDYGSYYGNIPMNWVVIKIKDIFSINTGLSYKKGDLSINNKGVRIIRGGNIKPLEFSLLDNDYYIDTQFISSEQVYLKHNQLITPVSTSLEHIGKFARIDKDYDGVVAGGFIFQLTPFESSEIISKFLLFNLSSPLFYKQLKAITKLSGQALYNIPKTTLSELLIPLAPFEEQELITQKVEKLFEKVNQL

SEQ ID NO: 877 - DNA, 1566 bp, Streptococcus pneumoniae
atgacaccagaacaacttaaagcaagtattctccaaagagcgatggaagggaaattagtgccgcaaaatcccaatgacgaacctgcaagtgaattattaaagagaattaaagctgaaaaagaaaaacttatcagtgaaggaaaaatcaaacgagataaaaaggaaactgagatatttcgtggtgatgatgggaaacattatgggaagtttgctgatggaagcactcaagaaattgatgttccttatgatattcctgatacttgggagtgggtgaggttttctacattggttgaaattgtcagaggtggctctccacgaccaatcaaagattatcttacttctgaagtagatggaataaattggataaaaataggtgatactgaaaagggtgaaaagtatataaataatgttaaagaaaaaatcaaaaaatcagggcttaacaaaactagatttgtaaaaaaaggtacatttttgttaactaattctatgagttttggtagaccttatattttgaatgttgatggtgcaatacacgatggatggttggctatttcgaactatgaaaactcattaaataaagattacctattctatattctttcatcaaatgtagtttattctcaatttctatctctaattagtggagctgttgtgaaaaacttgaatagtgataaagttgcttctattcttatccctctccccccactatccgaacaacaacgaatagtagaagcaatcgaatcagctttagaaaaagtagatgaatatgctgaaagttataatagactagaacagctagataaagaatttccagataaactaaaaaaatctattcttcaatatgctatgcaaggaaaattagttgaacaagacccaaatgatgaatcagtcgaagttttacttgaaaaaatacgagcagaaaaacaaaaactctttgaagaaggcaagattaaaaagaaagatttggacatttctattgtttcccaaggagatgataactcttattatgggaacaaagacgaaacaacctcttatcctatatatgaaatcccagaagcatggagatatattaaatttgctagcctagttaacttcagaataggaaaaactcctccacgcagtgaagctactttttggggaactgaaataccttgggtatctatatcagatatgcctatatctggttatgtaactaatgcgagagaatctatttctaaattagcattaaaatcaaagaaaatagacatttcacctaaaggaactttattaatgagttttaaattatctattggaaaagttgccatattggatattcctgccactcataatgaagccattatatcgatattcccctatgctaataaagaaaatattatcagagattacttaatgatatttttgccacttatctctactttaggtgattcaaaagatgctatcaaagggaaaacattaaatagtaccagtatctccgaattattaatccctatttctaatcatgaagagatgaaaagaatcattttcaaagttgatttactttttcaaaaagtttctcaactttttgag

SEQ ID NO: 878 - protein, 522 aa, Streptococcus pneumoniae
  type I restriction-modification system, S subunit (hsdS); Cellular location: cytoplasm; Similar to strain R6 sequence 15902492 (0.E+01)
MTPEQLKASILQRAMEGKLVPQNPNDEPASELLKRIKAEKEKLISEGKIKRDKKETEIFRGDDGKHYGKFADGSTQEIDVPYDIPDTWEWVRFSTLVEIVRGGSPRPIKDYLTSEVDGINWIKIGDTEKGEKYINNVKEKIKKSGLNKTRFVKKGTFLLTNSMSFGRPYILNVDGAIHDGWLAISNYENSLNKDYLFYILSSNVVYSQFLSLISGAVVKNLNSDKVASILIPLPPLSEQQRIVEAIESALEKVDEYAESYNRLEQLDKEFPDKLKKSILQYAMQGKLVEQDPNDESVEVLLEKIRAEKQKLFEEGKIKKKDLDISIVSQGDDNSYYGNKDETTSYPIYEIPEAWRYIKFASLVNFRIGKTPPRSEATFWGTEIPWVSISDMPISGYVTNARESISKLALKSKKIDISPKGTLLMSFKLSIGKVAILDIPATHNEAIISIFPYANKENIIRDYLMIFLPLISTLGDSKDAIKGKTLNSTSISELLIPISNHEEMKRIIFKVDLLFQKVSQLFE

SEQ ID NO: 879 - DNA, 1461 bp, Streptococcus pneumoniae
atgtcaattacatcatttgtaaaaagaattcaagatatcactcgaaacgatgctggtgttaatggtgatgctcaacgtattgagcaaatgtcttggttattattcttaaaaatttatgatagccgtgaaatggtttgggaattagaagaagacgagtatgagtcaattatcccagaggaattaaaatggcgaaattgggctcatgctcaaaatggggaacgggtattgacaggcgatgaattacttgattttgtcaataacaagttattcaaagagttgaaagagcttgaaataacttcaaatatgcctattcgaaaaacgattgttaaatcagcttttgaagatgcgaacaactatatgaaaaatggcgtcttgttacgccaagtcatcaatgttattgatgaagttgatttcaatagccctgaagatcgtcattcgtttaatgatatttacgaaaaaattcttaaagatattcaaaatgctgggaactcaggagaattttatacgccacgtgcagcgactgattttattgccgaagttcttgacccaaaacttggagaatcaatggcagaccttgcttgcggaacaggaggcttcttgacttcgactctgaaccgtttaagtagtcaacgtaaaactagtgaagataccaaaaaatataatacagctgtttttggtattgaaaagaaagcatttcctcatcttttagcagttacaaatctgtttcttcacgaaattgatgaccctaaaattgttcatggaaatactttggagaaaaatgttcgtgaatatacggatgatgaaaaatttgacattattatgatgaatccaccttttggagggtcagaattagaaacaataaaaaataactttccagcagaattacggagttctgaaacagctgatttatttatggctgtcattatgtatcgtttgaaagaaaatggtcgtgttggagttattttacctgatggttttctatttggtgaaggtgtaaaaactcgcttgaaacaaaaactggtagatgagttcaacttgcatacgattattaggttgcctcatagtgtctttgcaccgtatacaggaatccatacgaacattcttttctttgataaaacaaagaaaacagaagaaacttggttttatcgtttagatatgccagatggttataaaaatttctcgaaaactaagccgatgaagtcagaacacttcaatcctgttcgtgactggtgggaaaatcgtgaagagattctggaaggtaagttctacaaatctaaatcatttacacctagtgaattggctgagttgaattataatttagaccagtgtgactttccaaaagaggaagaggaaatcttaaatccctttgagttgattcagaattatcaagcggaaagagcaactttaaatcataagattgataatgtattagctgatattttgcagttgttggaggacaaa

SEQ ID NO: 880 - protein, 487 aa, Streptococcus pneumoniae
  type I restriction-modification system, M subunit (hsdM); Cellular location: cytoplasm; Similar to strain R6 sequence 15902493 (0.E+01)
MSITSFVKRIQDITRNDAGVNGDAQRIEQMSWLLFLKIYDSREMVWELEEDEYESIIPEELKWRNWAHAQNGERVLTGDELLDFVNNKLFKELKELEITSNMPIRKTIVKSAFEDANNYMKNGVLLRQVINVIDEVDFNSPEDRHSFNDIYEKILKDIQNAGNSGEFYTPRAATDFIAEVLDPKLGESMADLACGTGGFLTSTLNRLSSQRKTSEDTKKYNTAVFGIEKKAFPHLLAVTNLFLHEIDDPKIVHGNTLEKNVREYTDDEKFDIIMMNPPFGGSELETIKNNFPAELRSSETADLFMAVIMYRLKENGRVGVILPDGFLFGEGVKTRLKQKLVDEFNLHTIIRLPHSVFAPYTGIHTNILFFDKTKKTEETWFYRLDMPDGYKNFSKTKPMKSEHFNPVRDWWENREEILEGKFYKSKSFTPSELAELNYNLDQCDFPKEEEEILNPFELIQNYQAERATLNHKIDNVLADILQLLEDK

SEQ ID NO: 881 - DNA, 2331 bp, Streptococcus pneumoniae
atggttgagtttataaagtctaagaaagaaatgagtgaggaggatattaaagcaaatttcatcactcctgctattgtatccaaaggatggaaaaatggtgagcatatcgcttacgaagaatacttcactgatggtcgaattgaagttagaggagataaggctcgtcgtaaagaaggaaaaaaatcagactattcactgtattaccaatttggaactcgaattgcaattgttgaggcaaaggataataaacacagcgttcgagcaggattacaacaagctattgaatatggagagattttagatgttccatttgtttattcttcgaatggtgatggctttattgaacacgaccgtatcacgagagaagaacgtgagctggagttagacgaattccctactcgtgaagaattattttctcgtatgacgaaggaaaaaggattgacgtacgaaattacagaagctatctcaactccatactatacagacgccttctcaatgaaaacgccacgctattatcagcaaatagctatcaaccgtactattgaaacagttgccagaggacaaaaacgagtaatgtttgtgatggcaacaggaacggggaaaacgttcatggcttttcaaattattcatcgccttcgaaaagctggtttggctaaacgagttttattcttagcagatagaaacatcttagtagaccaaacgatggctgaagactttaggccattcgaaaaggtaatgacgaaaattacaccaaaacttttgactgctcctgaaaaattaaattcttttgaaatttatctagggctttatcagcaactaactggtgaagatggaactgaaacacattatcaaaaatttgacaaagacttctttgatttaatcgtaattgatgaagcgcaccgtggttcagctaaggaaaacagtaactggcgtaaggtaattgattatttcagttctgcgacacagattgggatgaccgctactcttaaagaaaccaagaatgcttccaatacggaatactttggtgagccaatctatacttatagtttaaaacagggaatcgaggatggttttttggctccatatcgtgttatgagggttaatttagatgtggatgtggatggttatcgtccagaaactggaaaagttgatgctaacggacaattaatagaagataggtactacggcaggaaagattttgataaaaccattgtcattgatgatagaacgcaaagagttgccaagtttgtttctgattatatgaagcaaaacaatgcacgatttgataaaacaattgttttttgtgttgatattgaccatgccgagcgaatgcgtgctgcacttgtaaaagagaatctagacttagtccaagaagactatcgttatgtcatgcaagtaactggtgacaacgctgaaggaaaagctcaactggataactttatggatgtcaattctaattttcccgctattgtaacaacgtctaaattattaacgacaggagttaatgctaaaacatgtcgtttgattgttttagactctaatatccaatccatgactgaatttaaacaaattattggtcgtggcacacgtctttatcctcaaaaggggaaagaattttttacgattattgattttcgaaatgttaccaatttgtttgctgaccctgattttgatggtgatccagtgaaggtgctagaaacaggtgcgaaaacagtcagtggttctacgcccggtttcgtagatgaggaaggtgacccagtagaaaaatatatcgttacagacaagcaggttaccattcttaattctactgttcaagtattggatgaaaacgggaaactgattaccgaaagcctgaccgactacactcgaaagaatatcttaggtagctacgccactttgaacgattttatcacagtttggcatacggcagataagaagaagcttatcttagacgaactttataaaaaaggagtttatctagatgctattcgagagtcggagggaatatcagaacaagaaatcgatgattttgatttactcctaaaacttgcctatggtcaaaaagaattaaccaaaacggaacgtatcaataaactcaaacaaagcggatatttatataaatatagtgaggaagcgcgtgctgttttggaaattttactgaacaaatacatggataaaggtattggagaactcgaaagcattgaaacattaaaacttccagaatttcagatatatggtggaaccttcaaaatcatcaatacttattttggagataaaaaacgatatttacaagcaattaaagaattggagcaagagctatttacagtagct

SEQ ID NO: 882 - protein, 777 aa, Streptococcus pneumoniae
  type I restriction-modification system, R subunit (hsdR); Cellular location: cytoplasm; Similar to strain R6 sequence 15902494 (0.E+01)
MVEFIKSKKEMSEEDIKANFITPAIVSKGWKNGEHIAYEEYFTDGRIEVRGDKARRKEGKKSDYSLYYQFGTRIAIVEAKDNKHSVRAGLQQAIEYGEILDVPFVYSSNGDGFIEHDRITREERELELDEFPTREELFSRMTKEKGLTYEITEAISTPYYTDAFSMKTPRYYQQIAINRTIETVARGQKRVMFVMATGTGKTFMAFQIIHRLRKAGLAKRVLFLADRNILVDQTMAEDFRPFEKVMTKITPKLLTAPEKLNSFEIYLGLYQQLTGEDGTETHYQKFDKDFFDLIVIDEAHRGSAKENSNWRKVIDYFSSATQIGMTATLKETKNASNTEYFGEPIYTYSLKQGIEDGFLAPYRVMRVNLDVDVDGYRPETGKVDANGQLIEDRYYGRKDFDKTIVIDDRTQRVAKFVSDYMKQNNARFDKTIVFCVDIDHAERMRAALVKENLDLVQEDYRYVMQVTGDNAEGKAQLDNFMDVNSNFPAIVTTSKLLTTGVNAKTCRLIVLDSNIQSMTEFKQIIGRGTRLYPQKGKEFFTIIDFRNVTNLFADPDFDGDPVKVLETGAKTVSGSTPGFVDEEGDPVEKYIVTDKQVTILNSTVQVLDENGKLITESLTDYTRKNILGSYATLNDFITVWHTADKKKLILDELYKKGVYLDAIRESEGISEQEIDDFDLLLKLAYGQKELTKTERINKLKQSGYLYKYSEEARAVLEILLNKYMDKGIGELESIETLKLPEFQIYGGTFKIINTYFGDKKRYLQAIKELEQELFTVA

SEQ ID NO: 883 - DNA, 126 bp, Streptococcus pneumoniae
atgaaaatcaaaaacactttccaactgaaagaactacctccagtgacaaactttgagaaaaacggtagtagagctaaaaagagaaataaaataggaagcatccgcattgttaaaatccgtttggca

SEQ ID NO: 884 - protein, 42 aa, Streptococcus pneumoniae
  hypothetical protein; Cellular location: cytoplasm
MKIKNTFQLKELPPVTNFEKNGSRAKKRNKIGSIRIVKIRLA

SEQ ID NO: 885 - DNA, 108 bp, Streptococcus pneumoniae
gtgtttttgattttcataatagattgggttttattgatagtttttgcgattcagatttcttatattttttggagattgagtcaaaagtggaaagaattatctaataaa

SEQ ID NO: 886 - protein, 36 aa, Streptococcus pneumoniae
  hypothetical protein; Cellular location: membrane; Similar to strain R6 sequence 15902495 (3.E-16)
MFLIFIIDWVLLIVFAIQISYIFWRLSQKWKELSNK

SEQ ID NO: 887 - DNA, 189 bp, Streptococcus pneumoniae
atgaatagcagagtagaatttcggattttcaccattgttgatttggacaaggaagaagaacatttacatgagatgcatttgaaaggttggaggtatagaacgagtcgttttggtttgttctattttgaccaatgtcaaccagacgatgtcatctaccgtatctatgattctagatttcttaaaaaagta

SEQ ID NO: 888 - protein, 63 aa, Streptococcus pneumoniae
  hypothetical protein; Cellular location: cytoplasm; Similar to strain R6 sequence 15902496 (1.E-30)
MNSRVEFRIFTIVDLDKEEEHLHEMHLKGWRYRTSRFGLFYFDQCQPDDVIYRIYDSRFLKKV

SEQ ID NO: 889 - DNA, 345 bp, Streptococcus pneumoniae
atgattctagatttcttaaaaaagtataagcatgaactgcaagattttagagatagaggttgggaattgataggagcaggttcttgttcgattcttcgtaaatcgtcttctgatttacttccagaggatcaagtctatatgagtaaagggctcaaatgggaagttatgcgatctagacttcgttcctgtacagctactttctcaggtggtcttgttgtttgtatgagtttgtttagagaggatctttctatgtctttctttcttatttttgttttatatgcttttctgatttcttatctaatttatggttatttcagactaaaaaggaaataccgagtagatgaa

SEQ ID NO: 890 - protein, 115 aa, Streptococcus pneumoniae
  hypothetical protein; Cellular location: membrane; Similar to strain R6 sequence 15902496 (2.E-57)
MILDFLKKYKHELQDFRDRGWELIGAGSCSILRKSSSDLLPEDQVYMSKGLKWEVMRSRLRSCTATFSGGLVVCMSLFREDLSMSFFLIFVLYAFLISYLIYGYFRLKRKYRVDE

SEQ ID NO: 891 - DNA, 1032 bp, Streptococcus pneumoniae
atggttacagagcgtcagcaggatattttaaatctgattattgacatctttaccaaaacgcacgaacctgtcggatcaaaagccttgcaagagtctattaactctagcagtgcaaccattcgtaatgacatggcggaactagaaaaacaagggttgcttgagaaggctcatacttcaagtggtcggatgccaagtgttgctggttttcagtactatgtgaaacactcactggattttgaccggctggctgaaaatgaggtatatgagattgtcaaagcctttgatcaggaattcttcaaattggaggatattctgcaagaggctgctaacttactaacagacctgagtggctgtacggtagtggcactggatgttgagccgagcaggcaacgtttgacagcctttgatatcgttgttttggggcaacatacagccttggcggtatttaccctagacgagtcgcgaacggttactagtcagtttctgattccaaggaacttcttgcaggaggatttgctgaaactgaagagcatcattcaggaacgtttcctcggtcacaccgttttagatattcactacaagattcggacggagattccgcagattatccagcgttactttacaacaacggataatgtcatcgatctctttgaacacatctttaaggaaatgttcaacgaaaacattgtgatggcgggcaaggtccatctcttgaattttgccaatctagcagcctatcagttctttgaccaaccgcaaaaggtggccttggagattcgtgaggggttgcgtgaggatcagatgcaaaatgttcgtgttgcagacggtcaagagtcctgtttagctgacctagcggtaatcagtagtaagttcctcattccttatcggggagttggaattctagccattatcggtccagttaatctggattaccaacagctaatcaatcaagtcaatgtggtcaaccgtgttttgaccatgaagttgacagatttttaccgctacctcagcagtaatcattacgaagtacat

SEQ ID NO: 892 - protein, 344 aa, Streptococcus pneumoniae
  heat shock transcription repressor HrcA (hrcA); Cellular location: membrane; Similar to strain R6 sequence 15902497 (0.E+01)
MVTERQQDILNLIIDIFTKTHEPVGSKALQESINSSSATIRNDMAELEKQGLLEKAHTSSGRMPSVAGFQYYVKHSLDFDRLAENEVYEIVKAFDQEFFKLEDILQEAANLLTDLSGCTVVALDVEPSRQRLTAFDIVVLGQHTALAVFTLDESRTVTSQFLIPRNFLQEDLLKLKSIIQERFLGHTVLDIHYKIRTEIPQIIQRYFTTTDNVIDLFEHIFKEMFNENIVMAGKVHLLNFANLAAYQFFDQPQKVALEIREGLREDQMQNVRVADGQESCLADLAVISSKFLIPYRGVGILAIIGPVNLDYQQLINQVNVVNRVLTMKLTDFYRYLSSNHYEVH

SEQ ID NO: 893 - DNA, 546 bp, Streptococcus pneumoniae
ttgaaatcattaaaggaggcgaacatggcccaagatataaaaaatgaagaagtagaagaagttcaagaagaggaagttgtgaaaacagctgaagaaacaactcctgaaaagtctgagttggacttggcaaatgaacgtgcagatgagttcgaaaacaaatatcttcgcgctcatgcagaaatgcaaaatatccaacgccgtgccaatgaagaacgtcaaaacttgcaacgttatcgtagccaggacttggcaaaagcaatcttaccatctcttgacaaccttgagcgtgcacttgcagttgaaggtttgacagatgatgtgaagaagggcttggggatggtgcaagaaagcttgattcacgctttgaaagaagaaggaattgaagaaatcgcagcagatggcgaatttgaccataactaccatatggccatccaaactctcccagcagacgatgaacacccagtagataccatcgctcaagtctttcaaaaaggctacaaactccatgaccgcatcctacgcccagcaatggtagtggtgtataac

SEQ ID NO: 894 - protein, 182 aa, Streptococcus pneumoniae
  heat shock protein GrpE (grpE); Cellular location: cytoplasm; Similar to strain R6 sequence 15902498 (1.E-94)
MKSLKEANMAQDIKNEEVEEVQEEEVVKTAEETTPEKSELDLANERADEFENKYLRAHAEMQNIQRRANEERQNLQRYRSQDLAKAILPSLDNLERALAVEGLTDDVKKGLGMVQESLIHALKEEGIEEIAADGEFDHNYHMAIQTLPADDEHPVDTIAQVFQKGYKLHDRILRPAMVVVYN

SEQ ID NO: 895 - DNA, 1821 bp, Streptococcus pneumoniae
atgtctaaaattatcggtattgacttaggtacaacaaactcagcagttgcagttcttgaaggaactgaaagcaaaatcatcgcaaacccagaaggaaaccgcacaactccatctgtagtctcattcaaaaacggagaaatcatcgttggtgatgctgcaaaacgtcaagcagttacaaacccagatacagttatctctatcaaatctaagatgggaacttctgaaaaagtttctgcaaatggaaaagaatacactccacaagaaatctcagctatgatccttcaatacttgaaaggctacgctgaagactaccttggtgagaaagtaaccaaagctgttatcacagttccggcttacttcaacgacgctcaacgtcaagcaacaaaagacgctggtaaaattgctggtcttgaagtagaacgtattgttaacgaaccaactgcagcagctcttgcttatggtttggacaagactgacaaagaagaaaaaatcttggtatttgaccttggtggtggtacattcgacgtctctatccttgaattgggtgacggtgtcttcgacgtattgtcaactgcaggggacaacaaacttggtggtgacgactttgaccaaaaaatcattgaccacttggtagcagaattcaagaaagaaaacggtatcgacttgtctactgacaagatggcaatgcaacgtttgaaagatgcggctgaaaaagcgaagaaagacctttctggtgtaacttcaacacaaatcagcttgccatttatcactgcaggtgaggctggacctcttcacttggaaatgactttgactcgtgcgaaatttgacgatttgactcgtgaccttgttgaacgtacaaaagttccagttcgtcaagccctttcagatgcaggtttgagcttgtcagaaatcgacgaagttatccttgttggtggttcaactcgtatccctgccgttgttgaagctgttaaagctgaaactggtaaagaaccaaacaaatcagtaaaccctgatgaagtagttgctatgggtgcggctatccaaggtggtgtgattactggtgatgtcaaggacgttgtccttcttgatgtaacgccattgtcacttggtatcgaaacaatgggtggagtatttacaaaacttatcgatcgcaacactacaatcccaacatctaaatcacaagtcttctcaacagcagcagacaaccaaccagccgttgatatccacgttcttcaaggtgaacgcccaatggcagcagataacaagactcttggacgcttccaattgactgatatcccagctgcacctcgtggaattcctcaaatcgaagtaacatttgacatcgacaagaacggtatcgtgtctgttaaggccaaagaccttggaactcaaaaagaacaaactattgtcatccaatcgaactcaggtttgactgacgaagaaatcgaccgcatgatgaaagatgcagaagcaaacgctgaagccgataagaaacgtaaagaagaagtagaccttcgtaatgaagtagaccaagcaatctttgcgactgaaaagacaatcaaggaaactgaaggtaaaggcttcgacgcagaacgtgacgctgcccaagctgcccttgatgaccttaagaaagctcaagaagacaacaacttggacgacatgaaaacaaaacttgaagcattgaacgaaaaagctcaaggacttgctgttaaactctacgaacaagccgcagcagcgcaacaagctcaagaaggagcagaaggcgcacaagcaacagggaacgcaggcgatgacgtcgtagacggagagtttacggaaaag

SEQ ID NO: 896 - protein, 607 aa, Streptococcus pneumoniae
  dnaK protein (dnaK); Cellular location: cytoplasm; Similar to strain R6 sequence 15902499 (0.E+01)
MSKIIGIDLGTTNSAVAVLEGTESKIIANPEGNRTTPSVVSFKNGEIIVGDAAKRQAVTNPDTVISIKSKMGTSEKVSANGKEYTPQEISAMILQYLKGYAEDYLGEKVTKAVITVPAYFNDAQRQATKDAGKIAGLEVERIVNEPTAAALAYGLDKTDKEEKILVFDLGGGTFDVSILELGDGVFDVLSTAGDNKLGGDDFDQKIIDHLVAEFKKENGIDLSTDKMAMQRLKDAAEKAKKDLSGVTSTQISLPFITAGEAGPLHLEMTLTRAKFDDLTRDLVERTKVPVRQALSDAGLSLSEIDEVILVGGSTRIPAVVEAVKAETGKEPNKSVNPDEVVAMGAAIQGGVITGDVKDVVLLDVTPLSLGIETMGGVFTKLIDRNTTIPTSKSQVFSTAADNQPAVDIHVLQGERPMAADNKTLGRFQLTDIPAAPRGIPQIEVTFDIDKNGIVSVKAKDLGTQKEQTIVIQSNSGLTDEEIDRMMKDAEANAEADKKRKEEVDLRNEVDQAIFATEKTIKETEGKGFDAERDAAQAALDDLKKAQEDNNLDDMKTKLEALNEKAQGLAVKLYEQAAAAQQAQEGAEGAQATGNAGDDVVDGEFTEK

SEQ ID NO: 897 - DNA, 144 bp, Streptococcus pneumoniae
atgagtgtattggatgaagagtatctaaaaaatacacgaaaagtttataatgatttttgtaatcaagctgataactatagaacatcaaaagattttattgataatattccaatagaatatttagctagatatagagaattatat

SEQ ID NO: 898 - protein, 48 aa, Streptococcus pneumoniae
  hypothetical protein; Cellular location: cytoplasm
MSVLDEEYLKNTRKVYNDFCNQADNYRTSKDFIDNIPIEYLARYRELY

SEQ ID NO: 899 - DNA, 1134 bp, Streptococcus pneumoniae
atgaacaatactgaattttatgatcgtctgggggtatccaaaaacgcttcggcagacgaaatcaaaaaggcttatcgtaagctttccaaaaaatatcacccagatatcaacaaggagcctggtgctgaggacaagtacaaggaagttcaagaagcctatgagactttgagtgacgaccaaaaacgtgctgcctatgaccagtatggtgctgcaggcgccaatggtggttttggtggagctggtggtttcggcggtttcaatggggcaggtggcttcggtggttttgaggatattttctcaagtttcttcggcggaggcggttcttcgcgcaatccaaacgctcctcgccaaggagatgatctccagtatcgtgtcaatttgacctttgaagaagctatcttcggaactgagaaggaagttaagtatcatcgtgaagctggctgtcgtacatgtaatggatctggtgctaagccagggacaagtccagtcacttgtggacgctgtcatggcgctggtgtcattaacgtcgatacgcagactcctcttggtatgatgcgtcgccaagtaacctgtgatgtctgtcacggtcgaggaaaagaaatcaaatatccatgtacaacctgtcatggaacaggtcatgagaaacaagctcatagcgtacatgtgaaaatccctgctggtgtggaaacaggtcaacaaattcgcctcgctggtcaaggtgaagcaggctttaacggtggaccttatggtgacttgtatgtagtagtttctgtggaagctagcgacaagtttgaacgtgaaggaacgactatcttctacaatctcaacctcaactttgtccaagcggctcttggtgatacagtagatattccaactgttcacggtgatgttgaattggttattccagagggaactcagactggtaagaagttccgcctacgtagtaagggggcaccgagccttcgtggcggtgcagttggtgaccaatacgttactgttaatgtcgtaacaccgacaggcttgaacgaccgccaaaaagtagccttgaaagaattcgcggctgctggtgacttgaaagtaaatccaaagaaaaaaggcttctttgaccatattaaagatgcctttgatggagaa

SEQ ID NO: 900 - protein, 378 aa, Streptococcus pneumoniae
  dnaJ protein (dnaJ); Cellular location: cytoplasm; Similar to strain R6 sequence 15902500 (0.E+01)
MNNTEFYDRLGVSKNASADEIKKAYRKLSKKYHPDINKEPGAEDKYKEVQEAYETLSDDQKRAAYDQYGAAGANGGFGGAGGFGGFNGAGGFGGFEDIFSSFFGGGGSSRNPNAPRQGDDLQYRVNLTFEEAIFGTEKEVKYHREAGCRTCNGSGAKPGTSPVTCGRCHGAGVINVDTQTPLGMMRRQVTCDVCHGRGKEIKYPCTTCHGTGHEKQAHSVHVKIPAGVETGQQIRLAGQGEAGFNGGPYGDLYVVVSVEASDKFEREGTTIFYNLNLNFVQAALGDTVDIPTVHGDVELVIPEGTQTGKKFRLRSKGAPSLRGGAVGDQYVTVNVVTPTGLNDRQKVALKEFAAAGDLKVNPKKKGFFDHIKDAFDGE

SEQ ID NO: 901 - DNA, 99 bp, Streptococcus pneumoniae
gtggatagaactgacgaagtcagtaaccatacccatgacaagccgacgctgacgtggtttgaagaaatttttgaagagtatcattcaccatttcacaac

SEQ ID NO: 902 - protein, 33 aa, Streptococcus pneumoniae
  box element
MDRTDEVSNHTHDKPTLTWFEEIFEEYHSPFHN

SEQ ID NO: 903 - DNA, 159 bp, Streptococcus pneumoniae
atggttactgacttcgtcagttctatccacaacctcaaaacagtgtttgagctgacttcgtcagttctatccacaaccttaaaacggtgttttgagcagtctgtgcctagctttctagtttgctttttgatttttattgagtatgaattacctaaatta

SEQ ID NO: 904 - protein, 53 aa, Streptococcus pneumoniae
  box element
MVTDFVSSIHNLKTVFELTSSVLSTTLKRCFEQSVPSFLVCFLIFIEYELPKL

SEQ ID NO: 905 - DNA, 285 bp, Streptococcus pneumoniae
atgaaattatccaacctactgctatttgcaggagctgcagccggaagttatctggttacaaaaaatcgccaaaccatcacagatgaagtcttgaataccactgaccgcgttcaagctatcaaggacgatgtggatattatccaaaacagcctgcaaatcattaaccagcaaaaagaacttatcaaggaataccaagaagacttgacttacaagtttaaggtcttggaaaaggatatccagactagactagctgtgataaaagaaatgcagggaactgaagataag

SEQ ID NO: 906 - protein, 95 aa, Streptococcus pneumoniae
  hypothetical protein; Cellular location: outside; Similar to strain R6 sequence 15902501 (2.E-48)
MKLSNLLLFAGAAAGSYLVTKNRQTITDEVLNTTDRVQAIKDDVDIIQNSLQIINQQKELIKEYQEDLTYKFKVLEKDIQTRLAVIKEMQGTEDK

SEQ ID NO: 907 - DNA, 408 bp, Streptococcus pneumoniae
atgtcagattgcattttttgtaaaatcatcgcaggggaaattcctgcttcaaaagtatatgaagatgagcaggtccttgcctttcttgatatctctcaagtaacactaggacacaccttggtcgtgccaaaagaacactatcgcaatcttttggagatggatgctacgagcgccagccaactctttgcccaagtaccaaaagtagctcaaaaagtcatgaaagtcactaaggctgctggtatgaatatcatttccaactgtgaagaagtcgctggtcaaacagtttttcatactcacgttcaccttgtgcctcgctacagtgctgacgatgacctcaagattgattttatcgcccacgaaccagactttgacaaacttgctcaagtcgctgaaaccatcaaaaacgct

SEQ ID NO: 908 - protein, 136 aa, Streptococcus pneumoniae
  HIT family protein; Cellular location: cytoplasm; Similar to strain R6 sequence 15902502 (7.E-75)
MSDCIFCKIIAGEIPASKVYEDEQVLAFLDISQVTLGHTLVVPKEHYRNLLEMDATSASQLFAQVPKVAQKVMKVTKAAGMNIISNCEEVAGQTVFHTHVHLVPRYSADDDLKIDFIAHEPDFDKLAQVAETIKNA

SEQ ID NO: 909 - DNA, 729 bp, Streptococcus pneumoniae
atgttagaaattaaaaacctgacaggtggctatgttcatgttcctgttttgaaagatgtgtcctttactgttgaaagtgggcagttggtcggtttgattggtctcaatggtgctgggaaatcaacgacgatcaatgagattatcggtctgttggcaccttatagtggctccatcaatatcaatggcctgactctgcaaggagatgcgactagctaccgcaagcagattggctacattcctgagacgcctagtctgtatgaggaattgaccctcagagagcatatcgaaacggttgctatggcttacggtattgagcaaaaagtggctttcgaacgagtagagcccttgttaaaaatgttccgtttggaacagaaattagactggttccctgttcatttttcaaaagggatgaagcagaaggtcatgattatctgtgcttttgtggtggatccaagtcttttcatcgtggatgagcctttccttggtcttgatccgctggctatttctgatttgattcagcttttggaagtggagaagcaaaagggcaagtctattctcatgagtacccacgtgctggattcggcggagaagatgtgtgatgcctttgtcattcttcacaagggagaggtgcgttccaaaggcaatctcctgcaactacgtgaagcctttgatatgcctgaggctagtttgaatgatatttacttggctctgaccaaagaggaggatcta

SEQ ID NO: 910 - protein, 243 aa, Streptococcus pneumoniae
  ABC transporter, ATP-binding protein; Cellular location: membrane; Similar to strain R6 sequence 15902503 (e-135)
MLEIKNLTGGYVHVPVLKDVSFTVESGQLVGLIGLNGAGKSTTINEIIGLLAPYSGSININGLTLQGDATSYRKQIGYIPETPSLYEELTLREHIETVAMAYGIEQKVAFERVEPLLKMFRLEQKLDWFPVHFSKGMKQKVMIICAFVVDPSLFIVDEPFLGLDPLAISDLIQLLEVEKQKGKSILMSTHVLDSAEKMCDAFVILHKGEVRSKGNLLQLREAFDMPEASLNDIYLALTKEEDL

SEQ ID NO: 911 - DNA, 1047 bp, Streptococcus pneumoniae
atgaaagacttgtttttaaagagaaagcaggcctttcgtaaggagtgtcttggttatctgcgctatgtgctcaatgaccactttgtcttgttcctgcttgtcctgttgggctttctagcctaccagtacagtcaactcttacaacattttcctgaaaatcattggcctatccttttgtttgtaggaattacgtctgttttacttttactttggggaggaactgccacctatatggaggctccagacaagctctttctcttagttggagaagaggaaattaagctccatctcaagcgtcaaactggcatttccctagtcttttggctctttgtacagacccttttcttgctgttatttgcgcctttatttttagcaatgggttatggcttgccagtttttctgctctatgtgcttttattgggggtaggaaaatatttccacttttgtcaaaaggccagcaaatttttcactgaaactggactggactgggactatgttatttctcaagaaagcaagcgtaagcaagtcttgcttcgtttctttgccctctttacgcaggtcaagggaatttcaaacagcgttaagcgtcgtgcctatctggactttattttaaaggctgttcagaaggtgcctgggaagatttggcaaaatctctatctgcgttcttatctgcgaaatggcgacctctttgctctcagtcttcgtcttctcttgctttccttgctggcgcaggtttttatcgagcaagcttggattgcgacagcagtggtagttctctttaactacctcttgctcttccagttgctggccctctatcatgcctttgactaccagtatttgacccaactctttccgctggacaaggggcaaaaggaaaaaggcttacaggaggtagttcgaggattgaccagttttgttttacttgtggaattagttgttgggttgattaccttccaagaaaaactagcccttctagccttactaggagctggtttggttttactagtcttgtatttgccttatcaggtaaaacgtcagatgcaggac

SEQ ID NO: 912 - protein, 349 aa, Streptococcus pneumoniae
  ABC transporter, permease protein, putative; Cellular location: membrane; Similar to strain R6 sequence 15902504 (0.E+01)
MKDLFLKRKQAFRKECLGYLRYVLNDHFVLFLLVLLGFLAYQYSQLLQHFPENHWPILLFVGITSVLLLLWGGTATYMEAPDKLFLLVGEEEIKLHLKRQTGISLVFWLFVQTLFLLLFAPLFLAMGYGLPVFLLYVLLLGVGKYFHFCQKASKFFTETGLDWDYVISQESKRKQVLLRFFALFTQVKGISNSVKRRAYLDFILKAVQKVPGKIWQNLYLRSYLRNGDLFALSLRLLLLSLLAQVFIEQAWIATAVVVLFNYLLLFQLLALYHAFDYQYLTQLFPLDKGQKEKGLQEVVRGLTSFVLLVELVVGLITFQEKLALLALLGAGLVLLVLYLPYQVKRQMQD

SEQ ID NO: 913 - DNA, 327 bp, Streptococcus pneumoniae
atgacagatacagaccccatcaaaagagctcatactttgattactgacttaaacaaagcctaccaagcatgcaaacaggcaagcgctgacgacgtccgctttcaggagcaattaaactctattcttggttttctagccaaggctgaaacagtggataatcgattcttgattgaactagaaaaattttaccagacttccagtcttctcatgggactcagcgctcttgatccagatgctccaactcgcgccgcttggcgggcctatgaccgcttccactttgaccaagtcaagaccaagttaatactcaatgaaaatcaaagagcaaac

SEQ ID NO: 914 - protein, 109 aa, Streptococcus pneumoniae
  BlpT protein, fusion (bplT); Cellular location: cytoplasm; Similar to strain R6 sequence 15902505 (1.E-58)
MTDTDPIKRAHTLITDLNKAYQACKQASADDVRFQEQLNSILGFLAKAETVDNRFLIELEKFYQTSSLLMGLSALDPDAPTRAAWRAYDRFHFDQVKTKLILNENQRAN

SEQ ID NO: 915 - DNA, 336 bp, Streptococcus pneumoniae
atgaaatatatgattattcagacgcagaaaacagtctataaagtaaacatcgacgatatctactatatccaaacacatccaactaaagcccataccgtacagattgttacagaagaagctagttttaatatgcttcaaaatttaagtaatcttgagaaccaatgtggggaaaccttgatgagatgtcatcgaaattgtttggttaatcttgataaattaaaatcgattgattttcaagaaagaatcctttttctcggagaagaaggtcaatacgctgtcaagtatgccagacgtcgctatagagaaattcgtcaaaaatggttgaaagagggagag

SEQ ID NO: 916 - protein, 112 aa, Streptococcus pneumoniae
  blpS protein (blpS); Cellular location: cytoplasm; Similar to strain R6 sequence 15902506 (4.E-60)
MKYMIIQTQKTVYKVNIDDIYYIQTHPTKAHTVQIVTEEASFNMLQNLSNLENQCGETLMRCHRNCLVNLDKLKSIDFQERILFLGEEGQYAVKYARRRYREIRQKWLKEGE

SEQ ID NO: 917 - DNA, 735 bp, Streptococcus pneumoniae
atgagaatatttgttttagaggatgatttttcccaacagactagaattgaaacgacgattgagaaacttttgaaagcacatcatatcattcctagctcttttgaggtatttggcaagccggaccaactgctggctgaagtgcatgagaagggggcccatcagctattctttttggatattgagattcgaaatgaagagatgaagggactggaagtggctagaaagattcgggatcgggatccttatgccctgattgtctttgtgacgactcactcggagtttatgcccctgtcttttcgctaccaagtgtctgctttggactacattgataaggccttgtcagcagaggagtttgaatctcggatcgagacagccctcctctatgccaatagtcaagatagtaaaagtctggcggaagattgcttttactttaaatcaaaatttgcccaatttcagtatccttttaaagaggtttactatctcgaaacgtcgcccagagcccatcgtgttattctctataccaagacagacaggctggaatttacagcgagtttagaggaggttttcaagcaggagccccgtctcttgcagtgccaccgctcttttctcatcaatcctgcaaatgtggtgcatttggataagaaagaaaaactgcttttctttcccaatggtggaagttgtctaatcgcccgttataaggtcagggaagtgtctgaggccatcaataaattacac

SEQ ID NO: 918 - protein, 245 aa, Streptococcus pneumoniae
  response regulator BlpR (blpR); Cellular location: cytoplasm; Similar to strain R6 sequence 15902507 (e-135)
MRIFVLEDDFSQQTRIETTIEKLLKAHHIIPSSFEVFGKPDQLLAEVHEKGAHQLFFLDIEIRNEEMKGLEVARKIRDRDPYALIVFVTTHSEFMPLSFRYQVSALDYIDKALSAEEFESRIETALLYANSQDSKSLAEDCFYFKSKFAQFQYPFKEVYYLETSPRAHRVILYTKTDRLEFTASLEEVFKQEPRLLQCHRSFLINPANVVHLDKKEKLLFFPNGGSCLIARYKVREVSEAINKLH

SEQ ID NO: 919 - DNA, 1338 bp, Streptococcus pneumoniae
atgaacattgcttggatattgttgtatacacttgttactaatggactagaaattgtcatcttctttaaggtggatggaattgatcttactttcgagaggatttttaaggcctttcttttgaagatactgttggcctttgtttttgtgatgattagctatatagtaggaaatgtttacctatcttattttatggaacccttgtacggcataggcttatctttcttattattgagagggcttcctaaaaaactccttttcttttatggtctctttccaatgatattggtgaatctcttttatagaggagtctcctattttgtgcttccatttttgggacaagggcaagtatatgatggctactcatttactgggttatgtataataattttcaatttcttcatttctctagcttttttgaaatggttggactacgattttactagcttgagaaaggagattctcgataaagcctttcaaaagtccctgactcagattaactggataatgggtggctactatctagtcatggaaagtctgtctttttttgaatatgaacaaagtattcaatcaaagactgttcgccatctcatcctagtcttttacctactcttttttatgggggttatcaagaaattggatacctatttgaaggaaaaactctatgagagattggaacaagagcaggccctgcgctatagagatatggaacgctatagtcggcatatagaggagctttacaaggaagtacggagctttcgtcatgattataccaacctcttgactagcttacgtctgggcattgaagaggaggatatggagcagataaaagaggtctatggctccgtcttaaaggattccagtcagaaattgcagaacaataaatatgacctgggcagattggtaaatattcgtgataaagccctcaaaagtcttctagcagggaaatttttaaaagccagagataagaacattgtctttaatgtcgaagttcctgaggagattcaggtcgaggggatgagtctacttgattttctaaccattgtgtctatcctttgtgacaatgctattgaagccagtgtggaagctagtcaacctcatgtttcaatcgcctttttaaaaaatggagcacaggagacctttatcatcgaaaactccatcaaagaagagggcatcgatatttctgaaatcttctcctttggagccagttctaaaggggaggagagaggagttggtctctataccgtcatgaagattgtggaaagccatcctaataccagtctaaataccacctgtcaaaatcaagtctttcgtcaggtacttactgtgatacatacagaa

SEQ ID NO: 920 - protein, 446 aa, Streptococcus pneumoniae
  putative histidine kinase BlpH (blpH); Cellular location: membrane; Similar to strain R6 sequence 15902508 (0.E+01)
MNIAWILLYTLVTNGLEIVIFFKVDGIDLTFERIFKAFLLKILLAFVFVMISYIVGNVYLSYFMEPLYGIGLSFLLLRGLPKKLLFFYGLFPMILVNLFYRGVSYFVLPFLGQGQVYDGYSFTGLCIIIFNFFISLAFLKWLDYDFTSLRKEILDKAFQKSLTQINWIMGGYYLVMESLSFFEYEQSIQSKTVRHLILVFYLLFFMGVIKKLDTYLKEKLYERLEQEQALRYRDMERYSRHIEELYKEVRSFRHDYTNLLTSLRLGIEEEDMEQIKEVYGSVLKDSSQKLQNNKYDLGRLVNIRDKALKSLLAGKFLKARDKNIVFNVEVPEEIQVEGMSLLDFLTIVSILCDNAIEASVEASQPHVSIAFLKNGAQETFIIENSIKEEGIDISEIFSFGASSKGEERGVGLYTVMKIVESHPNTSLNTTCQNQVFRQVLTVIHTE

SEQ ID NO: 921 - DNA, 126 bp, Streptococcus pneumoniae
atggataagaaacaaaacctaacttcatttcaagaactaacaactaccgaactcaatcaaattacaggtggaggattgtgggaagatttattatataacattaatagatatgctcattacatcaca

SEQ ID NO: 922 - protein, 42 aa, Streptococcus pneumoniae
  peptide pheromone BlpC (blpC); Cellular location: cytoplasm; Similar to strain R6 sequence 15902509 (1.E-12)
MDKKQNLTSFQELTTTELNQITGGGLWEDLLYNINRYAHYIT

SEQ ID NO: 923 - DNA, 1359 bp, Streptococcus pneumoniae
atgaatcctaatctttttagaagcgtcgagttttatcagagacgttaccataactatgcgacagtgttaattatacctctttcattactatttactttcatcttgattttctcccttgttgccacaaaagaaattactgttacttcccaaggagaaatcgcccctacaagtgtcattgcctccattcagtcaaccagtgataatcctatcctagctaatcatttagtggcaaatcaagtagttgaaaaaggggacttactcatcaaatactctgaaacaatggaagaaagtcagaaaactgccttagcaactcaattacaaagacttgagaagcaaaaagaaggacttggaattttgaaacaaagcttagaaaaagcgactgatcttttttctggcgaggatgaatttggctaccataatacctttatgaattttactaaacaatcccatgatattgaactgggtatcacaaagactaacaccgaagtttcaaatcaagctaatctttccaatagcagttcatcagctattgaacaagaaattacaaaagttcaacaacaaattggagaatatcaagagttgagagatgctatcataaataacagagcacgcttaccaactggcaatccgcaccagtcaattttgaatcgttatcttgtagcctcacaaggacaaacacaaggaactgcagaggagccatttttatctcaaattaatcaaagtattgcaggtcttgaatcatctatcgcaagcctcaaaattcagcaagctggtatcggaagtgtagcaacttatgataacagtttagcaaccaaaattgaagtactccgcactcagtttttacagacagcctcacagcaacaactaactgtggagaatcaattaacagaattaaaagtacaactagatcaagccacacagcgtttggaaaacaataccttaacctccccaagtaaaggtatcgttcatctgaacagcgaatttgaaggtaaaaatagaattccaactggtacagaaattgctcaaatattccctgtcatcacagatacaagagaagtactaatcacttactacgtatcttctgactatctacctctactagataaaggacaaactgtaagattaaaactggagaagattggaaatcacggcaccaccatcatcggccaacttcagacaattgatcaaactcctaccagaacagagcaaggaaatctctttaaattaaccgctcttgcaaaactatctaacgaggatagtaaactcatccaatatggcttacaaggtcgcgtcactagtgtaactacaaagaaaacatattttgattatttcaaagataaaattttaacacattctgat

SEQ ID NO: 924 - protein, 453 aa, Streptococcus pneumoniae
  transport protein BlpB (blpB); Cellular location: outside; Similar to strain R6 sequence 15902510 (0.E+01)
MNPNLFRSVEFYQRRYHNYATVLIIPLSLLFTFILIFSLVATKEITVTSQGEIAPTSVIASIQSTSDNPILANHLVANQVVEKGDLLIKYSETMEESQKTALATQLQRLEKQKEGLGILKQSLEKATDLFSGEDEFGYHNTFMNFTKQSHDIELGITKTNTEVSNQANLSNSSSSAIEQEITKVQQQIGEYQELRDAIINNRARLPTGNPHQSILNRYLVASQGQTQGTAEEPFLSQINQSIAGLESSIASLKIQQAGIGSVATYDNSLATKIEVLRTQFLQTASQQQLTVENQLTELKVQLDQATQRLENNTLTSPSKGIVHLNSEFEGKNRIPTGTEIAQIFPVITDTREVLITYYVSSDYLPLLDKGQTVRLKLEKIGNHGTTIIGQLQTIDQTPTRTEQGNLFKLTALAKLSNEDSKLIQYGLQGRVTSVTTKKTYFDYFKDKILTHSD

SEQ ID NO: 925 - DNA, 1575 bp, Streptococcus pneumoniae
ttggatgaatacattccaaatcagatgaaatcaactttaggaatcatctcagttggtctggttatcacctatatcctccaacaagtcatgagcttctccagagattatctcctaaccgttctgagtcagagattaagtattgatgtgattttatcctatattcgccatatttttgaacttcccatgtctttctttgcgacacgtcgtacaggagaaatcatttcacgattcacagatgctaactctattatagatgccttggcttctaccattctttctctttttctggatgtttctattctgattcttgtaggaggcgtcttactggcacaaaaccctaatctcttccttctttctcttatttccattcctatatacatgttcatcatcttttcttttatgaaacctttcgaaaaaatgaaccatgatgtcatgcaaagtaattctatggttagctctgccattatcgaagatatcaacgggattgaaactataaagtcgctcacgagtgaagaaaatcgctatcaaaatatagacagcgaatttgtagattatttggaaaaatcctttaagctcagtaaatattctattttacaaacgagtttaaagcagggaacaaaattagttctgaatatccttatcctatggtttggcgctcaattagtcatgtcaagtaaaatttctatcggtcagctgattacctttaacacacttttttcttactttacaactcctatggaaaatattatcaacctccaaaccaaactccaatctgcgaaggtcgctaataaccgtttgaacgaagtctatctagtcgaatctgaatttcaagttcaagaaaaccctgttcattcacattttttgatgggcgatattgaatttgatgacctttcttataagtatggttttggatgagataccttaacagatattaatctcacgattaaacaaggagataaggttagcctagttggagttagtggttctggtaaaacaactttagccaaaatgattgtcaatttctttgaaccctacaaagggcatatttccatcaatcatcaggatattaaaaacattgataaaaaagtcttgcgccgtcatattaattacctaccccaacaagcctatatctttaatggctctattttggaaaacttaaccttgggcggtaatcatatgattagtcaagaagatattctaaaagcttgtgaagtagctgaaatccgtcaagacattgaaagaatgcctatgggctatcaaactcagctctctgatggagctggtctatcaggaggacagaagcaacgaatcgctctcgctcgtgctcttttaactaaatctcctgttttaatactagatgaagctactagcggtcttgatgtcttgactgagaaaaaggttatagataatcttatgtctctaactgataaaaccattctctttgtagcccatcgtctcagtatagccgaacgaaccaaccgtgtcattgttcttgaccaggggaaaatcattgaagttggtagtcaccaagagttaatgcaggcgcaaggtttctaccatcatctattcaataaa

SEQ ID NO: 926 - skipped

SEQ ID NO: 927 - DNA, 591 bp, Streptococcus pneumoniae
ttgccaatgacttcttataaacgtacatttgttcctcaaatagatgcgagagactgtggtgtcgctgccttagcctcgattgctaaattctatggttcagatttttctctagctcacttgagagaacttgcaaagaccaataaagaagggacgactgctcttggcattgtaaaagccgctgatgaaatgggctttgaaacaagacctgttcaagcagataaaacgctctttgacatgagtgatgtcccctatccatttatcgttcacgttaacaaagaaggaaaactccaacattactatgttgtctatcaaacaaagaaagactatctgattattggtgatcctgacccttctgtaaaaatcactaaaatgtcaaaagaacgctttttctatgaatggactggagtagctatttttctagctaccaaacccagctatcaaccccataaagataaaaagaatggtctactaagcaagcttccttcctctgattttcaaacaaaaatctctcattgcttacattgttctctcaagcttattggtcactattatcaatataggtggttcttactatctccaaggaatcttgga

SEQ ID NO: 928 - protein, 197 aa, Streptococcus pneumoniae
  antibiotic ABC exporter BlpA, FRAMESHIFT (blpA)
MPMTSYKRTFVPQIDARDCGVAALASIAKFYGSDFSLAHLRELAKTNKEGTTALGIVKAADEMGFETRPVQADKTLFDMSDVPYPFIVHVNKEGKLQHYYVVYQTKKDYLIIGDPDPSVKITKMSKERFFYEWTGVAIFLATKPSYQPHKDKKNGLLSKLPSSDFQTKISHCLHCSLKLIGHYYQYRWFLLSPRNLG

SEQ ID NO: 929 - DNA, 195 bp, Streptococcus pneumoniae
atgaatacaaaaatgatggaacaattttctgttatggataatgaagaactcgaaatagttagtggaggaagaggcaatttaggatctgcaatcggtggttgtattggagcagtactattagctgctgcgactggtccgataactgggggagcagcaacacttatttgtgtaggttcaggaattatgtcctctttg

SEQ ID NO: 930 - protein, 65 aa, Streptococcus pneumoniae
  bacteriocin BlpI (blpI); Cellular location: membrane
MNTKMMEQFSVMDNEELEIVSGGRGNLGSAIGGCIGAVLLAAATGPITGGAATLICVGSGIMSSL

SEQ ID NO: 931 - DNA, 267 bp, Streptococcus pneumoniae
atgaatacaaaaatgttgtcacagttagaggttatggatactgaaatgcttgcgaaagttgaaggggggtatagctccactgattgtcaaaatgcactgattacaggagtcactacgggaattataactggtggaactggagcaggtttggccactttaggagtagctggacttgctggtgcatttgttggagcacacattggtgcaattgggggtggattaacatgcttaggaggtatggttggtgataaattgggactaagttgg

SEQ ID NO: 932 - protein, 89 aa, Streptococcus pneumoniae
  bacteriocin BlpJ (blpJ); Cellular location: membrane; Similar to strain R6 sequence 15902084 (3.E-07)
MNTKMLSQLEVMDTEMLAKVEGGYSSTDCQNALITGVTTGIITGGTGAGLATLGVAGLAGAFVGAHIGAIGGGLTCLGGMVGDKLGLSW

SEQ ID NO: 933 - DNA, 228 bp, Streptococcus pneumoniae
atggatacaaaaatgatgtcacaattttctgttatggatactgaaatgcttgcttgcgttgaaggtggcggatgcaattggggagattttgccaaagcaggtgttggaggaggagcagcaagaggtcttcaactaggcattaaaacaggaacatggcaaggtgcagcaactggtgctgcgggtggagctatacttggaggtgtagcctatgcagcaacatgttggtgg

SEQ ID NO: 934 - protein, 76 aa, Streptococcus pneumoniae
  bacteriocin BlpK (blpK); Cellular location: cytoplasm; Similar to strain R6 sequence 15902084 (1.E-39)
MDTKMMSQFSVMDTEMLACVEGGGCNWGDFAKAGVGGGAARGLQLGIKTGTWQGAATGAAGGAILGGVAYAATCWW

SEQ ID NO: 935 - DNA, 114 bp, Streptococcus pneumoniae
ttggtatcaatacaatataaagaggaaagtatgtttttcatgcttgcttttttaatttttacaattcaagaggttttgatgaccatttatgatttgagtgatccaaggtcaaaa

SEQ ID NO: 936 - protein, 38 aa, Streptococcus pneumoniae
  hypothetical protein; Cellular location: membrane
MVSIQYKEESMFFMLAFLIFTIQEVLMTIYDLSDPRSK

SEQ ID NO: 937 - DNA, 90 bp, Streptococcus pneumoniae
ttgagcaagaacatttacactgctagtatagcacttattttgaccttggatcactcaaatcataaatggtcatcaaaacctcttgaattg

SEQ ID NO: 938 - protein, 30 aa, Streptococcus pneumoniae
  hypothetical protein
MSKNIYTASIALILTLDHSNHKWSSKPLEL

SEQ ID NO: 939 - DNA, 162 bp, Streptococcus pneumoniae
atgaagaaaaaaatactgattattttcgttctgtatctaatcatgtccatctttctatatccgcttagggagagtgcttggtatcagctattttataccatagcctatgtgattgcagttatgatctattttgctatcaataaaaagaaaggagaaaagaaa

SEQ ID NO: 940 - protein, 54 aa, Streptococcus pneumoniae
  hypothetical protein; Cellular location: outside
MKKKILIIFVLYLIMSIFLYPLRESAWYQLFYTIAYVIAVMIYFAINKKKGEKK

SEQ ID NO: 941 - DNA, 402 bp, Streptococcus pneumoniae
atgaaaacttttcttgctaaaaaacggaacatcttccttgcgagattgttcttaggtcagttgcccttgcttgtttctacttatctatttctatctcgtcagtttttaaatttttccgtagttttccaatttcttttagtagttattaacttggcttctattttggttactgtttatctcactagggaaatgaggataagagagtttgaagatgatgatttggttagtcctagaaccaatcaacttatgttcatcggcttgacaggttttatgtctattatttgtttgtatagaggtatcacagcaggagaatcctaccaacaaataatcgcttatattggcgctgttctctgcttaatcatcatgcttctgctcatgtggggcttgaagtattataaaaag

SEQ ID NO: 942 - protein, 134 aa, Streptococcus pneumoniae
  immunity protein BlpL (blpL); Cellular location: membrane
MKTFLAKKRNIFLARLFLGQLPLLVSTYLFLSRQFLNFSVVFQFLLVVINLASILVTVYLTREMRIREFEDDDLVSPRTNQLMFIGLTGFMSIICLYRGITAGESYQQIIAYIGAVLCLIIMLLLMWGLKYYKK

SEQ ID NO: 943 - DNA, 387 bp, Streptococcus pneumoniae
atgaattatgaagcaagtaaacaactaactgatgcacgatttaagcgtcttgttggtgttcagcgcacgacttttgaagagatgctagctgtattaaaaacagcttatcaacttaaacacgcaaaaggtggacgaaaacctaaattaagcctagaagaccttcttatggccactcttcaatatgtgcgagaataccgcacttatgaagaaattgcggctgattttggtgttcacgaaagcaacttactccgtcggagccaatgggttgaagtaactcttgttcaaagtggtgttacgatttcaagaactcctctcagttctgaggacacggtaatgattgatgcgacggaagtaaaaatcaatcgccctaaaaaaagaattagcgaa

SEQ ID NO: 944 - protein, 129 aa, Streptococcus pneumoniae
  IS1381, transposase OrfA FRAMESHIFT; Cellular location: cytoplasm; Similar to strain R6 sequence 15902886 (5.E-67)
MNYEASKQLTDARFKRLVGVQRTTFEEMLAVLKTAYQLKHAKGGRKPKLSLEDLLMATLQYVREYRTYEEIAADFGVHESNLLRRSQWVEVTLVQSGVTISRTPLSSEDTVMIDATEVKINRPKKRISE

SEQ ID NO: 945 - DNA, 387 bp, Streptococcus pneumoniae
atgaagactcaagcgattgtcacaagtcaagggagaattgtttctttggatatcactgtgaactattgtcatgatatgaagttgttcaaaatgagtcgcagaaatatcggacaagctggtaaaatcttggctgacagtggttatcaagggctcatgaagatatatcctcaagcacaaacttcacgtaaatccagcaaactcaaaccgctaacagttgaagataaagcctgtaaccatgcgctatctaaggagagaagcaaggttgagaacatctttgccaaagtaaaaacgtttaaaatgttttcaacaacctatcgaagtcatcgtaaacgcttcggattacgaatgaatttgagtgctggtattatcaatcatgaactaggattc

SEQ ID NO: 946 - protein, 129 aa, Streptococcus pneumoniae
  IS1381, transposase OrfB FRAMESHIFT; Cellular location: cytoplasm; Similar to strain R6 sequence 15902885 (5.E-69)
MKTQAIVTSQGRIVSLDITVNYCHDMKLFKMSRRNIGQAGKILADSGYQGLMKIYPQAQTSRKSSKLKPLTVEDKACNHALSKERSKVENIFAKVKTFKMFSTTYRSHRKRFGLRMNLSAGIINHELGF

SEQ ID NO: 947 - DNA, 252 bp, Streptococcus pneumoniae
atggatacaaaaattatggaacaatttcatgaaatggatataactatgttatctagtattgaaggaggcaagaataattggcaaactaatgtcttagaaggtggtggtgctgcttttggtggctgggggctagggacagctatttgtgctgcgagtggtgttggagcaccatttatgggagcatgtggatacataggagctaaatttggtgtggatctttgggcaggagtaacaggggcaacgggtggattt

SEQ ID NO: 948 - protein, 84 aa, Streptococcus pneumoniae
  bacteriocin BlpM (blpM); Cellular location: cytoplasm; Similar to strain R6 sequence 15902084 (2.E-05)
MDTKIMEQFHEMDITMLSSIEGGKNNWQTNVLEGGGAAFGGWGLGTAICAASGVGAPFMGACGYIGAKFGVDLWAGVTGATGGF

SEQ ID NO: 949 - DNA, 159 bp, Streptococcus pneumoniae
gtgatacactatatggatacaaaaatgatgtcacaatttgcagttatggataatgaaatgcttgcttgcgttgaaggtggagatattgattggggaagaaaaattagttgtgcagcaggggttgcatatggcgcaattgatgggtgtgcaacaacggtt

SEQ ID NO: 950 - protein, 53 aa, Streptococcus pneumoniae
  bacteriocin BlpO (blpO); Cellular location: cytoplasm; Similar to strain R6 sequence 15902084 (4.E-09)
MIHYMDTKMMSQFAVMDNEMLACVEGGDIDWGRKISCAAGVAYGAIDGCATTV

SEQ ID NO: 951 - DNA, 117 bp, Streptococcus pneumoniae
gtgtgcaacaacggtttgacatttctattgggaccatttgctataggaataggtgtaactggtgctgcaggtggagctatacttggaggtgtagcctatgcagcaatatgttggtgg

SEQ ID NO: 952 - protein, 39 aa, Streptococcus pneumoniae
  hypothetical protein (Amphipathic pore-forming); Cellular location: outside; Similar to strain R6 sequence 15902084 (2.E-07)
MCNNGLTFLLGPFAIGIGVTGAAGGAILGGVAYAAICWW

SEQ ID NO: 953 - DNA, 165 bp, Streptococcus pneumoniae
ttggttagtcctagaaccaatcaacttatgtttatcggcttggcagattttatgtttgtcatttgtttgtatagaggtatttcagaaacagaattctatcaacaactaatcgcttatataggtgtattctctgcttgtttatcacgcttctgctcatgtggggct

SEQ ID NO: 954 - protein, 55 aa, Streptococcus pneumoniae
  hypothetical protein; Cellular location: membrane
MVSPRTNQLMFIGLADFMFVICLYRGISETEFYQQLIAYIGVFSACLSRFCSCGA

SEQ ID NO: 955 - DNA, 396 bp, Streptococcus pneumoniae
atggaggtatttaatatgaaatacagattattttttgttattttcttgagtagtgtgttggatattcttttagggacatttttacaaatctctatcgtatctattgggtggcttgttctttacagtggtttgtttgaagcaggagttttccttcttgctaataaaggggtggcggtaaaaatcaaggaagtagatattcgaaatcgctttaaatttatttttggaaaaaccttatggtttcaaattcttttgctcatctttttgataatcaaactttatcttggtttggatgcgaggttgattttattctatggacatattttcattgtctttaatgccttaatgtatctattatctagtagtcaggttagccttaaaaaaaacaaactgtcttct

SEQ ID NO: 956 - protein, 132 aa, Streptococcus pneumoniae
  immunity protein BlpX (blpX); Cellular location: membrane
MEVFNMKYRLFFVIFLSSVLDILLGTFLQISIVSIGWLVLYSGLFEAGVFLLANKGVAVKIKEVDIRNRFKFIFGKTLWFQILLLIFLIIKLYLGLDARLILFYGHIFIVFNALMYLLSSSQVSLKKNKLSS

SEQ ID NO: 957 - DNA, 687 bp, Streptococcus pneumoniae
atgaaaaagtatcaacttctattcaaaataagtgcagtcttctcttacttatttttcgtatttagtctttctcagctgacgcttatcgtccaaaactattggcaattttcttctcagataggcaatttattctggattcaaaatatcttgagtttactttttattggagtcatgattgtggttcttgttaagacaggccatggttatctcttccgcattccaagaaaaaaatggctttggtattcgattttgacagtattagtgctagtgttccagatctcttttaacgttcagacagctaaacatgttcagtcaactgcggaaggttgggctgtattgattggttatagtgggactaactttgcagagctaggtatttatatagccctgttctttctggttccactgatggaagaattgatttatagaggattactgcaacatgctttctttaagcattcgcgatttggtcttgatttgcttcttccttctattttatttgctctccctcatttttcaagcctgcctagtctgttagatatcttcgtctttgcaacagttggaatcatctttgctggtttgacccgctataccaagagcatttatccatcctatgcggtgcatgtgatcaataatattgtagcgaccttcccgtttttgctcacttttctacatagggtcttgggg

SEQ ID NO: 958 - protein, 229 aa, Streptococcus pneumoniae
  immunity protein BlpY (blpY); Cellular location: membrane; Similar to strain R6 sequence 15902516 (e-122)
MKKYQLLFKISAVFSYLFFVFSLSQLTLIVQNYWQFSSQIGNLFWIQNILSLLFIGVMIVVLVKTGHGYLFRIPRKKWLWYSILTVLVLVFQISFNVQTAKHVQSTAEGWAVLIGYSGTNFAELGIYIALFFLVPLMEELIYRGLLQHAFFKHSRFGLDLLLPSILFALPHFSSLPSLLDIFVFATVGIIFAGLTRYTKSIYPSYAVHVINNIVATFPFLLTFLHRVLG

SEQ ID NO: 959 - DNA, 231 bp, Streptococcus pneumoniae
atgtataaacacttatttttcctagattccaaaactttagatcggttgacaccctatattctagtcttggcttctgacaccattgcttttaatgtttttgtgctaacctttgtatctgcggtggtttttaatttcctaaattccatgctagctttaatggctatattcataggggctggctatgtggtcggattttggttactaatactcaatgaaaatcaaagagcaaac

SEQ ID NO: 960 - protein, 77 aa, Streptococcus pneumoniae
  BlpZ protein, fusion (blpZ); Cellular location: membrane; Similar to strain R6 sequence 15902517 (2.E-39)
MYKHLFFLDSKTLDRLTPYILVLASDTIAFNVFVLTFVSAVVFNFLNSMLALMAIFIGAGYVVGFWLLILNENQRAN

SEQ ID NO: 961 - DNA, 204 bp, Streptococcus pneumoniae
atgaaatttatcaaaaaactccataaaattatcctcctcaacaaacagacttcctacacgtcattctttagttctagcctttccaaaacaaaccattttatactcttcgaaaatcaaattcaaaccacgtcaacgtcgccttgccgtactcaagtacagcctgcggctagtttcctagtttgctctttgattttcattgagtat

SEQ ID NO: 962 - protein, 68 aa, Streptococcus pneumoniae
  box element
MKFIKKLHKIILLNKQTSYTSFFSSSLSKTNHFILFENQIQTTSTSPCRTQVQPAASFLVCSLIFIEY

SEQ ID NO: 963 - DNA, 609 bp, Streptococcus pneumoniae
atggagttttttgataaatttcatgccttgtgttttggatttttagtactaataattgtcattacagttccttatacgattaaccatgggggtttttttcaaaatgaatctgcattgattcttgtaagtcttcttgtaacctcgctgagtgttgcttatgctagaaagtttgaaatgatttcttttgggatgttaagcaagaaacaacttttgcttttcattgcaatctttcttctaagtgtacttgagacgctggtttatattcatttcttcgctgtttcttctggctcaggggtccaacacttggcggaagtcagcagaggaatttccctgtctttgattttgactacctcagtttttggccccatccaggaggaactcattttcagaggacttcttcaaggtgcggtttttgacaattcttggttagggcttgtgctaacttcctctctcttttctttcatgcatggaccttctaatgtcccttcgtttattttttatctacttgggggtttgttgctgggctttgcttataaaaagagtcaaaacctatgggtttctactctagtccatatgctttacaacagttggccactcttatattattta

SEQ ID NO: 964 - protein, 203 aa, Streptococcus pneumoniae
  conserved domain protein (ABC transporter ATP); Cellular location: membrane; Similar to strain R6 sequence 15902518 (e-110)
MEFFDKFHALCFGFLVLIIVITVPYTINHGGFFQNESALILVSLLVTSLSVAYARKFEMISFGMLSKKQLLLFIAIFLLSVLETLVYIHFFAVSSGSGVQHLAEVSRGISLSLILTTSVFGPIQEELIFRGLLQGAVFDNSWLGLVLTSSLFSFMHGPSNVPSFIFYLLGGLLLGFAYKKSQNLWVSTLVHMLYNSWPLLYYL

SEQ ID NO: 965 - DNA, 120 bp, Streptococcus pneumoniae
ttgccacttttcccaggtatgggagtcagtgttagctcattatcacccaaatccatttctttcctccgtataaagtttccttactattctactagtttttggcctattcgtcaaccactc

SEQ ID NO: 966 - protein, 40 aa, Streptococcus pneumoniae
  hypothetical protein; Cellular location: cytoplasm
MPLFPGMGVSVSSLSPKSISFLRIKFPYYSTSFWPIRQPL

SEQ ID NO: 967 - DNA, 729 bp, Streptococcus pneumoniae
atgggtagctatcctgatgggaagcgcatctttgtaaaaatgaacacctctccaatcctacctggtctagctagagaacaaattgctccacaattattatggagtcgtcgtttggcagatgggcgtgatatgtgtgctcaagaatggttgacaggcaagatattgaccccctatgatatgaatcgtaagcaaatcgtcaatattttaacccgtcttcatcgctcacgtccgttgatgacacaattgagtcgtttgggctatgccatggaaacacctgtagatttactacagtcttggcaggaaacggctccagatgctttgcgtaaaaatcattttatcagtgaagtgatggctgatttacgtcagactattccaggatttagagaggaccatgcgaccattgtccatggagatgtacgacatagtaattggattgagacagatagtggcttgatttatttagtagattgggattcggttcgcttgaccgatcgcatgtttgatgtggcccatatgctctgccattatatttcagaacatcagtggaaggaatggttgacctactacggttacaagtacaatcaaacggtattaagtaaattgtattggtatggtcaattgtcttatttgagtcagatttccaagtattatatgaaccaagatttagaaaatgtcaatcgggagattcatggtttgcgtcatttccgagacaagtatggaaagagaaga

SEQ ID NO: 968 - protein, 243 aa, Streptococcus pneumoniae
  conserved hypothetical protein; Cellular location: cytoplasm; Similar to strain R6 sequence 15902519 (e-146)
MGSYPDGKRIFVKMNTSPILPGLAREQIAPQLLWSRRLADGRDMCAQEWLTGKILTPYDMNRKQIVNILTRLHRSRPLMTQLSRLGYAMETPVDLLQSWQETAPDALRKNHFISEVMADLRQTIPGFREDHATIVHGDVRHSNWIETDSGLIYLVDWDSVRLTDRMFDVAHMLCHYISEHQWKEWLTYYGYKYNQTVLSKLYWYGQLSYLSQISKYYMNQDLENVNREIHGLRHFRDKYGKRR

SEQ ID NO: 969 - DNA, 633 bp, Streptococcus pneumoniae
atgagagttagaaatcgtaaaggggcaacagaattactagaggcaaatccccagtatgtggtcctcaatcccttggaagccaaggcaaaatggcgggacttgtttggcaatgataatcccattcatgtggaagttggaagtggaaagggtgcctttgtttcaggtatggccaagcaaaaccctgacatcaactatatcgggattgatattcaaaagtctgttttgagctacgctttggacaaggtgcttgaagttggagtgcctaacatcaagctcttgtgggtagatggttctgacttaactgactactttgaagacggtgagattgatcgcttgtatctgaacttttcagatccatggccgaaaaaacgccatgaaaagcgtcgtttgacctacaagaccttcttggataccttcaaacgtatcttgcctgaaaatggagaaattcatttcaagacggataaccgtggcttgtttgagtacagtttagtgagcttttctcaatatggcatgaaactcaatggtgtctggttagatttgcatgccagtgattttgaaggcaatgtcatgacagaatacgagcaaaaattctcaaacaaggggcaagttatctaccgagttgaggcagaattt

SEQ ID NO: 970 - protein, 211 aa, Streptococcus pneumoniae
  conserved hypothetical protein; Cellular location: cytoplasm; Similar to strain R6 sequence 15902520 (e-123)
MRVRNRKGATELLEANPQYVVLNPLEAKAKWRDLFGNDNPIHVEVGSGKGAFVSGMAKQNPDINYIGIDIQKSVLSYALDKVLEVGVPNIKLLWVDGSDLTDYFEDGEIDRLYLNFSDPWPKKRHEKRRLTYKTFLDTFKRILPENGEIHFKTDNRGLFEYSLVSFSQYGMKLNGVWLDLHASDFEGNVMTEYEQKFSNKGQVIYRVEAEF

SEQ ID NO: 971 - DNA, 150 bp, Streptococcus pneumoniae
gtggacgcaatcgcaacaatcgtagaattagtcagagaagttgtagaacctgtcatagaagctccttttgaactcgtggatatcgagtatggaaagattggcagtgacatgattctcagtatttttgtagataaacccgaagaattacct

SEQ ID NO: 972 - protein, 50 aa, Streptococcus pneumoniae
  hypothetical protein; Cellular location: cytoplasm; Similar to strain R6 sequence 15902521 (6.E-86)
MDAIATIVELVREVVEPVIEAPFELVDIEYGKIGSDMILSIFVDKPEELP

SEQ ID NO: 973 - DNA, 327 bp, Streptococcus pneumoniae
ttgaacgacacggcagacttgacagaaattatcagtcctgtcctagacaccatcaagccagatcccttcccagaacaatatttcctagaaattaccagtccaggtttggaacgtcctttgaaaaccaaggatgccgtcgctggagcggttggaaaatacatccatgtcgggctctaccaagccatcgataagcaaaaggtctttgaaggaaccttgttggccttcgaagaggacgagttgactatggaatatatggacaagacgcgtaagaaaaccgtccaaattccatacagtttagtatcaaaagcacgtttagcagttaaatta

SEQ ID NO: 974 - protein, 109 aa, Streptococcus pneumoniae
  conserved hypothetical protein, FRAMESHIFT
MNDTADLTEIISPVLDTIKPDPFPEQYFLEITSPGLERPLKTKDAVAGAVGKYIHVGLYQAIDKQKVFEGTLLAFEEDELTMEYMDKTRKKTVQIPYSLVSKARLAVKL

SEQ ID NO: 975 - DNA, 93 bp, Streptococcus pneumoniae
ttgtcttcttccaaaatgcggaaggcctctagcatttctttactcatgttttcttcacttttgaatcctcaaaagctatcctttctttttcta

SEQ ID NO: 976 - protein, 31 aa, Streptococcus pneumoniae
  hypothetical protein
MSSSKMRKASSISLLMFSSLLNPQKLSFLFL

SEQ ID NO: 977 - DNA, 1134 bp, Streptococcus pneumoniae
atgagtaaagaaatgctagaggccttccgcattttggaagaagacaagggaatcaaaaaagaagatatcatcgacgcagtagtagagtcgcttcgttccgcttatcgcagacgctatggtcagtcagacagcgtagctattgacttcaacgaaaaaacaggtgactttacagtttatactgtccgtgaagttgttgatgaagtatttgatagccgtttggaaatcagcttgaaagatgctcttgccattaattcagcttatgaacttggagacaaaatcaagtttgaagaagcaccagctgagtttggtcgtgtagcagcccaatctgccaaacaaaccatcatggaaaaaatgcgcaagcaaacacgtgccatcacttacaatacttacaaagaacatgagcaagaaatcatgtctggtacagtagaacgctttgacaaccgctttatctatgtcaaccttggtagcatcgaagcccaattgtcaaaacaagaccaaattcctggagaagtttttgcttctcatgatcgtatcgaagtttatgtttacaaggttgaagacaaccctcgtggtgtgaacgtctttgttagccgtagtcatccagaaatgatcaaacgtttaatggagcaagaaattccagaagtttatgatggaactgttgaaatcatgagcgtggctcgtgaagcaggtgaccgtacgaaggttgctgttcgtagccacaatccaaacgtggatgctatcggtacaatcgttggacgtggtggtgctaatatcaagaagattactagcaaattccacccagctcgttacgatgctaaaaatgaccgcatggtaccaatcgaagaaaatatcgatgttatcgagtgggtagcagatccagctgaatttatctacaatgccatcgctcctgctgaggttgaccaagttatctttgatgaaaacgacagcaaacgtgccttggtggttgttccagataacaagctttctcttgccattggtcgtcgtggacaaaacgtgcgcttggcggctcacttgactggttaccgtatcgatatcaagtctgctagcgaatttgaagccatggaagacgctgcttcagtagagttggaagtagaaaacgatactgtagaagaa

SEQ ID NO: 978 - protein, 378 aa, Streptococcus pneumoniae
  N utilization substance protein A (nusA); Cellular location: cytoplasm; Similar to strain R6 sequence 15902522 (0.E+01)
MSKEMLEAFRILEEDKGIKKEDIIDAVVESLRSAYRRRYGQSDSVAIDFNEKTGDFTVYTVREVVDEVFDSRLEISLKDALAINSAYELGDKIKFEEAPAEFGRVAAQSAKQTIMEKMRKQTRAITYNTYKEHEQEIMSGTVERFDNRFIYVNLGSIEAQLSKQDQIPGEVFASHDRIEVYVYKVEDNPRGVNVFVSRSHPEMIKRLMEQEIPEVYDGTVEIMSVAREAGDRTKVAVRSHNPNVDAIGTIVGRGGANIKKITSKFHPARYDAKNDRMVPIEENIDVIEWVADPAEFIYNAIAPAEVDQVIFDENDSKRALVVVPDNKLSLAIGRRGQNVRLAAHLTGYRIDIKSASEFEAMEDAASVELEVENDTVEE

SEQ ID NO: 979 - DNA, 291 bp, Streptococcus pneumoniae
atgaaaacaagaaaaatccctttgcgcaagtctgttgtgtctaacgaagtgattgataagcgtgatttgctccgcattgtcaagaacaaggaaggacaagtctttattgatcctacgggcaaggccaatggccgcggcgcttatatcaaactagacaatgcagaagccctagaggcgaaaaagaagaaggtctttaaccgcagctttagcatggaagtggaagaaagcttttatgacgagttgatcgcttatgtggatcacaaagtgaaaagaagagagttgggacttgaa

SEQ ID NO: 980 - protein, 97 aa, Streptococcus pneumoniae
  conserved hypothetical protein; Cellular location: cytoplasm; Similar to strain R6 sequence 15902523 (9.E-51)
MKTRKIPLRKSVVSNEVIDKRDLLRIVKNKEGQVFIDPTGKANGRGAYIKLDNAEALEAKKKKVFNRSFSMEVEESFYDELIAYVDHKVKRRELGLE

SEQ ID NO: 981 - DNA, 297 bp, Streptococcus pneumoniae
ttgaataagcaaaagataagtaatctcttggggcttgctcagcgagcagggcgcatcatatcgggtgaagaattggtggtcaaggccattcaagacggcaaggccaagttggtctttctagctcatgatgctggacccaatctgaccaagaagattcaagataaaagtcattattatcaagtagaaattgtaaccgtgttttcaacactggaattaagcatagcagtcgggaaatcgagaaaggttttggctgtaacagatgctggatttacaaagaaaatgaggtctcttatggaa

SEQ ID NO: 982 - protein, 99 aa, Streptococcus pneumoniae
  ribosomal protein L7A family; Cellular location: membrane; Similar to strain R6 sequence 15902524 (3.E-49)
MNKQKISNLLGLAQRAGRIISGEELVVKAIQDGKAKLVFLAHDAGPNLTKKIQDKSHYYQVEIVTVFSTLELSIAVGKSRKVLAVTDAGFTKKMRSLME

SEQ ID NO: 983 - DNA, 2874 bp, Streptococcus pneumoniae
ttgtctaagaaaagattgtacgaaatcgcaaaagaacttggaaaagaaagtaaagaagttgtagcgcgtgcaaaagagttgggcttggatgtgaaaagccactcatcaagtgtggaagaagctgtcgctgcaaaaattgctgccagctttaagcctgcagctgctccgaaagtagaagcaaaacctgcagccccaaaagtaagtgcagaaaagaaagccgaaaaatctgagccagctaaaccagctgtagctaaggaagaggcaaaacctgcagccccaaaagcaagtgcagaaaagaaagccgaaaagtctgaaccagtaaaaccagctgtagccaaggaagaggcaaaaccagctgagccagtcactccgaaaacagaaaaagtagcggctaaaccgcaaagtcgtaatttcaaggctgagcgtgaagcacgtgctaaagagcaggcagagcgacgcaagcaaaataagggcaataaccgtgaccaacaacaaaacggaaaccgtcagaaaaacgacggccgtaatggtggaaaacaaggtcaaagcaaccgcgacaatcgtcgctttaatgaccaagctaagaagcagcaaggtcagcaaaaacgtagaaatgagcgccgtcagcaagaggataaacgttcaaatcaagcggctccacgtattgactttaaagcccgtgcagcagccctaaaagcagagcaaaatgcagagtacgctcgttcaagtgaggaacgcttcaagcagtatcaggctgctaaagaagccttggctcaagctaacaaacgcaaggaaccagaggaaatctttgaagaagcggctaagttagctgaacaagcacagcaagttcaagcagtggttgaagtcgtccctgagaaaaaagaacctgcagtggatacacgtcgtaaaaaacaagctcgaccagacaaaaatcgtgacgattatgatcatgaagaagatggtcctagaaaacaacaaaagaatcgaagtagtcaaaatcaagtgagaaatcaaaagaatagtaactggaataacaacaaaaagaacaaaaaaggcaataacaagaacaaccgtaatcagactccaaaacctgttacggagcgtaaattccatgaattgccaacagaatttgaatatacagatggtatgaccgttgcggaaatcgcaaaacgtatcaaacgtgaaccagctgaaattgttaagaaacttttcatgatgggtgtcatggccacacaaaaccaatccttggatggggaaacaattgaactcctcatggtggattacggtatcgaagccaaacaaaaggttgaagtggataatgctgacatcgaacgtttctttgtcgaagatggttatctcaatgaagatgaattggttgagcgtccaccagttgttactatcatgggacacgttgaccacggtaaaacaacccttttggatactcttcgtaactcacgtgttgcgacaggtgaagcaggtggtattactcagcatatcggtgcctaccaaatcgtggaaaatggtaagaagattaccttccttgatacaccaggacacgcggcctttacatcaatgcgtgcgcgtggtgcttctgttaccgatattacgatcttggtcgtagcggcagatgacggggttatgcctcagactattgaagccatcaaccactcaaaagcagctaacgttccaatcatcgtagctattaacaagattgataaaccaggtgctaacccagaacgcgttatcggtgaattggcagagcatggtgtgatgtcaactgcttggggtggagattctgaatttgttgaaatttcggctaaattcaaccaaaatatcgaagaattgttggaaacagtccttcttgtggctgaaatccaagaactcaaagcagacccaacagttcgtgcgatcggtacggttatcgaagcgcgcttggataaaggaaaaggtgcggtcgcaacccttcttgtacaacaaggtaccttgaatgttcaagacccaatcgttgtcggaaataccttcggtcgtgtccgtgctatgaccaacgaccttggtcgtcgtgttaaagttgctggaccatcaacaccagtctctatcacaggtttgaacgaagcaccgatggcgggtgaccactttgccgtttacgaggatgaaaaatctgcgcgtgcagcaggtgaagagcgtgccaaacgtgccctcatgaaacaacgtcaagctacccaacgtgttagccttgaaaacctctttgatacccttaaagctggggaactcaaatctgttaatgttatcatcaaggctgatgtacaaggttctgttgaagccctttctgcctcacttcaaaagattgacgtggaaggtgtcaaagtgactatcgtccactcagcggtcggtgctatcaacgaatcagacgtgacccttgccgaagcttcaaatgcctttatcgttggtttcaacgtacgccctacaccacaagctcgtcaacaagcagaagctgacgatgtggaaatccgtcttcacagcattatctacaaggttatcgaagagatggaagaagctatgaaagggatgcttgatccagaatttgaagaaaaagttattggtgaagcggttatccgtgaaaccttcaaggtgtctaaagtgggaactatcggtggatttatggttatcaacggtaaggttgcccgtgactctaaagtccgtgttatccgtgatggtgtcgttatctatgatggtgaactcgcaagcttgaaacactataaagacgacgtgaaagaagtgacaaacggtcgtgaaggtggattgatgatcgacggctacaatgatattaagatggatgatgtgattgaggcgtatgtcatggaagaaatcaagaga

SEQ ID NO: 984 - protein, 958 aa, Streptococcus pneumoniae
  translation initiation factor IF-2 (infB); Cellular location: cytoplasm; Similar to strain R6 sequence 15902525 (0.E+01)
MSKKRLYEIAKELGKESKEVVARAKELGLDVKSHSSSVEEAVAAKIAASFKPAAAPKVEAKPAAPKVSAEKKAEKSEPAKPAVAKEEAKPAAPKASAEKKAEKSEPVKPAVAKEEAKPAEPVTPKTEKVAAKPQSRNFKAEREARAKEQAERRKQNKGNNRDQQQNGNRQKNDGRNGGKQGQSNRDNRRFNDQAKKQQGQQKRRNERRQQEDKRSNQAAPRIDFKARAAALKAEQNAEYARSSEERFKQYQAAKEALAQANKRKEPEEIFEEAAKLAEQAQQVQAVVEVVPEKKEPAVDTRRKKQARPDKNRDDYDHEEDGPRKQQKNRSSQNQVRNQKNSNWNNNKKNKKGNNKNNRNQTPKPVTERKFHELPTEFEYTDGMTVAEIAKRIKREPAEIVKKLFMMGVMATQNQSLDGETIELLMVDYGIEAKQKVEVDNADIERFFVEDGYLNEDELVERPPVVTIMGHVDHGKTTLLDTLRNSRVATGEAGGITQHIGAYQIVENGKKITFLDTPGHAAFTSMRARGASVTDITILVVAADDGVMPQTIEAINHSKAANVPIIVAINKIDKPGANPERVIGELAEHGVMSTAWGGDSEFVEISAKFNQNIEELLETVLLVAEIQELKADPTVRAIGTVIEARLDKGKGAVATLLVQQGTLNVQDPIVVGNTFGRVRAMTNDLGRRVKVAGPSTPVSITGLNEAPMAGDHFAVYEDEKSARAAGEERAKRALMKQRQATQRVSLENLFDTLKAGELKSVNVIIKADVQGSVEALSASLQKIDVEGVKVTIVHSAVGAINESDVTLAEASNAFIVGFNVRPTPQARQQAEADDVEIRLHSIIYKVIEEMEEAMKGMLDPEFEEKVIGEAVIRETFKVSKVGTIGGFMVINGKVARDSKVRVIRDGVVIYDGELASLKHYKDDVKEVTNGREGGLMIDGYNDIKMDDVIEAYVMEEIKR

SEQ ID NO: 985 - DNA, 141 bp, Streptococcus pneumoniae
ttggacacgtggatcacggactttcttttgcaaaatctcattgacttcacgcttgatttccatgcccacacgatctgtacggaaatgatttgccatgatattcctttctctactttgaaccaaaagctaggccagcagacc

SEQ ID NO: 986 - protein, 47 aa, Streptococcus pneumoniae
  hypothetical protein
MDTWITDFLLQNLIDFTLDFHAHTICTEMICHDIPFSTLNQKLGQQT

SEQ ID NO: 987 - DNA, 348 bp, Streptococcus pneumoniae
atggcaaatcatttccgtacagatcgtgtgggcatggaaatcaagcgtgaagtcaatgagattttgcaaaagaaagtccgtgatccacgtgtccaaggtgtgaccatcatagatgttcagatgctgggtgacttgtctgttgccaaggtttattacaccattttgagtaaccttgcttcggataaccaaaaagcccaaatcgggcttgaaaaagcaactggtaccatcaaacgtgaacttggtcgcaatttgaaattgtacaaaatcccagatttgaccttcgtcaaagacgagtccatcgagtatggaaacaagattgacgagatgctacgcaatctggataagaac

SEQ ID NO: 988 - protein, 116 aa, Streptococcus pneumoniae
  ribosome-binding factor A (rbfA); Cellular location: cytoplasm; Similar to strain R6 sequence 15902526 (4.E-60)
MANHFRTDRVGMEIKREVNEILQKKVRDPRVQGVTIIDVQMLGDLSVAKVYYTILSNLASDNQKAQIGLEKATGTIKRELGRNLKLYKIPDLTFVKDESIEYGNKIDEMLRNLDKN

SEQ ID NO: 989 - DNA, 813 bp, Streptococcus pneumoniae
atgataaggtgcaaaaaagaaataaggagtttgtatatggctgaacaagacttagctatgcaagtattgcaacaagtggtgaaactacctgttgttaaggttgatcgttcgaaatttttagtggataagttttccaaagaattggatccaaaagatattcctaccttattggaacaaggtccaacgactcttctatctcaagaaatattagatcgtgtagctaatgcttgtattcgggacaatgtattattagcgagtgggacttctgttttggcaggattacctggagggcttgctatggcaattaccattccagctgatgtggctcaattttatgctttctctctgaaattggctcaagaattaggttatatttatggttatgaggatctttgggcttcacgagaggagttgagtgaagatgctcaaaataccctcttgctttatctaggcgtaatgttaggggtgaatggaaccgctgctttgctacgtgttggtagtataacaattgccaaacaggtaatgaaaatagtgcctaataaagctttaacaaagacgctttggtaccctattttgaaaaaagtcttaaaaatatttggtgtgaatcttaccaagggagggttggccaaaggaatggggaaatttattcctatcttgggtggtatcatttcaggtggtttaacctttgcaactatgaaaccaatgggggaaagcttgcagaaagaattatccaagctagtcaactatagtgaagttcaatatcaagaagatgttgaaacaatccgaaaagaggctgaaatcatcaaaggagag

SEQ ID NO: 990 - protein, 271 aa, Streptococcus pneumoniae
  conserved hypothetical protein; Cellular location: membrane; Similar to strain R6 sequence 15902527 (e-148)
MIRCKKEIRSLYMAEQDLAMQVLQQVVKLPVVKVDRSKFLVDKFSKELDPKDIPTLLEQGPTTLLSQEILDRVANACIRDNVLLASGTSVLAGLPGGLAMAITIPADVAQFYAFSLKLAQELGYIYGYEDLWASREELSEDAQNTLLLYLGVMLGVNGTAALLRVGSITIAKQVMKIVPNKALTKTLWYPILKKVLKIFGVNLTKGGLAKGMGKFIPILGGIISGGLTFATMKPMGESLQKELSKLVNYSEVQYQEDVETIRKEAEIIKGE

SEQ ID NO: 991 - DNA, 180 bp, Streptococcus pneumoniae
atgaatcctatcaaagcttttgctaaaatttatggtaattactttttgaccgtgcaaggtgtaaaagtgatgaaaacgataaagaaagctgaccatgtcgttgttggtctggggaaactttttattgccgacaagttaatggatacggctcggtggctcattaagccagaggagagagaa

SEQ ID NO: 992 - protein, 60 aa, Streptococcus pneumoniae
  hypothetical protein; Cellular location: cytoplasm; Similar to strain R6 sequence 15902528 (9.E-26)
MNPIKAFAKIYGNYFLTVQGVKVMKTIKKADHVVVGLGKLFIADKLMDTARWLIKPEERE

SEQ ID NO: 993 - DNA, 231 bp, Streptococcus pneumoniae
gtggagttcctgctagttctctgcaacttggattaccatctagataagtttaaagagccaatccaatatcttaaacactatcttgtaaaacagcaattggactgcaaaagagatgatcatccaaaagaatttcacaatcccaataatcggtttgataaaaagaatagcaagaagaccaaaaaaatttcattctctctcctctggcttaatgagccaccgagccgtatccat

SEQ ID NO: 994 - protein, 77 aa, Streptococcus pneumoniae
  hypothetical protein; Cellular location: cytoplasm
MEFLLVLCNLDYHLDKFKEPIQYLKHYLVKQQLDCKRDDHPKEFHNPNNRFDKKNSKKTKKISFSLLWLNEPPSRIH

SEQ ID NO: 995 - DNA, 150 bp, Streptococcus pneumoniae
atgaaaatcaaagagcaaactaggaagctagccgcaggttgctcaaaacagtgttttgaggttgtagatagaactgacgaagtcagctcaaaacaccgttttgaggttgtggatagaactgacgaagtcagtaacatatatactgcaagg

SEQ ID NO: 996 - protein, 50 aa, Streptococcus pneumoniae
  box element
MKIKEQTRKLAAGCSKQCFEVVDRTDEVSSKHRFEVVDRTDEVSNIYTAR

SEQ ID NO: 997 - DNA, 243 bp, Streptococcus pneumoniae
atggaggtcgtcatggacaatatcatcgatgtgtcaattcctgttgcagaagtggtggacaagcatccagaagtcttggaaattctagtggagttgggttttaaaccccttgccaatcccttaatgcgcaatacagttggtcgtaaagtatcacttaaacagggttctaagctagcaggaactcctatggacaagattgtacgcacactggaagcgaatggctacgaagtgattggattagac

SEQ ID NO: 998 - protein, 81 aa, Streptococcus pneumoniae
  conserved domain protein; Cellular location: cytoplasm; Similar to strain R6 sequence 15902529 (2.E-41)
MEVVMDNIIDVSIPVAEVVDKHPEVLEILVELGFKPLANPLMRNTVGRKVSLKQGSKLAGTPMDKIVRTLEANGYEVIGLD

SEQ ID NO: 999 - DNA, 1332 bp, Streptococcus pneumoniae
atgacagatgaacggattcatatcctacgggatattttgttagaattgcacaatggcgcctctcctgagtcggttcaagatcgctttgatgcgacctttacgggcgtgtcagccatcgagatttcccttatggagcacgagctgatgaactcggattcgggcgtcacttttgaagatgttatggaactctgtgatgtccatgccaatctttttaaaaatgctatcaaaggtgtcgaagtttcagatactgagcatccaggtcacccagttcgtgtcttcaaagaagaaaatctggctctccgtgcggccttgattcgcattcgtagattgttagatacctatgagtctatggaagacgaggaaatgctggcggagatgcgtaagggtttggtgcgtcagatgggacttgtgggtcaatttgacatccattaccaacgtaaggaagaactcttctttcctatcatggagcgctatggacacgattcacctcccaaagttatgtggggagtggatgatcagattagggaactctttcaaacagctctaacgacagccaagtcactaccagaagtgtcaattagcagtgtaaaggaagcttttgaagcttttgcgacagagtttgaaagtatgattttcaaggaagagtccatcctcctcatgattctccttgagtcttttactcaggatgactggcttcagattgcggaggagagcgatgcctatggctatgccatcatccgtccgtcagagaaatgggtgccagaacgacagagctttattgaggaaaagattgcagaggagcctgtacagctagatacggcagaaggtcaagttcaacaagtcatagatacgccagaaggccattttaccattacctttacccctaaggaaaaggaagctgtgctggaccgccatagtcaacaggcttttggtaatggctatctttcagtcgagcaggccaatctcatcctcaatcatctccctatggagattacctttgtcaataaagaagatattttccagtattacaatgacaatacgccagctgatgagatgattttcaaacggacgccgtcccaagtcgggcgcaatgtcgaactctgccatccgcctaagtacttggacaaggtcaaaactatcatgaaggggcttcgtgagggaagcaaagacaagtatgaaatgtggttcaagtctgagtcgcgaggtaagtttgtccacatcacctatgctgcagtacacgatgaagacggagaattccaaggagtgttggagtatgttcaggatatccagccctaccgtgagattgatacggactattttcgtggattagaa

SEQ ID NO: 1000 - protein, 444 aa, Streptococcus pneumoniae
  conserved hypothetical protein; Cellular location: cytoplasm; Similar to strain R6 sequence 15902530 (0.E+01)
MTDERIHILRDILLELHNGASPESVQDRFDATFTGVSAIEISLMEHELMNSDSGVTFEDVMELCDVHANLFKNAIKGVEVSDTEHPGHPVRVFKEENLALRAALIRIRRLLDTYESMEDEEMLAEMRKGLVRQMGLVGQFDIHYQRKEELFFPIMERYGHDSPPKVMWGVDDQIRELFQTALTTAKSLPEVSISSVKEAFEAFATEFESMIFKEESILLMILLESFTQDDWLQIAEESDAYGYAIIRPSEKWVPERQSFIEEKIAEEPVQLDTAEGQVQQVIDTPEGHFTITFTPKEKEAVLDRHSQQAFGNGYLSVEQANLILNHLPMEITFVNKEDIFQYYNDNTPADEMIFKRTPSQVGRNVELCHPPKYLDKVKTIMKGLREGSKDKYEMWFKSESRGKFVHITYAAVHDEDGEFQGVLEYVQDIQPYREIDTDYFRGLE

SEQ ID NO: 1001 - DNA, 252 bp, Streptococcus pneumoniae
atgagttacgaacaagaatttatgaaggaatttgaagcttgggtcaatacccaaatcatgattaacgacatggcgcacaaggaaagccaaaaagtttacgaagaagaccaggacgagcgtgccaaagatgccatgattcgctacgagagtcgcttggatgcttatcagttcttgcttggtaagtttgaaaacttcaaagtaggcaagggattccatgatttgccagaaggcttgtttggtgagcgaaattat

SEQ ID NO: 1002 - protein, 84 aa, Streptococcus pneumoniae
  hypothetical protein; Cellular location: cytoplasm; Similar to strain R6 sequence 15902531 (4.E-46)
MSYEQEFMKEFEAWVNTQIMINDMAHKESQKVYEEDQDERAKDAMIRYESRLDAYQFLLGKFENFKVGKGFHDLPEGLFGERNY

SEQ ID NO: 1003 - DNA, 393 bp, Streptococcus pneumoniae
atgtcaaagaaactcaatcgtaaaaaacaattacgaaatggcctccgtcgcgcaggtgccttttcaagtacggtgactaaggttgtagatgagacaaaaaaagtcgtgaagcgtgcagaacagtcagcaagcgcagctggtaaggctgtttctaaaaaagttgaacaagcagtagaagctaccaaagagcaagctcaaaaagtagctaattctgtagaagattttgcagcaaatttgggtggacttccacttgatcgtgccaagactttctatgatgaaggaatcaagtctgcttcagatttcaaaaactggactgaaaaagaactccttgccttgaaaggaatcggcccagctaccatcaagaaattgaaagaaaatggcatcaagttcaag

SEQ ID NO: 1004 - protein, 131 aa, Streptococcus pneumoniae
  hypothetical protein; Cellular location: cytoplasm; Similar to strain R6 sequence 15902532 (7.E-68)
MSKKLNRKKQLRNGLRRAGAFSSTVTKVVDETKKVVKRAEQSASAAGKAVSKKVEQAVEATKEQAQKVANSVEDFAANLGGLPLDRAKTFYDEGIKSASDFKNWTEKELLALKGIGPATIKKLKENGIKFK

SEQ ID NO: 1005 - DNA, 447 bp, Streptococcus pneumoniae
gtgattggagtcgttgcgagagagaatgccgcagagcagatcaaacagtatcaaaaatttactgtgaatatttctgatgaaacttctatgcttgcgatggagcaggctggttttatcagtcatcaggagaaattggaacgtttgggagtgcattatgaaatttctgaacgaactcagactcctattttagacgcctgtccacttgttttagattgtcgggtagataggattgttgaggaagacggtatttgccacatctttgccaagattcttgagcgacttgttgccccagaactcctggatgaaaagggacattttaaaaatcaactgtttgccccaacctatttcatgggagatggatatcagcgcgtttatcgctatctggacaagcgtgtagatatgaagggcagtttcatcaaaaaagcgaggaagaaggatggcaagaac

SEQ ID NO: 1006 - protein, 149 aa, Streptococcus pneumoniae
  conserved domain protein; Cellular location: cytoplasm; Similar to strain R6 sequence 15902533 (5.E-83)
MIGVVARENAAEQIKQYQKFTVNISDETSMLAMEQAGFISHQEKLERLGVHYEISERTQTPILDACPLVLDCRVDRIVEEDGICHIFAKILERLVAPELLDEKGHFKNQLFAPTYFMGDGYQRVYRYLDKRVDMKGSFIKKARKKDGKN

SEQ ID NO: 1007 - DNA, 558 bp, Streptococcus pneumoniae
atggcaagaactgagctgccagataaaatcgaaacagaacgtctcgttttacgagtccgcacagtggtggatgctgaggatatccatacctacgctagtttgccagaggtcgcctatccagcaggttttcctccagtcaagatcttggaagatgagatttattatctggagcacattcttccggagcgtactcaaaaggaaaatctcccagctggctatgggattgtcgtcaaaggaaccgataaagtcattggttctgttgacttcaaccatcttcatgcggatgatgtgctagagcttggctataccttgcacccagactattggggtcgaggttatgttccagaagcagcgtgttccttgattgatctagcttttaaagaacttggtcttcacaagattgaactaacttgctttggatataaccttcaaagtcaacgagtctcggaaaagcttggctttaccctcgaagctcgcataagagaccgcaaagatgctcaaggcaactgctgtgatgatttgagatatggcttgctgaggagtgagtgggaggtgatt

SEQ ID NO: 1008 - protein, 186 aa, Streptococcus pneumoniae
  acetyltransferase, GNAT family; Cellular location: cytoplasm; Similar to strain R6 sequence 15902534 (1.E-95)
MARTELPDKIETERLVLRVRTVVDAEDIHTYASLPEVAYPAGFPPVKILEDEIYYLEHILPERTQKENLPAGYGIVVKGTDKVIGSVDFNHLHADDVLELGYTLHPDYWGRGYVPEAACSLIDLAFKELGLHKIELTCFGYNLQSQRVSEKLGFTLEARIRDRKDAQGNCCDDLRYGLLRSEWEVI

SEQ ID NO: 1009 - DNA, 591 bp, Streptococcus pneumoniae
gtgggaggtgatttgatgcatcttttcatcattggtgctccagcatcaggaaaaatgaccattggtcaagaattatctcgactgacggatgctaccctattttataaccatcaagccattgattttgcactagagatctatcaggattataccgaggagatgtgggaatttgttcgtggaattaccttttctttccttggagcaagtgcaagaaatcagcgatcagtaattttaacagacgtaattgatttttcaaatcagtaccagctgatgtatttaaagcaaattcaggatttattggataactttcatcaagagattctgtttgttgaattggaaacaagtcttgaagagtgcatacgtcgaaatcgaacggagaatcgattaaagcacaaacccttaaaacgacatattgaggtatctgaaagagaaattttagagaccgctgaaacacttcaattaaattcccaacatcaaccgaatgagttgcaccactactttaaaataaataatacgaatttgtctgcagaagaagctgctaagcaaattcaaaataaaataaacaaaatagagaaaggacacacacatgtc

SEQ ID NO: 1010 - protein, 197 aa, Streptococcus pneumoniae
  conserved domain protein; Cellular location: cytoplasm
MGGDLMHLFIIGAPASGKMTIGQELSRLTDATLFYNHQAIDFALEIYQDYTEEMWEFVRGITFSFLGASARNQRSVILTDVIDFSNQYQLMYLKQIQDLLDNFHQEILFVELETSLEECIRRNRTENRLKHKPLKRHIEVSEREILETAETLQLNSQHQPNELHHYFKINNTNLSAEEAAKQIQNKINKIEKGHTHV

SEQ ID NO: 1011 - DNA, 2649 bp, Streptococcus pneumoniae
atgtctaaagaactttcacctaaatacaatccagccgaggttgaggctggtcgttaccaaaaatggcttgatgcggatgttttcaagccttcaggcgatcaaaaggctaagccttattcaatcgtgattccaccaccaaacgtaactgggaaacttcaccttggtcacgcttgggatacgactttgcaggatatcatcatccgtcaaaaacgcatgcaaggctttgataccctttggcttccaggtatggaccacgctggtattgcgactcaggctaaggttgaggagcgcttacgtggtgagggtattacgcgttatgacctaggtcgtgagtctttcttgacgaaggtctgggaatggaaagacgaatatgccactaccatcaaggaacaatggggcaagatggggctttctgtagactattctcgtgagcgtttcactcttgatgaaggtttgtcaaaagctgttcgtaaggtctttgtgaacctttacaagaaaggctggatctatcgtggtgagtttatcatcaactgggacccagcagctcgcacagccctttctgatattgaggtgattcacaaggatgtagaaggtgccttctaccacatgaattacatgctggaagatggttcacgcgcccttgaagttgctacaactcgtcctgagactatgtttggggacgttgcggttgcggttaatccagaagacccgcgctacaaggacttgattggtaaaaacgtcatccttccaatcgctaataaactcatcccaatcgttggagatgagcacgcagatcctgagcttggtactggtgtcgtgaaaatcacacctgcccacgatccaaatgacttcttggttggccaacgtcataacttgccacaagtcaacgtcatgaacgacgacggaactatgaatgagcttgcctttgaattttcaggcatggatcgttttgaagctcgtaaggcagtcgttgctaagttggaagaaatcggtgcccttgtcaaaatcgaaaaacgtgtccacagtgttggtcactcagaacgtacaggtgtcgtagttgagccacgcttgtctactcaatggttcgtcaagatggaccaattggctaagaacgccattgctaaccaagacacagaggacaaggtcgaattctacccacctcgtttcaacgataccttccttcaatggatggaaaatgtccacgactgggttatctctcgtcagctttggtggggtcaccaaatccctgcctggtacaatgctgatggtgaaatgtatgtcggcgaagaagctccagaaggtgacggatggactcaggacgaagacgtcttggatacttggttcagttctgccctctggccattttcaaccatgggctggcctgaagtcgactcagaagactttaaacgttatttcccaacttcaaccttggtaacaggttacgacatcatcttcttctgggtgtctcgtatgatcttccagtccttggaatttactggtcgtcagccattccaaaacgtgcttatccacggtctcatccgtgacgagcaaggacgcaagatgtctaaatctctcggtaacgggattgacccaatggatgtcatcgagaaatacggtgctgatgcccttcgttggttcctttcaaacggttccgcaccaggtcaagacgttcgtttctcttacgagaaaatggatgcttcatggaactttattaacaaaatttggaacatttctcgctatatcctcatgaacaatgaaggtttgacgctggatgtggcgcatgacaatgtcacaaaagttgcaacaggtgaggctggtaatgtgacggaccgctggattctccacaatctcaacgaaaccattgcaaaagttactgaaaactttgataagttcgagtttggtgtggctggtcatatcctttacaacttcatctgggaagaatttgccaactggtatgttgagttgaccaaggaagttctatacagcgacaatgaagacgataaggtcattactcgatctgttctcctctatacgctggacaagatccttcgtctccttcacccaatcatgccattcgtgacagaggaaatctttggacaaatctcagaaggttctatcgtgacagctgcatacccaactgttaatctagcctttgaagaccttgcggctcacactggtgtggaaagtctcaaagacttgattcgtgctgttcggaatgcgcgtgcggaagtaaatgtagcaccaagcaagcctatcaccatccttgttaagacaagcgatagcgacttggaagccttctttaacagcaatgtcaactatatcaaacgctttacaaatccagaacacttggaaatcgcatcaaccatccctgcacctgaactggctatgtcaagtgtcatcacaggagcagaaatctacctgccactggccgatctcctcaatgttgaagaagaactggcccgtctcgacaaggaacttgctaaatggcaaaaagaactggacatggttggtaagaaactctctaacgaacgcttcgtagccaacgccaaaccagaagtcgtccaaaaagaatgcgacaaacaagctgactaccaagctaaatatgacgcgaccgtcgcacgtattgatgagatgaagaagttggtgaaa

SEQ ID NO: 1012 - protein, 883 aa, Streptococcus pneumoniae
  valyl-tRNA synthetase (valS); Cellular location: cytoplasm; Similar to strain R6 sequence 15902536 (0.E+01)
MSKELSPKYNPAEVEAGRYQKWLDADVFKPSGDQKAKPYSIVIPPPNVTGKLHLGHAWDTTLQDIIIRQKRMQGFDTLWLPGMDHAGIATQAKVEERLRGEGITRYDLGRESFLTKVWEWKDEYATTIKEQWGKMGLSVDYSRERFTLDEGLSKAVRKVFVNLYKKGWIYRGEFIINWDPAARTALSDIEVIHKDVEGAFYHMNYMLEDGSRALEVATTRPETMFGDVAVAVNPEDPRYKDLIGKNVILPIANKLIPIVGDEHADPELGTGVVKITPAHDPNDFLVGQRHNLPQVNVMNDDGTMNELAFEFSGMDRFEARKAVVAKLEEIGALVKIEKRVHSVGHSERTGVVVEPRLSTQWFVKMDQLAKNAIANQDTEDKVEFYPPRFNDTFLQWMENVHDWVISRQLWWGHQIPAWYNADGEMYVGEEAPEGDGWTQDEDVLDTWFSSALWPFSTMGWPEVDSEDFKRYFPTSTLVTGYDIIFFWVSRMIFQSLEFTGRQPFQNVLIHGLIRDEQGRKMSKSLGNGIDPMDVIEKYGADALRWFLSNGSAPGQDVRFSYEKMDASWNFINKIWNISRYILMNNEGLTLDVAHDNVTKVATGEAGNVTDRWILHNLNETIAKVTENFDKFEFGVAGHILYNFIWEEFANWYVELTKEVLYSDNEDDKVITRSVLLYTLDKILRLLHPIMPFVTEEIFGQISEGSIVTAAYPTVNLAFEDLAAHTGVESLKDLIRAVRNARAEVNVAPSKPITILVKTSDSDLEAFFNSNVNYIKRFTNPEHLEIASTIPAPELAMSSVITGAEIYLPLADLLNVEEELARLDKELAKWQKELDMVGKKLSNERFVANAKPEVVQKECDKQADYQAKYDATVARIDEMKKLVK

SEQ ID NO: 1013 - DNA, 162 bp, Streptococcus pneumoniae
atggggaaaattgttgctattgatttatttaacggtgcaggtggcactacaagtggccttaaaaaatcaggcatagatgttcaagttgctgttgaaattgattccgtagctgttaaaacttataagttaaataatcctgaggtgtctgtaatagatatggag

SEQ ID NO: 1014 - protein, 54 aa, Streptococcus pneumoniae
  type II DNA modification methyltransferase, truncation; Cellular location: cytoplasm
MGKIVAIDLFNGAGGTTSGLKKSGIDVQVAVEIDSVAVKTYKLNNPEVSVIDME

SEQ ID NO: 1015 - DNA, 93 bp, Streptococcus pneumoniae
ttggctggagaaccatataaagcttgtaaaattgaagttttatttactccatatctattacagacacctcaggattatttaacttataagttt

SEQ ID NO: 1016 - protein, 31 aa, Streptococcus pneumoniae
  hypothetical protein
MAGEPYKACKIEVLFTPYLLQTPQDYLTYKF

SEQ ID NO: 1017 - DNA, 1602 bp, Streptococcus pneumoniae
gtgtctgaatattggtttagtacaaatgttgatcaaatagatgaagtggatgggaaacaatgtttaatctattcatattataacattaaagcttctagaaatgtagaagttcttaaaggccgttctggaacaaaaaaaggattagattattgggaaccatatgctcctcaaaaacaatatgagatggaaagattacccaaaaataaatatattggaagttcttcgacagacagatgggatggcattgaaaaaaatgttgtcttttgtgattgtaaagaatatgtttctgcttttgatttatttttctatcactataattttaaaaaaatttctactcaacgtagtaaacaagattttataagattacgatctaagccagttgctgatattttaaagaataatacaagtagctatacgcgttataaaaaggaaatggttatagataatgttaaagttgatgataaagtttgtgaaattattagtgaaataatggatgaatcttatacagacattcaaattttaacacataagttgtattcaaaaggtgatgatataaaagcttccaaaactatttggatgaaaaaatctggaaaagaatattccgaggcttttgcaggaacaggtgaggctagaattattttgttagtaaatgatatagtaaatgcgcaatcaaattcattaatattaatagatgaacctgaaatctcacttcatccgagtgcaatctataaatttaaagagtttttacttcaagagtgtttaaataaaaaacatcaaattattatcactacacattctacacaacttataaaagattttcctagagaagccgtgaaacttttagtgaaaaacggagaaaaggtagatgttattgaaaatattgattatcaggatgcattttttgaattaggtgatgtgtatcattctaggaagatgatttatgttgaagatagactagctaaatatattctagagtttgttatcactcattcaggtagtgagaatcttaaacagaatttagtagtgagatatattcctggtggagcaaatcaaataatttgtaataatattttaaactcatcgtatttagattccgataaccattatttttggcttgatggagatcaaaacactaatgttagtgaatcaaataatttaatgaactatcttgaaaatggtgttgttatatcagataaaattcctgaatcagataataaaaatcttgatgatattataaaattgataacgggatgtccaattaaatttaatgtttcaggtaataaagggcaaaaaaataatattgaattaattgcgaaacaaagaagctttatagattattgggctaaatacgtttcttatcttcctttcccaaccccagagttttttttagctaatttgtgtaacagcgtagatagggaaggttatgatttttctaaagatggcaacggaaaagaatattttagaaaaaaaactcaagtagcgttaggaatagagaatataacttctgaagatattttccaggagcaaagaagagctgtttcaaaaatacagccagaatcatcaatgtttcagtgtattaaagaaaaattagaggcattgttc

SEQ ID NO: 1018 - protein, 534 aa, Streptococcus pneumoniae
  conserved domain protein; Cellular location: cytoplasm
MSEYWFSTNVDQIDEVDGKQCLIYSYYNIKASRNVEVLKGRSGTKKGLDYWEPYAPQKQYEMERLPKNKYIGSSSTDRWDGIEKNVVFCDCKEYVSAFDLFFYHYNFKKISTQRSKQDFIRLRSKPVADILKNNTSSYTRYKKEMVIDNVKVDDKVCEIISEIMDESYTDIQILTHKLYSKGDDIKASKTIWMKKSGKEYSEAFAGTGEARIILLVNDIVNAQSNSLILIDEPEISLHPSAIYKFKEFLLQECLNKKHQIIITTHSTQLIKDFPREAVKLLVKNGEKVDVIENIDYQDAFFELGDVYHSRKMIYVEDRLAKYILEFVITHSGSENLKQNLVVRYIPGGANQIICNNILNSSYLDSDNHYFWLDGDQNTNVSESNNLMNYLENGVVISDKIPESDNKNLDDIIKLITGCPIKFNVSGNKGQKNNIELIAKQRSFIDYWAKYVSYLPFPTPEFFLANLCNSVDREGYDFSKDGNGKEYFRKKTQVALGIENITSEDIFQEQRRAVSKIQPESSMFQCIKEKLEALF

SEQ ID NO: 1019 - DNA, 801 bp, Streptococcus pneumoniae
atgcaaccaacttacaacattgacaatccaaacttgtcttatgaagcgaagcgtgatttatggcggataggttttggtctgcagaaagttgacaatctagtgccatcagcgtatatggaatctttggctgagaaacagtcccggggtgaactgacttatgagcaggtttatgaggatgcaacggcttatcatcataccattgatgcgagtacagaggaggcagacttggtttctctacgtattgtagaactattgtctcgaagaggctttagcttcagtcctgcgatcttacttgctattcataaggagttgtttcaagatatatttgaaccctcgattccggtaggtcaatttcgtcagactaatatcacaaagaatgaacctgttttgaatggtgaaagtgttgtgtactctgattactccatgattcaaatgaccttggattatgattttaatcaggaaaaacaagttgcatatgcgacactaacccaggcggatatggttaaaaaaatccagcattttatttcaggaatctggcagattcatccatttcgcgaaggaaacactcggacggtaacggtatttttgattcagtatcttcgtgagtttggttttgatattgataatacaccatttcagcaacattccaagtattttcgtgatgccttagtgttagataatgcaaagattttacagcgacgtcctgagtttttaacagctttttttgaaaatctcttgctcggtggtcaaaatgatttgtcttcagaaaaaatgtatctagatttagacctcgatctttca

SEQ ID NO: 1020 - protein, 267 aa, Streptococcus pneumoniae
  cell filamentation protein Fic-related protein; Cellular location: cytoplasm; Similar to strain R6 sequence 15902538 (e-151)
MQPTYNIDNPNLSYEAKRDLWRIGFGLQKVDNLVPSAYMESLAEKQSRGELTYEQVYEDATAYHHTIDASTEEADLVSLRIVELLSRRGFSFSPAILLAIHKELFQDIFEPSIPVGQFRQTNITKNEPVLNGESVVYSDYSMIQMTLDYDFNQEKQVAYATLTQADMVKKIQHFISGIWQIHPFREGNTRTVTVFLIQYLREFGFDIDNTPFQQHSKYFRDALVLDNAKILQRRPEFLTAFFENLLLGGQNDLSSEKMYLDLDLDLS

SEQ ID NO: 1021 - DNA, 1198 bp, Streptococcus pneumoniae
atggaacaattacattttatcacaaaattactagacattaaagaccctataaaattccttaccttgaaacgactggtatgcctactagaattctccttagaaaacgtcgttttaagtgctatcattgcttgaaaatgatggtcgctgaaacttctatcgtcaagaaaaatcaccaaattcctcgtattatcaaccaaaagattgcgcaaaagttaattgaaaagatttctatgaccgatattgcccatcagctggccatttcaacttcaactgtcattcgaaagctcaatgacttccactttgagtgtaattttagaaatctgcctaagattatgtcttgggacgttgaaacagtccggggagtgactgtttcaatcgggagatggagatgagctttattgcgcaagattttgaaaagctcgatatcatcactgttcttgagggtagaacacaagctgtcatccgagatcactttcttaaatatgatagagccgtccgatgtcgcgtcaaaattattactatggatatgtttagtccttactatgacttagctaaacagcttcgctttcaaatttctaggctcaggctgaaacagtctcccagactgtttcactcccgaatgctaaaatcgttcttgatcgctttcatattgtacaacatcttagccgtgctatgagtcgtgtgcgtgtccaaatcatgaatcagtttcatcgaaaatcccatgaatacaaggctatcaagcgctactggaaactcattcaacaggatagccgtaaactcagcgataaacatttttatcgccctacttttcgtatgcatttaaccaataaagagattttagacaagcttttgagctattcacaagacttgaaacatcactatcagctctatcaactcttgctgtttcactttcagaataaggaaccggagaaatttttcgaacttatcgaggacaatcttaagcaggttcatcctatttttcagactgtctttaaaaccttcctcaaagataaagaaaaggttatcaacgcccttcaactacactattctaatgccaaactggaagcgaccaataatctcatcaaacttatcaagcgcaatgcctttggttttcgaaactttgaaaacttcaaaaaaacggatttttatcgctctgaacatcaaaaaagaaaggacgaaatttgtcctttctcgaact

SEQ ID NO: 1022 - protein, 308 aa, Streptococcus pneumoniae
  IS1167, transposase FRAMESHIFT
MSRVRVQIMNQFHRKSHEYKAIKRYWKLIQQDSRKLSDKHFYRPTFRMHLTNKEILDKLLSYSQDLKHHYQLYQLLLFHFQNKEPEKFFELIEDNLKQVHPIFQTVFKTFLKDKEKVINALQLHYSNAKLEATNNLIKLIKRNAFGFRNFENFKKTDFYRSEHQKRKDEICPFSNLAFLQPTTIDKEPNFDDIRFLVRIFTSFFPKIQCLLSIRIMKDRGLNLDTFFLKTNHFDHRARDFQKKLLKTQDVAVKSLHYLTLRHHENTWNVAEMVYYQYQNQTHEDTESKIPLPSECFLREMDESARFLK

SEQ ID NO: 1023 - DNA, 285 bp, Streptococcus pneumoniae
atgagctttattgcgcaagattttgaaaagctcgatatcatcactgttcttgagggtagaacacaagctgtcatccgagatcactttcttaaatatgatagagccgtccgatgtcgcgtcaaaattattactatggatatgtttagtccttactatgacttagctaaacagcttcgctttcaaatttctaggctcaggctgaaacagtctcccagactgtttcactcccgaatgctaaaatcgttcttgatcgctttcatattgtacaacatcttagccgtgcta

SEQ ID NO: 1024 - protein, 95 aa, Streptococcus pneumoniae
  transposase-related
MSFIAQDFEKLDIITVLEGRTQAVIRDHFLKYDRAVRCRVKIITMDMFSPYYDLAKQLRFQISRLRLKQSPRLFHSRMLKSFLIAFILYNILAVL

SEQ ID NO: 1025 - DNA, 261 bp, Streptococcus pneumoniae
ttgaaaatgatggtcgctgaaacttctatcgtcaagaaaaatcaccaaattcctcgtattatcaaccaaaagattgcgcaaaagttaattgaaaagatttctatgaccgatattgcccatcagctggccatttcaacttcaactgtcattcgaaagctcaatgacttccactttgagtgtaattttagaaatctgcctaagattatgtcttgggacgttgaaacagtccggggagtgactgtttcaatcgggagatggaga

SEQ ID NO: 1026 - protein, 87 aa, Streptococcus pneumoniae
  transposase
MKMMVAETSIVKKNHQIPRIINQKIAQKLIEKISMTDIAHQLAISTSTVIRKLNDFHFECNFRNLPKIMSWDVETVRGVTVSIGRWR

SEQ ID NO: 1027 - DNA, 129 bp, Streptococcus pneumoniae
atggaacaattacattttatcacaaaattactagacattaaagaccctataaaattccttaccttgaaacgactggtatgcctactagaattctccttagaaaacgtcgttttaagtgctatcattgct

SEQ ID NO: 1028 - protein, 43 aa, Streptococcus pneumoniae
  transposase
MEQLHFITKLLDIKDPIKFLTLKRLVCLLEFSLENVVLSAIIA

SEQ ID NO: 1029 - DNA, 159 bp, Streptococcus pneumoniae
atgtacaatttcagccagtcttgttataatcagcctataggaatcaaggaggtgactcttatggctgtttttgtgtctttggatggaattgtggtagaagtccttgatgtcttttcttcttttaatggggatagtgagtttttcttgtgtatagcattt

SEQ ID NO: 1030 - protein, 53 aa, Streptococcus pneumoniae
  hypothetical protein; Cellular location: membrane; Similar to strain R6 sequence 15902543 (3.E-24)
MYNFSQSCYNQPIGIKEVTLMAVFVSLDGIVVEVLDVFSSFNGDSEFFLCIAF

SEQ ID NO: 1031 - DNA, 828 bp, Streptococcus pneumoniae
atggaacgctctcagttcgaggagatgttccaacttcaaagtagtcgcttgacgacgcaagaaaaattacaattgtttacctctgtgtttgctggccgttatgatgtttatgctaagaattttatcaatgaacaagggaaaattcagtattttccttcctatgattatggttggaagcagttgccacctgaaaaacggagtttccagacattgacgaactccgttttgaaatctcattttcgtggggaggcagctatcggtatctttcctatgcacttagatgatagctgttattttttggtactggatttggatgaaggagattggaaagaagctggtttaaccattcgaagaatagccagggaacgccagatggaagcccatttagagatttctcgttcgggtcacggactccatatttggttcttctttgaggaagcgattccgagtcgagaggctcgcttgtttggaaagaaactgatagaactggcaatgcaggaaagtatgcaactgtcctttgattcttttgatcgcatgtttccaaatcaggatgtccttcctaaggggggatttggaaatttgattgccttgccttttcaaggagaagcttaccatcaagggcgaacggtctttgtggatgaacagtttcagccttatgaagaccaatggaggtatctacaagaaattcagaggatttcaactgctaaagtggcactgttaatccaagaggagttaggcaagcaagaattggataaggagttgaaggtcgttttatccaatatgatccaacttgaaaaatcgtctgtgacatccaaggcacttttttct

SEQ ID NO: 1032 - protein, 276 aa, Streptococcus pneumoniae
  hypothetical protein; Cellular location: cytoplasm; Similar to strain R6 sequence 15902543 (e-154)
MERSQFEEMFQLQSSRLTTQEKLQLFTSVFAGRYDVYAKNFINEQGKIQYFPSYDYGWKQLPPEKRSFQTLTNSVLKSHFRGEAAIGIFPMHLDDSCYFLVLDLDEGDWKEAGLTIRRIARERQMEAHLEISRSGHGLHIWFFFEEAIPSREARLFGKKLIELAMQESMQLSFDSFDRMFPNQDVLPKGGFGNLIALPFQGEAYHQGRTVFVDEQFQPYEDQWRYLQEIQRISTAKVALLIQEELGKQELDKELKVVLSNMIQLEKSSVTSKALFS

SEQ ID NO: 1033 - DNA, 1752 bp, Streptococcus pneumoniae
ttgttagaaatcgatttgactttcctgatcgatttgtcctgttattatttcattttactatatttaaagcaggctatgcgacagccaacctatcaaattcctgagagaatgtatttatttggagaatccgatcattatttatggttgccaagaggtttgctgtatccattgcaagataaatttaagcaggtatctgtggaagataggagaaaggtacaaaggtctattagcgtggaatttaagggagaactcacttttgagcaagagttagccctgtcagatatgacttctaaagaaaatggtttacttcatgcggagactggttttgggaagaccgttttaggtgctgctcttatctctgaacggaaaacaaaaacaattattctagtccataataagcaactcttagaccaatggctagatcgcttaaactgctttttgactttcgaagaggaggaggctatccgttatacggcatcaggtcgtgaaaaggtaatcggctatgttgggcagtacggtgggactaagaaatggctgagtaaactggttgatgtcgttatgattcaatctctatttaagttggaaaatagtcaaagtcttttggatgagtatgagatgatgattgtggatgagtgtcatcatgtctctgccttgatgtttgaaaaagttgttgctcagtttagagggaagtatctttacggtttgacggctacgcctgagcgtaagaatggtcatgagcctattgtttttcagagaattggtgagatactccatactgctgataagagggaaacggattttaaacggcaattgcaattaagattcacttcttttggtcatttggaaattgaaaagaccaaagcaagtaattttatacagcttagtgattggattgctactgactcagtgaggaatcagatgattctcaaggatattctagcccaagtggcagaaggacggaatatcttggttttagttaatcgaattcaacagatagatgtctttgaaaaattattgaaagagaaagaggttgatgactgttacattattagcggaaaaaccaaagtccgagagagaacgagtttactggagacgttagaacagttagataaagggtttgttttgttgtctactggaaaatacattggcgaaggttttgacttacctcagttggacacgcttatcttggcagcacccttttcttggaaaaataatttgattcagtatgcaggtcggattcatagaaactacaaggataagtctttggtgcgtattttcgattatgtggatattcatgttccttatttagaaaagatgtttcagaaacgacaagtagcttatcgaaagatggattatcgtgtcatcgagggtgaggagaaacaattcgtttatgttgatagtagatatgagaaggtgttgagagaggacttagcaggggaaagacaggaatgtctgcttattttaccttatgtgcaccagacaaaactgatgaattttctaaaagaatttaggattagtcaaattgagatatgtataccagagacggttgcaaataaagcatggctagaccagttgaagagccagaaaattaaagtgtcttttactcaatcaaaaatagtaacgcctattcttttggtgaataagactattgtttggtatggtgcaatgccattattagggaaggtagatgagatgaccatattacgtttggaatcagctagtatagtttctgaactagtggcaggtttacga

SEQ ID NO: 1034 - protein, 584 aa, Streptococcus pneumoniae
  helicase, putative; Cellular location: cytoplasm; Similar to strain R6 sequence 15902547 (e-117)
MLEIDLTFLIDLSCYYFILLYLKQAMRQPTYQIPERMYLFGESDHYLWLPRGLLYPLQDKFKQVSVEDRRKVQRSISVEFKGELTFEQELALSDMTSKENGLLHAETGFGKTVLGAALISERKTKTIILVHNKQLLDQWLDRLNCFLTFEEEEAIRYTASGREKVIGYVGQYGGTKKWLSKLVDVVMIQSLFKLENSQSLLDEYEMMIVDECHHVSALMFEKVVAQFRGKYLYGLTATPERKNGHEPIVFQRIGEILHTADKRETDFKRQLQLRFTSFGHLEIEKTKASNFIQLSDWIATDSVRNQMILKDILAQVAEGRNILVLVNRIQQIDVFEKLLKEKEVDDCYIISGKTKVRERTSLLETLEQLDKGFVLLSTGKYIGEGFDLPQLDTLILAAPFSWKNNLIQYAGRIHRNYKDKSLVRIFDYVDIHVPYLEKMFQKRQVAYRKMDYRVIEGEEKQFVYVDSRYEKVLREDLAGERQECLLILPYVHQTKLMNFLKEFRISQIEICIPETVANKAWLDQLKSQKIKVSFTQSKIVTPILLVNKTIVWYGAMPLLGKVDEMTILRLESASIVSELVAGLR

SEQ ID NO: 1035 - DNA, 837 bp, Streptococcus pneumoniae
atgatcataaaacgaatactaaaccacaatgccgtaattgcgcaaagtaaaaaagatatcgatattcttctttttggaaggggaatagcttttggaagaaaaactggagataaagtaaatccaattgatattgagaaaagtttttttctcaaaaatagagataatatgacccgttttacagagatgtttattaacgttcctttggagttggtgtacatcaccgaaaaaataattaacctaggtaaaataacattgggtaataattttgatgaaattatctatattaatttaacggatcatatttcttcgagcatagaacgttataaagaagggattattatttcgaatcccctacgctgggaaatatcgaaatattataaagaagaatttgaacttgggaaaagggctttacaaataataaaaaaagagttaggtattgaacttccaattgacgaagctgcattcatagcgctacattttgttaatgctaatttagaaaataattttcaagagtcgtataaaatcactgaaataattatgggaattgagaaaatcattcaagatttctattgtactgagtttaaccaagattctattgattattatagattcataactcatataaaattatttgcccatcgcttggttgaaaatacaacttattgtgacgatgatgatgaagacttgttagcattaatgaaaaataaatatcctagagaatatgaatgtggtgaacaggtagcaatgtttatacaaacggagtacaattatttgctgacttctagtgaattagtttatttgatggctcatattcgtcgcttaacaaaaaatttagat

SEQ ID NO: 1036 - protein, 279 aa, Streptococcus pneumoniae
  transcription antiterminator Lict (licT); Cellular location: cytoplasm; Similar to strain R6 sequence 15902548 (e-160)
MIIKRILNHNAVIAQSKKDIDILLFGRGIAFGRKTGDKVNPIDIEKSFFLKNRDNMTRFTEMFINVPLELVYITEKIINLGKITLGNNFDEIIYINLTDHISSSIERYKEGIIISNPLRWEISKYYKEEFELGKRALQIIKKELGIELPIDEAAFIALHFVNANLENNFQESYKITEIIMGIEKIIQDFYCTEFNQDSIDYYRFITHIKLFAHRLVENTTYCDDDDEDLLALMKNKYPREYECGEQVAMFIQTEYNYLLTSSELVYLMAHIRRLTKNLD

SEQ ID NO: 1037 - DNA, 1836 bp, Streptococcus pneumoniae
atgagttataaagatacggtacaaaaaatcctcgatgtaattggaggtgaaaaaaatgtcaatagagttacccattgtgtaacacgtttaagattagaattaaaagatgaaaatttagtcaatgatgatgatgtgaagaagataccaggtgtaataggtattatgaaaaagaatggacaatatcaaattatacttggtaatgatgtagctaattattataaagaattcgttaaacttggcaattttgaatccgattcagttgttcaagggcacaaagggaatattttagaaagaatcattgagtatatcgctggttccatgactccaatcattccagcaatgttagggggaggtatgttgaaagtcttggtaatcattttaccaatgcttggtatattgcaatcagattctcagactattgcttttttgacattttttggggatgctccatattatttcttaccgctgttattagcttattctgcatcacaaaaattaaaagtaacatctacattagctatgtctgtagcaggtgtacttctccatccaaattttgttcaaatggtgcaatcagggaatcctcttagtttatttggtgcacctgtgacaccagctagttatggttcatcagtcgttccaattcttattatggtttggttgatgaaatatattgaaaaaataattgctaaattaacactagctattactaagagttttttgcaacctacgctagtattattagtatcaagctgtattgccttagttgtagtcggacctattggagtaattgttggtgaaggattatcaaatctagttgggcaaatgtatggtgtagctggatggcttacattagctattcttggtgctattatgccatttattgttatgactggaatgcattgggcttttgcacctatttttttggcggcatctattgctactccagacgtattaattcttccagcaatgttagggtcaaacttagctcaaggggctgcttcgatggctgttgcattaaagagtaaaaataataatacaaaacaaattgcttttgcagcaggtttctcagccttacttgcagggattaccgaacctgcattatatggtgtgactttaaaatataaaaaaccgctttatgcagctatgattggtggtggattagcgggattatttgcaggtcttactagtgttaaagcatatctatttgctgtcccatctttgatagcgttgcctcaatttatttattctgatgtgccatcaaatattgtaaatgctttaattgtggcggtcatttcggttgttattacctttgtattagcttatatatttggaatcgatgaagaagagagttctagcaatttagaagttgaagctggagtttcaaataaaaaaatgatattttctcctatatcaggagaaatcattccgttaagcgatgtccaggataaaacattttcagataaactaattggagacggagtagcgattatcccaagtgaaggtaaggtttatgcaccatttgatgggaaaattacaaatatttttccgactaagcacgcaattggattgaagagtgatgagggtgttgagttactaattcatattggattagatactgttgagctaaaaggtcaaggttttattagtcatgtagaagaaggagacagagttttcaaaaatcagttgatttttgaaatggacttgaatttaatcaagactaaaggctacgaaacagttacaccagtaattgtaacgaataccaatgattttctagatgtattagtattacctaataatcagacaatcgagcattctaaggaattactggtaatatta

SEQ ID NO: 1038 - protein, 612 aa, Streptococcus pneumoniae
  PTS system, beta-glucosides-specific IIABC components; Cellular location: membrane; Similar to strain R6 sequence 15902549 (0.E+01)
MSYKDTVQKILDVIGGEKNVNRVTHCVTRLRLELKDENLVNDDDVKKIPGVIGIMKKNGQYQIILGNDVANYYKEFVKLGNFESDSVVQGHKGNILERIIEYIAGSMTPIIPAMLGGGMLKVLVIILPMLGILQSDSQTIAFLTFFGDAPYYFLPLLLAYSASQKLKVTSTLAMSVAGVLLHPNFVQMVQSGNPLSLFGAPVTPASYGSSVVPILIMVWLMKYIEKIIAKLTLAITKSFLQPTLVLLVSSCIALVVVGPIGVIVGEGLSNLVGQMYGVAGWLTLAILGAIMPFIVMTGMHWAFAPIFLAASIATPDVLILPAMLGSNLAQGAASMAVALKSKNNNTKQIAFAAGFSALLAGITEPALYGVTLKYKKPLYAAMIGGGLAGLFAGLTSVKAYLFAVPSLIALPQFIYSDVPSNIVNALIVAVISVVITFVLAYIFGIDEEESSSNLEVEAGVSNKKMIFSPISGEIIPLSDVQDKTFSDKLIGDGVAIIPSEGKVYAPFDGKITNIFPTKHAIGLKSDEGVELLIHIGLDTVELKGQGFISHVEEGDRVFKNQLIFEMDLNLIKTKGYETVTPVIVTNTNDFLDVLVLPNNQTIEHSKELLVIL

SEQ ID NO: 1039 - DNA, 1413 bp, Streptococcus pneumoniae
atgaccatttttccagatgattttctttggggtggagctgttgcagctaatcaagtagagggagcatataatgaagatggtaagggcttatcagttcaggatgtgttacccaaaggtggattaggagaagcaacagaaaatcctacagaagataacttaaaattgataggtattgatttttatcataaatataaggaagatatatccttgttttctgaaatgggctttaatgtttttcgtacttctattgcatggagtagaatttttccaaaaggagatgaggaagaacctaacgaagctgggttgaaatattatgatgaattgtttgatgaactacatgctcacgggatagaaccacttgtaactctttcacactatgagactccattatatttagcaagaaaatatcatggatgggttgataggagaatgattcatttttatgaaaaatttgctcgaacagttttagaaaggtataaagataaagttaaatattggcttacatttaacgaagtaaactctgttttggaattaccatttactagtggaggaatagatatacctaaggagaatctttcgaaacaagaattatatcaagctatacatcatgaattagtcgcctcaagtttggttacaaaaattgctcgtgagattaattcagagtttaaggtgggatgtatggtattagctatgccagcttatccaatgactccaaatccaaaagatgtatgggcgactcatgagtatgagaatctaaattatctattttcagatgtgcatgttagaggttattatccgaattatgcaaaaagatattttaaggaaaatgacattaacatagagtttgcagctgaagatgcagagttattaaaaaattataccgtagattttttatcctttagctattacatgagtgtgactcaatctgctcttccaacacagtataattcaggagaagggaatattattggtggtttagtaaatccttatttagagtcttcagagtggggatggcaaattgatccaattggactacgtataattttaaatagatattatgaccgttatcaaatcccattatttatagtagaaaatggattaggtgctaaagatcaactaataaaagatgaacttaataacttaaccgtccaagatgattatagaattcagtatatgaaagaacatttattgcaagttgctgaagctctacaggatggtgttgaaattatgggctatacgtcttggggatgtattgactgtgtttctatgtccactgcacaactttctaaaaggtacggtctcatttatgttgatcgaaacgatgatggaagtggtacattaaatcgatataagaaaatgtcttttacttggtataaagaagtgattgaatcaaatggagaatccttattcaaa

SEQ ID NO: 1040 - protein, 471 aa, Streptococcus pneumoniae
  6-phospho-beta-glucosidase (bglA); Cellular location: cytoplasm; Similar to strain R6 sequence 15902550 (0.E+01)
MTIFPDDFLWGGAVAANQVEGAYNEDGKGLSVQDVLPKGGLGEATENPTEDNLKLIGIDFYHKYKEDISLFSEMGFNVFRTSIAWSRIFPKGDEEEPNEAGLKYYDELFDELHAHGIEPLVTLSHYETPLYLARKYHGWVDRRMIHFYEKFARTVLERYKDKVKYWLTFNEVNSVLELPFTSGGIDIPKENLSKQELYQAIHHELVASSLVTKIAREINSEFKVGCMVLAMPAYPMTPNPKDVWATHEYENLNYLFSDVHVRGYYPNYAKRYFKENDINIEFAAEDAELLKNYTVDFLSFSYYMSVTQSALPTQYNSGEGNIIGGLVNPYLESSEWGWQIDPIGLRIILNRYYDRYQIPLFIVENGLGAKDQLIKDELNNLTVQDDYRIQYMKEHLLQVAEALQDGVEIMGYTSWGCIDCVSMSTAQLSKRYGLIYVDRNDDGSGTLNRYKKMSFTWYKEVIESNGESLFK

SEQ ID NO: 1041 - DNA, 1044 bp, Streptococcus pneumoniae
atgtcaactattgaagaacaattaaaagcgcttcgcgaagaaacgctggctagcttgaagcagattactgctggaaatgaaaaagagatgcaagatttgcgtgtctctgtccttggtaaaaagggttcgctcactgaaatcctcaaagggatgaaagatgtttctgctgagatgcgtccaatcatcgggaaacacgtcaatgaagctcgtgatgtcttgactgctgcttttgaagaaacagctaagctcttggaagaaaagaaagtcgcggctcaactggctagcgagagtatagatgtgacgcttccaggtcgtccagttgcgactggtcaccgtcacgttttgacacaaaccagtgaagaaatcgaagatatcttcatcggtatgggttatcaagtcgtggatggttttgaagtggagcaagactactataactttgaacgtatgaaccttccaaaagaccacccagctcgtgatatgcaggatactttctatatcactgaagaaatcttgctccgtacccacacgtctccagttcaggcgcgtgctatggatgcccatgatttttctaaaggtcctttgaagatgatctcgccagggcgtgtcttccgtcgcgatacggacgatgcgacccacagtcaccaattccaccaaatcgaaggcttggtagttgggaaaaatatctctatggctgatcttcaaggaacgcttcagttgattgtccaaaaaatgtttggtgaagagcgtcaaattcgtttgcgtccatcttacttcccattcacagagccatctgttgaggtggatgtttcttgcttcaagtgtggtggagaaggctgtaatgtatgtaagaaaacaggttggatcgaaattatgggggccggtatggttcacccacgtgtccttgaaatgagtggtatcgatgcgactgtatactctggctttgcctttggtcttggacaagagcgtgtagctatgctccgttatggaatcaacgatatccgtggattctaccaaggagatgtccgcttctcagaacagtttaaa

SEQ ID NO: 1042 - protein, 348 aa, Streptococcus pneumoniae
  phenylalanyl-tRNA synthetase, alpha subunit (pheS); Cellular location: cytoplasm; Similar to strain R6 sequence 15902551 (0.E+01)
MSTIEEQLKALREETLASLKQITAGNEKEMQDLRVSVLGKKGSLTEILKGMKDVSAEMRPIIGKHVNEARDVLTAAFEETAKLLEEKKVAAQLASESIDVTLPGRPVATGHRHVLTQTSEEIEDIFIGMGYQVVDGFEVEQDYYNFERMNLPKDHPARDMQDTFYITEEILLRTHTSPVQARAMDAHDFSKGPLKMISPGRVFRRDTDDATHSHQFHQIEGLVVGKNISMADLQGTLQLIVQKMFGEERQIRLRPSYFPFTEPSVEVDVSCFKCGGEGCNVCKKTGWIEIMGAGMVHPRVLEMSGIDATVYSGFAFGLGQERVAMLRYGINDIRGFYQGDVRFSEQFK

SEQ ID NO: 1043 - DNA, 507 bp, Streptococcus pneumoniae
atgattagaaaagtagaaatggcagatgttgaggtgttggctaaaattgccaaacaaacctttcgtgaaacctttgcgtatgataatacggaagagcagttacaggaatactttgaagaggcttatagtctgaaaactttgtcaactgagttgggaaatcctgactctgaaacctatttcattatgcatgaggaggagatagctggttttctcaaagtcaactggggaagtgctcaaactgagagagaattagaggacgcttttgaaattcaacgtctctatgtgctacaaaaattccaaggatttggactaggtaagcaactgtttgaattcgcacttgaacttgctacaaaaaatagtttttcttgggcttggctaggtgtttgggagcataatacaaaagctcaagcgttttataaccgatatggttttgaaaaatttagccaacatcattttatggttggtcaaaaagtagatacggattggttactgagaaagaaattaagg

SEQ ID NO: 1044 - protein, 169 aa, Streptococcus pneumoniae
  acetyltransferase, GNAT family; Cellular location: cytoplasm; Similar to strain R6 sequence 15902552 (8.E-97)
MIRKVEMADVEVLAKIAKQTFRETFAYDNTEEQLQEYFEEAYSLKTLSTELGNPDSETYFIMHEEEIAGFLKVNWGSAQTERELEDAFEIQRLYVLQKFQGFGLGKQLFEFALELATKNSFSWAWLGVWEHNTKAQAFYNRYGFEKFSQHHFMVGQKVDTDWLLRKKLR

SEQ ID NO: 1045 - DNA, 2403 bp, Streptococcus pneumoniae
atgcttgtatcttataaatggttaaaagaattggtggacattgatgtgccatcacaagagttggctgaaaaaatgtcaactacagggatcgaggtagagggtgtcgaatcaccagctgctggtctctcaaaaattgtcgtcggtgaggtcttgtcttgcgaagatgtgccagagactcacctccatgtttgtcagattaacgttggcgaagaagaagagcgtcagatcgtttgtggtgccccaaatgtgcgtgctgggatcaaggtcatggtggctcttccaggagctcgtatcgctgataactacaaaatcaaaaaaggaaaaatccgtggtttggagtcacttggaatgatctgttcacttggtgaattgggaatttctgactcagttgtgcctaaggaattcgcagatggcatccaaatcttgcctgaagatgccgtgccaggtgaggaagtcttttcttacctagacttggatgatgaaatcatcgaactttccatcacaccaaaccgtgcagatgccctttctatgtgtggagtggctcacgaagtggcagccatctatgacaaggcagtcaactttaaaaaatttactctaacagaaactaatgaagctgcggcagatgccctttctgtcagcattgagacagacaaggcgccttactatgcagctcgtatcttggacaatgtgactatcgcaccaagtccacaatggttgcaaaaccttctcatgaacgaaggcatccgtcccatcaataacgttgtagacgtgacaaactacatcctgctctactttggtcaacctatgcatgcttttgacttggacacatttgaagggactgacatccgtgtgcgtgaagcgcgtgatggtgaaaaattagtgaccctggacggtgaagaacgagacttggctgagacagacctcgtgattacagttgctgacaaaccagtagcccttgccggtgttatgggtggtcaggctacagaaatttctgaaaaatctagtcgtgttatccttgaagctgctgtttttaatggcaaatctatccgtaagacaagtggtcgcctgaaccttcgttctgagtcatcttctcgctttgaaaaaggaattaatgtggcaacagttaatgaagcccttgatgcggcagctagcatgattgcagagcttgcaggcgcgacggtgcgtaagggtatcgtttcagcgggtgagcttgatacctctgatgtggaagtttcttcaacccttgctgatgttaaccgtgtcctcggaactgagctgtcttatgctgatgtagaagacgtcttccgtcgtcttggctttggtctttctggaaatgcagacagctttacagtcagcgtaccacgtcgtcgttgggatatcacaatcgaagctgatctctttgaagaaatcgctcgtatctatggatatgaccgcttgccaaccagccttccaaaagacgatggtacagctggtgaattgactgtgatacaaaaactccgccgtcaagttcgtaccattgctgaaggagcaggtttgacagaaatcatcacctatgctctgacaactcctgaaaaagcagttgagttcacagctcaaccaagtaaccttactgaactcatgtggccaatgactgtggatcgttcagtcctccgtcaaaatatgatttcagggatccttgataccgttgcctacaacgtggctcgtaagaataaaaacttggccctttatgagattggaaaagtctttgaacaaacaggtaatccaaaagaagaacttccaaatgagatcaacagctttgcctttgccttgacaggcttggttgctgaaaaagatttccaaacagcagcagttccagttgatttcttctatgctaagggaatccttgaagccctatttactcgtttgggactccaagtaacctatacagcaacatctgaaatcgttagccttcatccaggtcgtacagccgtgatttcactcggtgaccaagttcttggtttccttggccaagtgcatccagtcactgccaaggcttacgatattccagaaacgtatgtagctgagcttaacctttcagccatcgaaggggcgctccaacctgctgttccatttgtggaaatcaccaaattcccagcagtcagccgtgacgttgcccttctcctcaaggcagaagtgactcaccaagaagttgtagatgctatccaagctgccggcgtgaaacgtttgacagatatcaaactctttgacgtcttctcaggtgaaaaactgggacttggtatgaagtcaatggcttatagcttgaccttccaaaatccagaagacagcttaacggacgaagaagtcgcacgctatatggaaaaaatccaagcgtctctcgaagaaaaagtcaatgcagaagtgcgt

SEQ ID NO: 1046 - protein, 801 aa, Streptococcus pneumoniae
  phenylalanyl-tRNA synthetase, beta subunit (pheT); Cellular location: cytoplasm; Similar to strain R6 sequence 15902553 (0.E+01)
MLVSYKWLKELVDIDVPSQELAEKMSTTGIEVEGVESPAAGLSKIVVGEVLSCEDVPETHLHVCQINVGEEEERQIVCGAPNVRAGIKVMVALPGARIADNYKIKKGKIRGLESLGMICSLGELGISDSVVPKEFADGIQILPEDAVPGEEVFSYLDLDDEIIELSITPNRADALSMCGVAHEVAAIYDKAVNFKKFTLTETNEAAADALSVSIETDKAPYYAARILDNVTIAPSPQWLQNLLMNEGIRPINNVVDVTNYILLYFGQPMHAFDLDTFEGTDIRVREARDGEKLVTLDGEERDLAETDLVITVADKPVALAGVMGGQATEISEKSSRVILEAAVFNGKSIRKTSGRLNLRSESSSRFEKGINVATVNEALDAAASMIAELAGATVRKGIVSAGELDTSDVEVSSTLADVNRVLGTELSYADVEDVFRRLGFGLSGNADSFTVSVPRRRWDITIEADLFEEIARIYGYDRLPTSLPKDDGTAGELTVIQKLRRQVRTIAEGAGLTEIITYALTTPEKAVEFTAQPSNLTELMWPMTVDRSVLRQNMISGILDTVAYNVARKNKNLALYEIGKVFEQTGNPKEELPNEINSFAFALTGLVAEKDFQTAAVPVDFFYAKGILEALFTRLGLQVTYTATSEIVSLHPGRTAVISLGDQVLGFLGQVHPVTAKAYDIPETYVAELNLSAIEGALQPAVPFVEITKFPAVSRDVALLLKAEVTHQEVVDAIQAAGVKRLTDIKLFDVFSGEKLGLGMKSMAYSLTFQNPEDSLTDEEVARYMEKIQASLEEKVNAEVR

SEQ ID NO: 1047 - DNA, 96 bp, Streptococcus pneumoniae
ttggactttggctattccaagttcctctttcaaaaggtggcagtgcatttaatgcgtccctatgagagcttatttttgcaagtgctccatgacgca

SEQ ID NO: 1048 - protein, 32 aa, Streptococcus pneumoniae
  hypothetical protein
MDFGYSKFLFQKVAVHLMRPYESLFLQVLHDA

SEQ ID NO: 1049 - DNA, 999 bp, Streptococcus pneumoniae
atgattaaaacatttctctctgccctttcggtcattctcttttctatccctatcataacttattcttttttcccatcttctaatcttaacatttggctatctacccaacctatcttggcacagatttatgccttccccttagctactgcaactatggctgctattttaagtttcttattttttttcctatctttttacaagaaaaataaacaaatacggttttactctggcattttgctcttactatcgctcatattactattattcggaacagataaaaccctttcttctgcatcaaataagactaaaaccttaaaattagtaacttggaacgtcgctaatcaaatagaagcacaacatattgagcgaatttttagccattttgacgccgatatggctatattccctgaactagctaccaatatcagaggtgagcaagaaaaccagagaatcaaactattgtttcatcaagttggactttctatggccaactatgatattttcacttctccacctaccaatagtggaatagctcctgtgactgtgattgtcaagaaaagttatggtttctatacagaagctaaaacttttcatacaacacggttcgggacaattgtattacattcgagaaaacaaaatataccagatatcattgccttgcatactgcgcctcctctgccaggtttaatggaaatctggaagcaagacttaaacatcattcataatcaattggcttcaaaatatccaaaggctattattgcaggtgattttaatgcaactatgcgtcatggagcacttgcaaaaataagctctcatagggacgcattaaatgcactgccaccttttgaaagaggaacttggaatagccaaagtccaaaactttttaatgcaacaatagatcatattttattgcctaaaaaccactactatgttaaagatttagacattgtaagttttcaaaactctgatcatagatgtatttttacagaaatcacattt

SEQ ID NO: 1050 - protein, 333 aa, Streptococcus pneumoniae
  hypothetical protein; Cellular location: membrane; Similar to strain R6 sequence 15902554 (0.E+01)
MIKTFLSALSVILFSIPIITYSFFPSSNLNIWLSTQPILAQIYAFPLATATMAAILSFLFFFLSFYKKNKQIRFYSGILLLLSLILLLFGTDKTLSSASNKTKTLKLVTWNVANQIEAQHIERIFSHFDADMAIFPELATNIRGEQENQRIKLLFHQVGLSMANYDIFTSPPTNSGIAPVTVIVKKSYGFYTEAKTFHTTRFGTIVLHSRKQNIPDIIALHTAPPLPGLMEIWKQDLNIIHNQLASKYPKAIIAGDFNATMRHGALAKISSHRDALNALPPFERGTWNSQSPKLFNATIDHILLPKNHYYVKDLDIVSFQNSDHRCIFTEITF

SEQ ID NO: 1051 - DNA, 416 bp, Streptococcus pneumoniae
atgcaagacaattatactacaaaaggcaaacatttgacaatcgatagccgtcgcttaatcgaacgatggaaaaaagaaggaaaatcaaatagagaaattgcctctctacttggaaaagctcctcaaactatccacactgaaatcaagcgtgggacagtccgacaatgtcttggaaaagggcgcttcaaagagatttattctgccgactacgctcaacagtcttaagaaactaaaggaaaagattctccactatacataaccaaaaacataaccaaaaattttcgcctgaaatgatggtgatggctaaaggggttaacgtgggaatttcaaccatttactattggattcatcgtggaaaattggggttaagcaagcaggaactgctttatcctagaaaaggaaaatcgcttaagaaa

SEQ ID NO: 1052 - protein, 74 aa, Streptococcus pneumoniae
  IS1239, transposase, putative, truncation POINT MUTATION FRAMESHIFT
MQDNYTTKGKHLTIDSRRLIERWKKEGKSNREIASLLGKAPQTIHTEIKRGTVRQCLGKGRFKEIYSADYAQQS

SEQ ID NO: 1053 - DNA, 126 bp, Streptococcus pneumoniae
atgatggtgatggctaaaggggttaacgtgggaatttcaaccatttactattggattcatcgtggaaaattggggttaagcaagcaggaactgctttatcctagaaaaggaaaatcgcttaagaaa

SEQ ID NO: 1054 - protein, 42 aa, Streptococcus pneumoniae
  insertion sequence IS1239 putative transposase-related
MMVMAKGVNVGISTIYYWIHRGKLGLSKQELLYPRKGKSLKK

SEQ ID NO: 1055 - DNA, 210 bp, Streptococcus pneumoniae
atgcgagtggctatcatgagcgagttgattgaggctaggtatgaacaaggaatcagtcagaaaaagctggaagaagtcagtggaataagccagcctgtcatagctaggatggagacaggaaagactagtcctcagttggatacagtcttaaaagtcctagccagtttaggaaagacactagcaatcgtcccacttgaacagggaaaaagt

SEQ ID NO: 1056 - protein, 70 aa, Streptococcus pneumoniae
  transcriptional regulator, putative; Cellular location: membrane; Similar to strain R6 sequence 15902557 (2.E-32)
MRVAIMSELIEARYEQGISQKKLEEVSGISQPVIARMETGKTSPQLDTVLKVLASLGKTLAIVPLEQGKS

SEQ ID NO: 1057 - DNA, 2247 bp, Streptococcus pneumoniae
atgtcaactacaatcatcggtttccctcgtttgggcgaattccgtgaattaaaatttacaactgaaaaatactttagaaaagaaatctcagaagaagaacttttagcagcagcaaaagacttgcgtgctaaacactggaacattgtcaaagaaaaaggcatcactgaaattccatcaaatgacttttctcactatgataacttcctagatgcggctttccttttcaacgtggtgcctgcatccgttcaaaacttggacttgtctgaccttgagcgctacttcgctttgggacgtggttaccagggagaaaaaggggacgttcgcgcccttccaatgaagaaatggttcaacactaactaccactacatcgttcctaaatttgaaaaagacactcaagtaaaattggctggtcacaagattttcgatgagttccaagaagccaaagaacttggattgaacactcgtcctgttcttgtaggtcccttcactttccttcaattgtcagactttgaagaaggcgtgaaagcagacgacttcgtagatagcttagtggctgcttaccaagaagtttttgctaaattggctgaacttggtgcgactcgcatccaattggatgaagcggctcttgtaaaagacttgacagctgaagaaaaagctctcttcttgaacctttacaacaaactcttggctgacaaaaaaggtcttgaagtcttgcttcaaacttatttcggtgatgttcgtgacgtatacgctgaccttgtaaacttaccagtagatgctatcggtcttgactttgttgaaggtaagaaaactcttgaactcgttaaaggtggcttcccagctgacaagactctctatgtaggtattgtcaatggtaaaaacatctggcgcaacaactacgaaaagagcttggctgttcttgagcaaattccagctgaaaacatcgttttgacaagctcttgctcacttcttcatgtgccatttacaactgctaatgaagaatttgaaccagcactcttgaaccactttgcctttgcagttgaaaaattggatgaaatccgtgacttggatgctatccgaaatggtcaaggttcagaagctcttgcagccaacaaagaactctttgcgactgagcgtgttggtgaaaatgctgaacttcgtgcgcgtatcgctggcttgacagacgcagactacactcgtttgccagcctttgcagaacgtgaagctatccaagaagaagctttcaaacttccagctcttccaacaacaacgattggttcattccctcaaacaaaagaagttcgtgccaaacgtttggcttaccgtaaaggtgaattgtctcaaaaagagtacgacgctttccttgctgaaacgattgacgaatggatcaagtggcaagaagatattgactttgatgtccttgttcacggtgaatttgagcgtaatgacatggttgagtacttcggtcaaaacttgtcaggatacctcttctctaaaaatggatgggtacaatcatacggtatgcgtggggtaaaaccaccaatcatctggggtgatgtcactcgtcttaaccctatcactgttaaatggtctagctatgcacaaagtcgtacaaacaaacctgttaaaggtatgttgactggacctgttaccatccttaactggtcattcccacgtgaagacatctctatcaaggattcaactctccaaatcgcccttgctatcaaggatgaagtacttgaccttgaagctgctggtgtgaaaatcatccaaatcgacgaggctgctcttcgtgaaaaattgccactccgccgtagcgactggtacgaagactaccttgactgggctattcctgccttccgcttggtacactcaacagtagcgccagacacacaaatccacactcacatgtgttactcagaatttacagatatcatcccagctatcgataacatggatgcagacgttatttcctttgaagctaaccgttcaaaccttgaaatcttggacgaactcaaagcgaaaaacttccaaacagaagtgggacctggggtttacgatatccactcacctcgtgtaccaaatgaaggcgaaatcgacaacacaatcgaagccatccttgctaaagtgccaagcaagaaagtttggatcaaccctgactgtggtttgaaaacacgtggtatcccagaaacaaaagaaagcttgatccgccttgttgaagcagctaaagctgcgcgtgagaaattg

SEQ ID NO: 1058 - protein, 749 aa, Streptococcus pneumoniae
  5-methyltetrahydropteroyltriglutamate--homocysteine methyltransferase (; Cellular location: cytoplasm; Similar to strain R6 sequence 15902558 (0.E+01)
MSTTIIGFPRLGEFRELKFTTEKYFRKEISEEELLAAAKDLRAKHWNIVKEKGITEIPSNDFSHYDNFLDAAFLFNVVPASVQNLDLSDLERYFALGRGYQGEKGDVRALPMKKWFNTNYHYIVPKFEKDTQVKLAGHKIFDEFQEAKELGLNTRPVLVGPFTFLQLSDFEEGVKADDFVDSLVAAYQEVFAKLAELGATRIQLDEAALVKDLTAEEKALFLNLYNKLLADKKGLEVLLQTYFGDVRDVYADLVNLPVDAIGLDFVEGKKTLELVKGGFPADKTLYVGIVNGKNIWRNNYEKSLAVLEQIPAENIVLTSSCSLLHVPFTTANEEFEPALLNHFAFAVEKLDEIRDLDAIRNGQGSEALAANKELFATERVGENAELRARIAGLTDADYTRLPAFAEREAIQEEAFKLPALPTTTIGSFPQTKEVRAKRLAYRKGELSQKEYDAFLAETIDEWIKWQEDIDFDVLVHGEFERNDMVEYFGQNLSGYLFSKNGWVQSYGMRGVKPPIIWGDVTRLNPITVKWSSYAQSRTNKPVKGMLTGPVTILNWSFPREDISIKDSTLQIALAIKDEVLDLEAAGVKIIQIDEAALREKLPLRRSDWYEDYLDWAIPAFRLVHSTVAPDTQIHTHMCYSEFTDIIPAIDNMDADVISFEANRSNLEILDELKAKNFQTEVGPGVYDIHSPRVPNEGEIDNTIEAILAKVPSKKVWINPDCGLKTRGIPETKESLIRLVEAAKAAREKL

SEQ ID NO: 1059 - DNA, 864 bp, Streptococcus pneumoniae
atgtcacgccaaacaccgtcactctcatttgaagtgttccctccaaacccagccgtgggtaatgataacattatttcagccttgcaggatatgcaggagttggctccccattttatcagtgtaactgccagcaataataaatttaatatcaaggaaacgacggttcgtttggctgactttatccaaaatgatttggcgattccgaccattgcccacttgccagctatttatctaactaaggacaaggttgctgaaactattgctgacttggacaaagttggggtgcagaaaatcttggctcttcgtggggatattattccagacgtggaaccacaaaaggatttccgctatgcaaccgacttgattgagtttatcaaggaacaaacccctcactttgatattattggagcttgctatccagaagggcatccagattcgccaaatcagatttcagatattcaaaatcttaagaagaaagtggatgcaggctgttcgagcctcgtaactcagctcttctttgacaatgagcgcttctatgattttcaggacaagtgtatcttggctgggattgatgttcccattcatgcaggaattatgccaattctgaatcgaaatcaggctctccgactcttgaagacttgtgagaatatccatcttccacgcaaatttaaagccatcttagacaagtatgagcatgaccctgagtcgctcagagcagcaggacttgcctatgcagtggaccaaatcgtggacttggtaactcaggatgttgccggtgtgcatctctatacgatgaataatgctgatacagcaaaatacatccatcaagcaacccatgccttgtttaatcaccagtctctagga

SEQ ID NO: 1060 - protein, 288 aa, Streptococcus pneumoniae
  5,10-methylenetetrahydrofolate reductase, putative; Cellular location: membrane; Similar to strain R6 sequence 15902559 (e-165)
MSRQTPSLSFEVFPPNPAVGNDNIISALQDMQELAPHFISVTASNNKFNIKETTVRLADFIQNDLAIPTIAHLPAIYLTKDKVAETIADLDKVGVQKILALRGDIIPDVEPQKDFRYATDLIEFIKEQTPHFDIIGACYPEGHPDSPNQISDIQNLKKKVDAGCSSLVTQLFFDNERFYDFQDKCILAGIDVPIHAGIMPILNRNQALRLLKTCENIHLPRKFKAILDKYEHDPESLRAAGLAYAVDQIVDLVTQDVAGVHLYTMNNADTAKYIHQATHALFNHQSLG

SEQ ID NO: 1061 - DNA, 267 bp, Streptococcus pneumoniae
gtgctaggaagcttatcttttttcctaagaaatgagaccaaaattcaagtcatcaagataccaagccgtcaagcaactcaaaggaagataggaaatcgaacgacggagcgactactcctagggagatttatctttttccacagagttgtaggcaagttcagttttcaagatacatcattagaaaggtttaatactaaagtatctaaagctttcacgctaatcgctatcgggcgattagctaaatgctttactaactctctcgtcaaa

SEQ ID NO: 1062 - protein, 89 aa, Streptococcus pneumoniae
  hypothetical protein; Cellular location: cytoplasm
MLGSLSFFLRNETKIQVIKIPSRQATQRKIGNRTTERLLLGRFIFFHRVVGKFSFQDTSLERFNTKVSKAFTLIAIGRLAKCFTNSLVK

SEQ ID NO: 1063 - DNA, 2211 bp, Streptococcus pneumoniae
atggcaaaacaagtgtttcaaacgacttttgcgggtcgtgagttaattgtagagactggtcaggttgctaagcaagcaaatggatctgttgtcgtacgttacggtgagtcaactgtcttgactgctgccgttatgtctaagaaaatggcaactggggatttcttcccactccaagtcaactacgaagaaaaaatgtatgcggctgggaagtttcctggtggctttatgaaacgtgaaggacgtccttcaacagatgcgaccttgacagcgcgtttgattgaccgtccgattcgtcctatgtttgcggaaggtttccgtaatgaagtccaagtcatcaatacagtgctttcttatgatgaaaatgcatctgcaccaatggctgctatgtttggttcatctttggcactgtctatttcagatattccatttgacggaccaattgctggggtacaagtgggatatgtagatggccaaatcatcatcaacccaagtcaagaacaagcagagcaatctcttcttgaattgacagtagctggaaccaagcacgctatcaacatggtagagtctggtgccaaagaattgtcagaagaaatcatgttggaagcgctccttaaagggcacgaagctgtcaaagaattgattgccttccaagaagaaatcgttgctgctgtcggtaaagaaaaagcagaagtggaattgcttcacgtggatgctgaattgcaagctgaaatcattgcagcctacaacagtgacctccaaaaggcagttcaagtagaagagaaattggcccgtgaagctgcgactcaagtagtgaaagaccaagtgactgccgtttacgaagaaaaatatgcggaccacgaagaatttgaccgtattatgcgtgatgtggctgaaatcttggaacaaatggaacacgcagaagtgcgacgtttaattacagaagacaaggtgcgtcctgatggtcgtaaggtcgatgaaatccgtcctttggatgcggttgttgacttccttcctcgtgtacatggttcaggtctctttactcgtgggcaaactcaagctctttcagtcttgaccttggctccgatgggagaaactcaaatcattgatggtttggatccagagtacaagaaacgctttatgcaccactataacttccctcaatattctgtaggggaaacaggtcgttacggtgcgccaggtcgtcgtgaaatcggtcacggtgcccttggtgagcgtgctcttgctcaagtcttgccaagcttggaagaattcccctacgctatccgtctagtagcagaagttttggaatcaaacggttcttcatctcaagcttctatctgtgcgggaactcttgcccttatggctggtggtgtgccaatcaaggcgccagtagctggtattgctatggggcttatctcagatggaaataactacacagtattgacagatatccaaggtttggaagatcactttggagatatggacttcaaggttgcaggtactcgtgatgggattacagcccttcaaatggatatcaagattcaagggattactgcagaaatcttgacggaggctcttgctcaagccaagaaagcgcgttttgaaatccttgatgtcattgaagcaaccattccagaagttcgtccagaattggctccaactgctccgaaaattgatacgatcaagattgatgtggacaagattaagattgtcatcggtaagggtggagaaaccatcgacaagattatcgctgaaacaggtgttaagattgatatagacgaagaaggaaatgtgtctatctactctagtgaccaagatgctattaaccgtgccaaagaaattattgctggtttggttcgtgaagccaaagtggatgaagtttaccgtgctaaagtcgttcgtatcgagaaatttggtgcctttgttaacctctttgataagacagatgcccttgttcatatctctgagatggcttggactcgtaccaatcgtgtagaggatttggtagaaatcggggatgaagttgatgttaaggttatcaaaattgatgaaaaaggccgtatcgatgcctctatgaaggctcttctacctcgtccgccaaaacctgagcatgatgaaaaaggtgaaaagtctgagcgccctcaccgcccacgtcatcaaaaggattacaaacctaagaaagaatttacagaaacatcaaaagattcagaa

SEQ ID NO: 1064 - protein, 737 aa, Streptococcus pneumoniae
  polyribonucleotide nucleotidyltransferase (pnp); Cellular location: membrane; Similar to strain R6 sequence 15902560 (0.E+01)
MAKQVFQTTFAGRELIVETGQVAKQANGSVVVRYGESTVLTAAVMSKKMATGDFFPLQVNYEEKMYAAGKFPGGFMKREGRPSTDATLTARLIDRPIRPMFAEGFRNEVQVINTVLSYDENASAPMAAMFGSSLALSISDIPFDGPIAGVQVGYVDGQIIINPSQEQAEQSLLELTVAGTKHAINMVESGAKELSEEIMLEALLKGHEAVKELIAFQEEIVAAVGKEKAEVELLHVDAELQAEIIAAYNSDLQKAVQVEEKLAREAATQVVKDQVTAVYEEKYADHEEFDRIMRDVAEILEQMEHAEVRRLITEDKVRPDGRKVDEIRPLDAVVDFLPRVHGSGLFTRGQTQALSVLTLAPMGETQIIDGLDPEYKKRFMHHYNFPQYSVGETGRYGAPGRREIGHGALGERALAQVLPSLEEFPYAIRLVAEVLESNGSSSQASICAGTLALMAGGVPIKAPVAGIAMGLISDGNNYTVLTDIQGLEDHFGDMDFKVAGTRDGITALQMDIKIQGITAEILTEALAQAKKARFEILDVIEATIPEVRPELAPTAPKIDTIKIDVDKIKIVIGKGGETIDKIIAETGVKIDIDEEGNVSIYSSDQDAINRAKEIIAGLVREAKVDEVYRAKVVRIEKFGAFVNLFDKTDALVHISEMAWTRTNRVEDLVEIGDEVDVKVIKIDEKGRIDASMKALLPRPPKPEHDEKGEKSERPHRPRHQKDYKPKKEFTETSKDSE

SEQ ID NO: 1065 - DNA, 615 bp, Streptococcus pneumoniae
atggggtggtggcgcgaaaccattgatattgtaaaagaaaatgatccagcggcccgcaccactttggaggttttgctgacttatccaggtgtcaaggccttggcggcccaccgtctctcgcattttctctggaagcacggcttcaaactattagctcgtatgtacagtcagttttggcgcttttggactcagattgagattcatccaggagcccagattgattcaggtgtttttattgaccatggttctggtctggtgattggagagacagcgattgttgaaaaaggcgttcttctctatcacggagtgactctcgggggaacagggaaagactgtggcaaacgccatccgactgtacgaaagggagccctcatatcagcccatgcccaagttatcgggcctgtggaaattggtgaaaatgccaaggtcggtgctgcagcagttgtcgtagcagatgtacctagtgacgtgacggttgtcggtattccggccaagattgtccgtcttcatggtaagaaagatgagcctgtcattcacgaagtcgaagaaaaacgagagtattatgtcaataaactcgagcaggctaaagatgccagtcacagatcgtctggtttg

SEQ ID NO: 1066 - protein, 205 aa, Streptococcus pneumoniae
  serine acetyltransferase (cysE); Cellular location: membrane; Similar to strain R6 sequence 15902561 (e-119)
MGWWRETIDIVKENDPAARTTLEVLLTYPGVKALAAHRLSHFLWKHGFKLLARMYSQFWRFWTQIEIHPGAQIDSGVFIDHGSGLVIGETAIVEKGVLLYHGVTLGGTGKDCGKRHPTVRKGALISAHAQVIGPVEIGENAKVGAAAVVVADVPSDVTVVGIPAKIVRLHGKKDEPVIHEVEEKREYYVNKLEQAKDASHRSSGL

SEQ ID NO: 1067 - DNA, 882 bp, Streptococcus pneumoniae
atgattcaagcaagaaacaagttaagccaagaggagctatctgaggcgaaaaaagtaattaactgttgccaaaactatgacggtacctatcgcgatccctatctctctaacatgcttaattttgacccaaacatgcccgcctttttcctttattatgaaaaaggcgaacttgttggtttattaactgtctatgcagatgaccaagatgtagaagtgacgatactggttcatccaggtcatcgccgtcaggggattgcgcgtgcattgtttactagttttgagagagaaacagcttctttccccattcggtcagtcacttttcagacagaacgtatttttttagagaatcatcctgactttgccagtaactggggactaatcgaggatgaagagacagaaacttggttaggtaaggatagaagaccttatccgttagcaaatgtttcccatcttgaagttttgttagcagatagttcgtatcaggatcaaattagtcaattaaaatttcaggcattttcagaggaacatgaatcgagagaagttgtggatagatatgtcgctgaagctctgaaagatccagaaagccgactatatattttattaaaagctggtcaggttattggaacttgtacggttgatttatcgactaatacgaattacctctacggtttagcaatattggaacctgaacgtggaaaaggctatggaagctacttagcaaaatccctcgtcaaccaactaattgagcaaaatgacaaggaatttcagattgcagtggaagatagcaatgtaggtgccaaacgtttgtatgaaaaaattggctttgtcaaacagactcaggtggtttatctgaatgagaaaggagcaagggattccgaagtg

SEQ ID NO: 1068 - protein, 294 aa, Streptococcus pneumoniae
  acetyltransferase, GNAT family; Cellular location: cytoplasm; Similar to strain R6 sequence 15902562 (e-169)
MIQARNKLSQEELSEAKKVINCCQNYDGTYRDPYLSNMLNFDPNMPAFFLYYEKGELVGLLTVYADDQDVEVTILVHPGHRRQGIARALFTSFERETASFPIRSVTFQTERIFLENHPDFASNWGLIEDEETETWLGKDRRPYPLANVSHLEVLLADSSYQDQISQLKFQAFSEEHESREVVDRYVAEALKDPESRLYILLKAGQVIGTCTVDLSTNTNYLYGLAILEPERGKGYGSYLAKSLVNQLIEQNDKEFQIAVEDSNVGAKRLYEKIGFVKQTQVVYLNEKGARDSEV

SEQ ID NO: 1069 - DNA, 1341 bp, Streptococcus pneumoniae
atgattaaaatctatgacaccatgtctcgtgatttgcgagaatttgtcccgattgaggacggcaagatcaagatgtatgtttgtgggccaacggtgtacaactatatccacgtaggaaacgcccgttcgacggtagcttttgatacgattcgtcgctattttgagtaccgtgggtataaggttgcctatatttccaattttacagatgtggatgataagattatcaaccgtgccagggaagaaggtatcacgcctcaggaggttgcggataagtacatcgctgcctttcgtgaggatgtgacggcattgggcgtgaaacctgcgactcgccatccgcgtgtagtggagtttatggcagacatcatccgttttgtggaagacttgatcgagaaaggctttgcctatgagagtcaaggggatgtctatttccgtgtagaaaaatcccacaactatgctaaattggctaataaaaccttggaagatttggagctaggtgcttcaggtcgtaccgatgaagaaacggctcgtaaggaaaatcctgtagactttgctctatggaaatcttccaaaccaggtgagatttcttgggatagtccttggggacctggacgtccgggttggcatattgagtgttcagtcatgtcgacagagattttaggtgataccattgatatccacggtggtggagctgacctagagtttccacaccacaccaatgaaattgcccagtctgaagctaaaacaggcaaggcttttgctaactactggatgcacaatggctttgtcaatatcgacaatgtcaaaatgtctaagtccttgggtaacttcattacggtacacgatgcccttaaaactcttgatgggcaagtacttcgtttcttctttgcgacccagcactaccgtaagcctatcaacttcacggaaaaggcagttcgcgatgccgagaccaatctcaagtatctcaagaatacttacgaacaaccatttacaggaaatgtggatgcccaagagttacaaaactttaaagataagtttgtagcagctatggatgaagattttaatgctgccaacggtatcacagttgtctttgaaatggccaaatggatcaactcagggaactatgatgcaagtgtcaagcaagctcttgcagatatgttagaaatttttggaattgtctttgttgaggaagttttggatgcagagattgaagacttgattcaaaaacgccaagaggcgcgtgccaatcgtgactttgcgacagcagaccaaatccgtgaccaattggttactcaaggaattaagctccttgataccaaggatggagtgaggtggacacgtgat

SEQ ID NO: 1070 - protein, 447 aa, Streptococcus pneumoniae
  cysteinyl-tRNA synthetase (cysS); Cellular location: membrane; Similar to strain R6 sequence 15902563 (0.E+01)
MIKIYDTMSRDLREFVPIEDGKIKMYVCGPTVYNYIHVGNARSTVAFDTIRRYFEYRGYKVAYISNFTDVDDKIINRAREEGITPQEVADKYIAAFREDVTALGVKPATRHPRVVEFMADIIRFVEDLIEKGFAYESQGDVYFRVEKSHNYAKLANKTLEDLELGASGRTDEETARKENPVDFALWKSSKPGEISWDSPWGPGRPGWHIECSVMSTEILGDTIDIHGGGADLEFPHHTNEIAQSEAKTGKAFANYWMHNGFVNIDNVKMSKSLGNFITVHDALKTLDGQVLRFFFATQHYRKPINFTEKAVRDAETNLKYLKNTYEQPFTGNVDAQELQNFKDKFVAAMDEDFNAANGITVVFEMAKWINSGNYDASVKQALADMLEIFGIVFVEEVLDAEIEDLIQKRQEARANRDFATADQIRDQLVTQGIKLLDTKDGVRWTRD

SEQ ID NO: 1071 - DNA, 384 bp, Streptococcus pneumoniae
gtgattgatgtcaatctcattaacgggattgcgctagcctttgagggggatgcggtgtattctatgtatattcgccgtcacctcatcctcaaaggtatgaccaaacccaataaactccatcaagaagcaactaagtacgtgtcagccaaggctcaggctcgcctgattgctctcatgttggaggagcaggtcctaacggaaaaagaagaagaaatctacaaacgtggccgcaataccaatagccacacaaaggctaaaaatgcagatgtcgtgacttatcgtatgtccacgggatttgaagcggttatgggctatctccatatgactgagaatctggaacgtcttgagagtttggtttcatggtgcatccaaaaagtggagggc

SEQ ID NO: 1072 - protein, 128 aa, Streptococcus pneumoniae
  conserved hypothetical protein; Cellular location: cytoplasm; Similar to strain R6 sequence 15902564 (1.E-69)
MIDVNLINGIALAFEGDAVYSMYIRRHLILKGMTKPNKLHQEATKYVSAKAQARLIALMLEEQVLTEKEEEIYKRGRNTNSHTKAKNADVVTYRMSTGFEAVMGYLHMTENLERLESLVSWCIQKVEG

SEQ ID NO: 1073 - DNA, 882 bp, Streptococcus pneumoniae
atgagggcaaaagaactacaagactggtttcctgaggctcggatttcagaccaaccagtagagaaagagggctatctcacgctccctttagcttctcagcagtggattttgctggaggaagctgggctcagcgagcgtgaaaagcagttggttgcccttttgacccagcaggagcaggctcgttcgctaaacccttggtattcctatctggttgagggcaagggacaggcaccgcaagtttttaaaaagattcagttggtttattgccatctttcttattttcagcaggaaaatctggcttcttggctagatatgatgcggactctttttccgaattgtcagacagtgctacaggtcggagctcaggattatgttttcgtgcttcaacaagacaaatacacttctgtaagagatattttaagtgatacgattgaagcggttgagtatgactttggacttcgtctttctatcatgttgggtcaggtttggtctcagacgggacatcaagccctatcagacttaatcaaagctgagcgggatttgttcaagacatggtggcgtcagggtcaccaaggtgttcatactttttctcagctctatctttggagtatgggagaaagactcgtggacttgaagccaatcaaggaatgtctacaccagatgattttggatcaagatcagattcaggaaatcattctctctctttgggaaaatagtgctgttctcactaaaacagcccagcaactctatctgcaccgcaattctctccaatacaagattgataaatgggaagagttgacagggcttcagttgaaagagttgaccgacctgaccttgtgttatcaattgattttaggttctttgtcaactatagttggtttg

SEQ ID NO: 1074 - protein, 294 aa, Streptococcus pneumoniae
  leucine-rich protein (lrp); Cellular location: cytoplasm; Similar to strain R6 sequence 15902565 (e-170)
MRAKELQDWFPEARISDQPVEKEGYLTLPLASQQWILLEEAGLSEREKQLVALLTQQEQARSLNPWYSYLVEGKGQAPQVFKKIQLVYCHLSYFQQENLASWLDMMRTLFPNCQTVLQVGAQDYVFVLQQDKYTSVRDILSDTIEAVEYDFGLRLSIMLGQVWSQTGHQALSDLIKAERDLFKTWWRQGHQGVHTFSQLYLWSMGERLVDLKPIKECLHQMILDQDQIQEIILSLWENSAVLTKTAQQLYLHRNSLQYKIDKWEELTGLQLKELTDLTLCYQLILGSLSTIVGL

SEQ ID NO: 1075 - DNA, 114 bp, Streptococcus pneumoniae
gtgcagagttatagtggcttgatgctgggaaagtacactgtgactgctaaaacattcctagaagctgctttgatttccctaatctatttatgcaaattttatgttattttacta

SEQ ID NO: 1076 - protein, 38 aa, Streptococcus pneumoniae
  hypothetical protein, fusion; Cellular location: membrane
MQSYSGLMLGKYTVTAKTFLEAALISLIYLCKFYVILL

SEQ ID NO: 1077 - DNA, 453 bp, Streptococcus pneumoniae
atgcaaattttatgttattttactataacagttgttgctaagccaaataatagtggggaagttcatttagacgtaagcattgaagataatcagggaggtagtgggtataatttcagttctgtttcaagtagctcacaaacagctaaatatgaaggaactgtttataataacaattcatcattatatataacgattgataaaacgtctgatgcaacagctcttttgaaattaaagttgaataatgttgataatcaacctgctactgaagttcctagttcaggaattactgtaaaattaaatgctaaagataatgctggaaactggacaagtgcttcgaataaaaaagaagtaacagtaaaaattgtttctgctaaaccgacatatccagacaaaatcttagtgaaaaatcctgataatataaaagatacagaaaaaatgccattattgaaaaat

SEQ ID NO: 1078 - protein, 151 aa, Streptococcus pneumoniae
  hypothetical protein; Cellular location: cytoplasm; Similar to strain R6 sequence 15902566 (2.E-81)
MQILCYFTITVVAKPNNSGEVHLDVSIEDNQGGSGYNFSSVSSSSQTAKYEGTVYNNNSSLYITIDKTSDATALLKLKLNNVDNQPATEVPSSGITVKLNAKDNAGNWTSASNKKEVTVKIVSAKPTYPDKILVKNPDNIKDTEKMPLLKN

SEQ ID NO: 1079 - DNA, 144 bp, Streptococcus pneumoniae
ttgaaagaggcaaataaaaatcatccagcaggagctccaacctttgctaaaggtgaaggagagcatgcaaatgatattgtagcaacttattcagatggtacaacttattatgtaccgttaaatgatgtgacaaaatatgcgagg

SEQ ID NO: 1080 - protein, 48 aa, Streptococcus pneumoniae
  hypothetical protein; Cellular location: cytoplasm
MKEANKNHPAGAPTFAKGEGEHANDIVATYSDGTTYYVPLNDVTKYAR

SEQ ID NO: 1081 - DNA, 168 bp, Streptococcus pneumoniae
atgaaaagtatagtcactagcatagatgagcgcttgcgtactcgcctacgagtgattatctggaagcaatggaagaagaaatcgagacgattatggggattgcttaagttaggggttcctaaatggatagcagataaggtatctggctggggcgaccactatcaatta

SEQ ID NO: 1082 - protein, 56 aa, Streptococcus pneumoniae
  group II intron, maturase, degenerate
MKSIVTSIDERLRTRLRVIIWKQWKKKSRRLWGLLKLGVPKWIADKVSGWGDHYQL

SEQ ID NO: 1083 - DNA, 114 bp, Streptococcus pneumoniae
ttgctttctactgttttgttggacttcatcagagtcaaacaggctgaaattccggccaataagaccaataaaatcagaaataaaataaaacttctcagtcgctttctgctgaca

SEQ ID NO: 1084 - protein, 38 aa, Streptococcus pneumoniae
  hypothetical protein
MLSTVLLDFIRVKQAEIPANKTNKIRNKIKLLSRFLLT

SEQ ID NO: 1085 - DNA, 162 bp, Streptococcus pneumoniae
atggaggtgacaaatgaatccaatccaaagatcttgggcttatgtcagcagaaagcgactgagaagttttattttatttctgattttattggtcttattggccggaatttcagcctgtttgactctgatgaagtccaacaaaacagtagaaagcaatcttta

SEQ ID NO: 1086 - protein, 54 aa, Streptococcus pneumoniae
  hypothetical protein; Cellular location: cytoplasm
MEVTNESNPKILGLCQQKATEKFYFISDFIGLIGRNFSLFDSDEVQQNSRKQSL

SEQ ID NO: 1087 - DNA, 1068 bp, Streptococcus pneumoniae
ttgtcagacctagcatctgtaagcaagattaaggggctggaaaatgtctctcctgaacttgagacggtcgcaaaactaaaagacaaggaagcagtgactggcgagcagagcgtggagcgtgatgatttatcagctgcagacaataacttggttagcttaacggctcttgaggattcatccaaggatgtaacctttaccagttcggctttcaatctaaaagaagggcgacaccttcaaaaaggggattccaagaaaatccttatccacgaagaattggctaagaagaacggtctttcgcttcatgacaagattggcttggatgctggtcagtctgaatctggaaaaggacaaacagtagagtttgagattatcggcatcttttctggtaaaaaacaagagaaattcacaggcttgtcttctgacttcagtgaaaatcaagtctttacagactatgaaagtagccaaacccttttgggcaatagtgaagctcaagtcagtgcagcacgcttctatgtagaaaatcctaaggaaatggacggactcatgaagcaggtagaaaacttggccttggaaaatcaaggctaccaagtcgaaaaggaaaacaaggcttttgaacaaatcaaagactcagttgcaactttccaaaccttcctgaccatcttcctttatgggatgttgatagcaggagctggagccttaattctggttttgtctctctggttgagagaacgggtctatgaagtggggattttacttgcacttggaaaaggcaagagctcgatcttcctacaattctgtttagaggtagttttggtatctcttggagctttgcttccagcatttgttgcaggaaacgcaatcacaacttacctactccaaactctactagcaagtggagatcaggcaagcttacaagatacactagccaaagcaagcagtttatcaactagcatcttatcttttgcagaatcctatgtttttctagttctgcttagttgcttatctgtagccctttgtttcctattcttatttagaaaatcaccgaaagaaattttatcatctattagt

SEQ ID NO: 1088 - protein, 356 aa, Streptococcus pneumoniae
  transmembrane protein Vexp1 (vex1); Cellular location: membrane; Similar to strain R6 sequence 15902568 (0.E+01)
MSDLASVSKIKGLENVSPELETVAKLKDKEAVTGEQSVERDDLSAADNNLVSLTALEDSSKDVTFTSSAFNLKEGRHLQKGDSKKILIHEELAKKNGLSLHDKIGLDAGQSESGKGQTVEFEIIGIFSGKKQEKFTGLSSDFSENQVFTDYESSQTLLGNSEAQVSAARFYVENPKEMDGLMKQVENLALENQGYQVEKENKAFEQIKDSVATFQTFLTIFLYGMLIAGAGALILVLSLWLRERVYEVGILLALGKGKSSIFLQFCLEVVLVSLGALLPAFVAGNAITTYLLQTLLASGDQASLQDTLAKASSLSTSILSFAESYVFLVLLSCLSVALCFLFLFRKSPKEILSSIS

SEQ ID NO: 1089 - DNA, 645 bp, Streptococcus pneumoniae
atgactttattacaattacaagatgttacctaccgttataagaatactgctgaagcagtcctatatcagatcaattataattttgaacccggaaaattttacagtattattggggagtcaggagcaggaaaatccacactcttgtccctacttgctggtctagatagtcctgttgaaggttctatcctttttcaaggagaggatattcgtaagaagggctattcttaccatcgcatgcaccatatttccctggtctttcaaaattataacttgatagattatctttctccgctggaaaatatccgattggtcaacaaaaaggcaagcaagaatacacttcttgagcttggtttggatgaaagccagatcaagcggaatgttctccagttatcaggtggtcaacagcaacgtgttgccattgctcgcagtttggtctcagaagctccagttattctagctgatgagccaacaggaaatctggatcctaaaactgctggagatattgtcgaactactcaaatcacttgcccagaaaacaggtaaatgtgtgattgtcgtaactcacagtaaagaagtggcacaagcgtcagatattacacttgaattaaaggataagaaactgactgaaacgcgcaatactagtaaa

SEQ ID NO: 1090 - protein, 215 aa, Streptococcus pneumoniae
  ABC transporter, ATP-binding protein Vexp2 (vex2); Cellular location: cytoplasm; Similar to strain R6 sequence 15902569 (e-117)
MTLLQLQDVTYRYKNTAEAVLYQINYNFEPGKFYSIIGESGAGKSTLLSLLAGLDSPVEGSILFQGEDIRKKGYSYHRMHHISLVFQNYNLIDYLSPLENIRLVNKKASKNTLLELGLDESQIKRNVLQLSGGQQQRVAIARSLVSEAPVILADEPTGNLDPKTAGDIVELLKSLAQKTGKCVIVVTHSKEVAQASDITLELKDKKLTETRNTSK

SEQ ID NO: 1091 - DNA, 1377 bp, Streptococcus pneumoniae
atgttacacaacgcatttgcctatgttacaaggaagtttttcaaatcgattgtcatcttcctgattattctcctcatggcgagcttgagtttggtcggcttgtcaatcaagggagctactgccaaggcttctcaggagacctttaaaaatatcaccaatagcttctccatgcaaatcaatcgtcgcgtcaaccaaggaacgcctcgtggtgctgggaatatcaagggtgaagacatcaaaaaaatcaccgaaaacaaggccattgagtcttatgtcaaacgtatcaacgctatcggagatttgactggatatgacctgattgaaacgccagaaaccaagaagaatctcactgctgatcgtgccaagcgttttggaagtagcttgatgattacaggtgtcaatgactcctctaaagaagacaagtttgtctctggttcttataaactagtcgaaggagagcacttaaccaacgacgacaaggataaaatcctcttgcacaaggacttggcagccaaacacggctggaaagtaggggacaaggttaaactggactctaatatctacgatgcagataatgaaaaaggagccaaggaaacagttgaagtgacaatcaagggactctttgatggtcataataagtcagcagtaacctactcacaagaactttacgaaaacacagctattacagacattcacactgctgcaaaactttatggatacacagaagacacagccatttatggggacgcaaccttctttgtaacagcagacaagaacttggatgatgttatgaaagagttgaatggcatcagtggtatcaactggaagagctacacactcgtcaagagctcctctaactacccagctcttgagcaatctatctctggtatgtacaagatggccaacctcctcttctggggtagcttgagcttctcagttctcctccttgccctcttgctcagcctttggatcaacgcccgtcgcaaggaagtgggaattctcctctctatcggcctcaagcaggcaagtatcttgggtcaattcatcaccgaatctatcttgattgctatccctgctctagtttctgcttacttcctagctaattacactgcccgtgcaattggaaacactgtccttgccaatgtgacttcaggtgttgccaaacaggctagtaaggcggctcaagcctctaaccttggtggtggtgcagaagtagatggctttagcaagaccttgtcgagcctagacatttccattcagacatcagactttatcatcatttttgtccttgccttggttctagtggttctcgttatggcgcttgcttcaagcaatctccttagaaaacaaccaaaagagctcttgctggatggtgaa

SEQ ID NO: 1092 - protein, 459 aa, Streptococcus pneumoniae
  transmembrane protein Vexp3 (vex3); Cellular location: membrane; Similar to strain R6 sequence 15902570 (0.E+01)
MLHNAFAYVTRKFFKSIVIFLIILLMASLSLVGLSIKGATAKASQETFKNITNSFSMQINRRVNQGTPRGAGNIKGEDIKKITENKAIESYVKRINAIGDLTGYDLIETPETKKNLTADRAKRFGSSLMITGVNDSSKEDKFVSGSYKLVEGEHLTNDDKDKILLHKDLAAKHGWKVGDKVKLDSNIYDADNEKGAKETVEVTIKGLFDGHNKSAVTYSQELYENTAITDIHTAAKLYGYTEDTAIYGDATFFVTADKNLDDVMKELNGISGINWKSYTLVKSSSNYPALEQSISGMYKMANLLFWGSLSFSVLLLALLLSLWINARRKEVGILLSIGLKQASILGQFITESILIAIPALVSAYFLANYTARAIGNTVLANVTSGVAKQASKAAQASNLGGGAEVDGFSKTLSSLDISIQTSDFIIIFVLALVLVVLVMALASSNLLRKQPKELLLDGE

SEQ ID NO: 1093 - DNA, 90 bp, Streptococcus pneumoniae
atggaatttatgagaaaggaatttcacaacgttttatctagtggtcagttgcttgcagacaaaaggccagcaagagactataatagaaaa

SEQ ID NO: 1094 - protein, 30 aa, Streptococcus pneumoniae
  pep27 protein (pep27); Cellular location: cytoplasm; Similar to strain R6 sequence 15902571 (6.E-10)
MEFMRKEFHNVLSSGQLLADKRPARDYNRK

SEQ ID NO: 1095 - DNA, 654 bp, Streptococcus pneumoniae
atgaaaattttaattgtagaagatgaagagatgatccgtgagggggtcagtgattatttgacggattgtggctatgaaactattgaggcagcggacggtcaggaagctctggagcaattttctagctatgaggtggccctggttttactggatatccagatgcccaagctcaacggcttagaagtcctagctgagattcgtaaaaccagtcaggttcctgtcttgatgttgacagcttttcaagatgaggaatacaagatgagtgcctttgcctctttggcagatggctatctggaaaaacctttctccctctcccttttaaaagtgagggtggacgcgattttcaagcgctactacgatacaggacgaatcttttcttacaaggataccaaggtggactttgaaagctacagtgcaagcctcgcaggtcaagaagtgcctatcaatgccaaagagttggaaattctggactatctagtgaaaaatgaaggccgggccttgactcgatctcagattatcgatgccgtctggaaagcgacagatgaggttccctttgaccgtgttattgatgtttatatcaaggaattgcggaaaaagctagacttggattgtatcctcactgtgcgcaatgttggttataaattggagcgaaaa

SEQ ID NO: 1096 - protein, 218 aa, Streptococcus pneumoniae
  DNA-binding response regulator VncR (vncR); Cellular location: cytoplasm; Similar to strain R6 sequence 15902572 (e-120)
MKILIVEDEEMIREGVSDYLTDCGYETIEAADGQEALEQFSSYEVALVLLDIQMPKLNGLEVLAEIRKTSQVPVLMLTAFQDEEYKMSAFASLADGYLEKPFSLSLLKVRVDAIFKRYYDTGRIFSYKDTKVDFESYSASLAGQEVPINAKELEILDYLVKNEGRALTRSQIIDAVWKATDEVPFDRVIDVYIKELRKKLDLDCILTVRNVGYKLERK

SEQ ID NO: 1097 - DNA, 1326 bp, Streptococcus pneumoniae
atgaaacgaacaggtttatttgcaaagatatttatctataccttctcgatatttagtgttctggttatctgccttcatttagctatttattttctttttccttcgacttatctgagtcatcgtcaggaaaccattggtcaaaaggcaacagccattgcccagtccctagaagggaaagataggcagagtatcgagcaagtgttagacttgtattcccagactagtgatatcaaggggaccgtcaaaggtgagatgaccgaggacaagttagaagtcaaggacagtcttcctctggacacagaccgccagacaacctctctctttattgaggagcgcgaggtgaaaacgcaagacggtggtactatgattctccagtttctagcttccatggatttacaaaaggaagcggagcaaatcagtctccagtttcttccctataccttgctggcctcctttctgatttcccttttggtggcctacatctacgctcggactattgttgcaccgattttggaaatcaagcgggtgacccgtcggatgatggacctggattcccaagtgcgattgcgcgtggattctaaggatgagataggtaatctcaaggaacaaatcaatagcctctaccagcatctcttgactgttattgcggacttgcatgaaaagaatgaagccattctccagctggagaagatgaaggtcgaattcctacgaggagcttctcatgaattgaaaacaccgctggctagtttgaaaatcctaatcgaaaatatgagagagaatatcggtcgttataaggatagagaccagtatctgggagttgccttggggattgtggatgaactcaatcaccatgttctgcagatactttccctctcttctgtgcaggaattgcgagatgatagggaaacaattgacctcctccagatgacgcaaaatctggtcaaagattatgccttgctagccaaggaaagagagctccagatagacaatagtttgacccatcagcaggcttatctaaacccatcagttatgaagttgattctttctaatctcatcagcaatgccattaagcactctgttccaggtggcttagttcgaattggagaaagagaaggagaactttttatcgaaaatagctgtagctcagaggaacaagaaaaactagcccagtctttttctgacaatgccagtcgcaaggtcaaggggtctggtatggggctctttgtggttaagagtctattagaacatgaaaaattagcttatcgtttcgagatggaggagaatagtttaaccttctttatagattttccaaaagtcgtccaagac

SEQ ID NO: 1098 - protein, 442 aa, Streptococcus pneumoniae
  sensor histidine kinase VncS (vncS); Cellular location: membrane; Similar to strain R6 sequence 15902573 (0.E+01)
MKRTGLFAKIFIYTFSIFSVLVICLHLAIYFLFPSTYLSHRQETIGQKATAIAQSLEGKDRQSIEQVLDLYSQTSDIKGTVKGEMTEDKLEVKDSLPLDTDRQTTSLFIEEREVKTQDGGTMILQFLASMDLQKEAEQISLQFLPYTLLASFLISLLVAYIYARTIVAPILEIKRVTRRMMDLDSQVRLRVDSKDEIGNLKEQINSLYQHLLTVIADLHEKNEAILQLEKMKVEFLRGASHELKTPLASLKILIENMRENIGRYKDRDQYLGVALGIVDELNHHVLQILSLSSVQELRDDRETIDLLQMTQNLVKDYALLAKERELQIDNSLTHQQAYLNPSVMKLILSNLISNAIKHSVPGGLVRIGEREGELFIENSCSSEEQEKLAQSFSDNASRKVKGSGMGLFVVKSLLEHEKLAYRFEMEENSLTFFIDFPKVVQD

SEQ ID NO: 1099 - DNA, 879 bp, Streptococcus pneumoniae
atggcaatcgtttcagcagaaaaatttgtccaagcagcccgtgacaacggttatgcagttggtggatttaacacaaacaaccttgagtggactcaagctatcttgcgcgcagcagaagctaaaaaagctccagttttgatccaaacttcaatgggtgctgctaaatacatgggtggttacaaagttgctcgcaacttgatcgctaaccttgttgaatcaatgggtatcactgtaccagtagctatccaccttgaccacggtcactacgaagatgcacttgagtgtatcgaagttggttatacttcaatcatgtttgacggttcacaccttccagttgaagaaaaccttaaattggctaaagaagttgttgaaaaagcacacgctaaaggtatctcagtagaagctgaagttggtactatcggtggtgaagaagatggaatcatcggtaaaggtgaattggctccaatcgaagacgctaaagcaatggttgaaactggtatcgacttcttggcagctggtatcggtaacatccacggtccttacccagtaaactgggaaggtcttgaccttgaccacttgcaaaaattgacagaagctcttccaggattcccaatcgtattgcacggtggatcaggtattcctgatgagcaaatccaagcagctatcaaacttggtgttgccaaagttaacgttaacacagaatgccaaatcgcattcgctaacgcaactcgtaaatttgctcgtgactacgaagcaaacgaagcagaatacgacaagaaaaaactcttcgacccacgtaaattcttggctgacggtgtaaaagctatccaagcatcggttgaagaacgtatcgacgtattcggttcagaaggtaaagca

SEQ ID NO: 1100 - protein, 293 aa, Streptococcus pneumoniae
  fructose-bisphosphate aldolase (fba); Cellular location: membrane; Similar to strain R6 sequence 15902574 (e-167)
MAIVSAEKFVQAARDNGYAVGGFNTNNLEWTQAILRAAEAKKAPVLIQTSMGAAKYMGGYKVARNLIANLVESMGITVPVAIHLDHGHYEDALECIEVGYTSIMFDGSHLPVEENLKLAKEVVEKAHAKGISVEAEVGTIGGEEDGIIGKGELAPIEDAKAMVETGIDFLAAGIGNIHGPYPVNWEGLDLDHLQKLTEALPGFPIVLHGGSGIPDEQIQAAIKLGVAKVNVNTECQIAFANATRKFARDYEANEAEYDKKKLFDPRKFLADGVKAIQASVEERIDVFGSEGKA

SEQ ID NO: 1101 - DNA, 1200 bp, Streptococcus pneumoniae
atggaattttctatgaaatcagtcaaaggactactctttatcatagctagttttatcttgactcttttgacttggatgaacacttctccccaattcatgattccaggactagctttaacaagcctatctctgacttttatcctagccactcgtctcccactactagaaagctggtttcacagtttggagaaggtctacaccgtccacaaattcacagcctttctctcaatcatcctactaatctttcataactttagtatgggcggtttgtggggctctcgcttagctgctcagtttggcaatcttgccatctatatctttgccagcatcatccttgtcgcctatttaggcaaatacatccaatacgaagcttggcgatggattcaccgcctggtttacctagcctatattttaggactctttcacatctacatgataatgggcaatcgtctccttacatttaatcttctaagttttcttgttggtagctatgcccttttaggcttactagctggtttttatatcatttttctatatcaaaagatttccttcccctatctagggaaaattacccatctcaaacgcttaaatcacgatactagagaaattcaaatccatcttagcagacctttcaactatcaatcaggacaatttgcctttctaaagattttccaagaaggctttgaaagtgctccgcatcccttttctatctcaggaggtcatggtcaaactctttactttactgttaaaacttcaggcgaccataccaagaatatctatgataatcttcaagccggcagcaaagtaaccctagacagagcttacggacacatgatcatagaagaaggacgagaaaatcaggtttggattgctggaggtattgggatcacccccttcatctcttacatccgtgaacatcctattttagataaacaggttcacttctactatagcttccgtggagatgaaaatgcagtctacctagatttactccgtaactatgctcagaaaaatcctaattttgaactccatctaatcgacagtacgaaagacggctatcttaattttgaacaaaaagaagtgcccgaacatgcaaccgtctatatgtgtggtcctatttctatgatgaaggcacttgccaaacagattaagaaacaaaatccaaaaacagagcttatttacgaaggattcaagttcaaa

SEQ ID NO: 1102 - protein, 400 aa, Streptococcus pneumoniae
  oxidoreductase, putative; Cellular location: membrane; Similar to strain R6 sequence 15902575 (0.E+01)
MEFSMKSVKGLLFIIASFILTLLTWMNTSPQFMIPGLALTSLSLTFILATRLPLLESWFHSLEKVYTVHKFTAFLSIILLIFHNFSMGGLWGSRLAAQFGNLAIYIFASIILVAYLGKYIQYEAWRWIHRLVYLAYILGLFHIYMIMGNRLLTFNLLSFLVGSYALLGLLAGFYIIFLYQKISFPYLGKITHLKRLNHDTREIQIHLSRPFNYQSGQFAFLKIFQEGFESAPHPFSISGGHGQTLYFTVKTSGDHTKNIYDNLQAGSKVTLDRAYGHMIIEEGRENQVWIAGGIGITPFISYIREHPILDKQVHFYYSFRGDENAVYLDLLRNYAQKNPNFELHLIDSTKDGYLNFEQKEVPEHATVYMCGPISMMKALAKQIKKQNPKTELIYEGFKFK

SEQ ID NO: 1103 - DNA, 657 bp, Streptococcus pneumoniae
atggaatctattttagaagttttaaccccagataacctagtctttatctttaaaggatttggcttgaccctctatatttctctgattgccatcatcctctctactatcatcggtacggtgctagctgtcacgagaaatggcaaaaatcctgtcttacgcattatttccagtatttatatcgagtttgtgcgcaacgttcccaaccttctctggatttttactatctttttggtgttcaaaatgaaatccacaccagcaggtattacagcctttactctctttacatcagcagccttggctgagattattcgaggcggtctcaatgccgtagacaagggacagtacgaagcaggaatgtcacaaggcttcacctcagcccaaatcctctactacatcattctcccacaagccatccgcaaaatgctaccagccatcatttctcagtttgttaccgtgattaaggataccagtctcctctactctgttatcgccctacaagaactctttggagccagccaaattctcatgggccgttatttcgaaccagagcaggtcttcagtctttacatcctgattgccctcatctacttcagctttaacctagcaatttctagcctgtctcatatgctagccaaacgttggcaacaagctgcagaa

SEQ ID NO: 1104 - protein, 219 aa, Streptococcus pneumoniae
  amino acid ABC transporter, permease protein; Cellular location: membrane; Similar to strain R6 sequence 15902576 (e-117)
MESILEVLTPDNLVFIFKGFGLTLYISLIAIILSTIIGTVLAVTRNGKNPVLRIISSIYIEFVRNVPNLLWIFTIFLVFKMKSTPAGITAFTLFTSAALAEIIRGGLNAVDKGQYEAGMSQGFTSAQILYYIILPQAIRKMLPAIISQFVTVIKDTSLLYSVIALQELFGASQILMGRYFEPEQVFSLYILIALIYFSFNLAISSLSHMLAKRWQQAAE

SEQ ID NO: 1105 - DNA, 675 bp, Streptococcus pneumoniae
atgacagatttatcatcttggacagcctattttcaggattttggacaatttttcaatggtttcctcttcacccttgccctagcggttggttcctttatcctcgctatggttttgggcatcttctttggtgccatgtcaaccagtaaacgtccaattttacgcattttagctcgcatctttgttgaattttaccaaaatactcccctcttggtgcagtttgttattgttttttatggcctacctcttatcagtgaccatatcatcatgattccaatttattggacagccgttctctgcgtgggactctatcacggcgcttatatcgctgaggttattcgttcagggattcagtctattcctagtggtcagatggaggccgccttgtcgcaaggttttacctatatcagtgccatgcgcttgattatcttgcctcaggccttccgcatcattctccctccattgaccaaccaaattgttaacctcatcaagaacacctctactgtagctatcatctctggagtagacttgatgtttgtgactaagtcttggtcggctctcaacggaaactatataccagcctttttaggtgctgctcttctctactttgctctatgcttccctgttgcccagtttggtcgcaagatggagcaagccaacaaaaaagcctattcactt

SEQ ID NO: 1106 - protein, 225 aa, Streptococcus pneumoniae
  amino acid ABC transporter, permease protein; Cellular location: membrane; Similar to strain R6 sequence 15902577 (e-126)
MTDLSSWTAYFQDFGQFFNGFLFTLALAVGSFILAMVLGIFFGAMSTSKRPILRILARIFVEFYQNTPLLVQFVIVFYGLPLISDHIIMIPIYWTAVLCVGLYHGAYIAEVIRSGIQSIPSGQMEAALSQGFTYISAMRLIILPQAFRIILPPLTNQIVNLIKNTSTVAIISGVDLMFVTKSWSALNGNYIPAFLGAALLYFALCFPVAQFGRKMEQANKKAYSL

SEQ ID NO: 1107 - DNA, 762 bp, Streptococcus pneumoniae
ttgattagccttttcggccttgctgctgccaaaccagtccaggctgatacaagtatcgcagacattcaaaaaagaggcgaactggttgtcggtgtcaaacaagacgttcccaattttggttacaaagatcccaagaccggtacttattctggtatcgaaaccgacttggccaagatggtagctgatgaactcaaggtcaagattcgctatgtgccggttacagcacaaacccgcggcccccttctagacaatgaacaggtcgatatggatatcgcgacctttaccatcacggacgaacgcaaaaaactctacaactttaccagtccctactacacagacgcttctggatttttggtcaataaatctgccaaaatcaaaaagattgaggacctaaacggcaaaaccatcggagtcgcccaaggttctatcacccaacgcctgattactgaactgggtaaaaagaaaggtctgaagtttaaattcgtcgaacttggttcctacccagaattgattacttccctgcacgctcatcgtatcgataccttttccgttgaccgctctattctatctggctacactagtaaacggacagcactactagatgatagtttcaagccatctgactacggtattgttaccaagaaatcaaatacagagctcaacgactatcttgataacttggttactaaatggagcaaggatggtagtttgcagaaactttatgaccgttacaagctcaaaccatctagccatactgcagat

SEQ ID NO: 1108 - protein, 254 aa, Streptococcus pneumoniae
  amino acid ABC transporter, amino acid-binding protein; Cellular location: cytoplasm; Similar to strain R6 sequence 15902578 (e-143)
MISLFGLAAAKPVQADTSIADIQKRGELVVGVKQDVPNFGYKDPKTGTYSGIETDLAKMVADELKVKIRYVPVTAQTRGPLLDNEQVDMDIATFTITDERKKLYNFTSPYYTDASGFLVNKSAKIKKIEDLNGKTIGVAQGSITQRLITELGKKKGLKFKFVELGSYPELITSLHAHRIDTFSVDRSILSGYTSKRTALLDDSFKPSDYGIVTKKSNTELNDYLDNLVTKWSKDGSLQKLYDRYKLKPSSHTAD

SEQ ID NO: 1109 - DNA, 756 bp, Streptococcus pneumoniae
atggctttagtagaatttaaaaacgtcgaaaaatattacggagactaccacgcattccgcaacatcaatctccgttttgaaaaaggacaagttgttgtcctgcttggaccttctggctctgggaagtccactcttatccgtacgatcaatggtttagagactgttgacaaaggaagtctcctagtcaatgggcaccaagttgctggtgccagccagaaagatttggtacctcttcgcaaggaagtcggcatggtttttcaacattttaacctttatccacacaaagctgtgttagaaaacgtaacgcttgcacccattgaagttctaggaattgataaaaaagaagctgaaaaaaccgcccaaaaatatctggaatttgtaaatatgtgggacaagaaagattcctatcccgccatgctatctggtggacaaaaacagcggatcgccatcgctcgtggtcttgctatgcatccggaactcctcctctttgatgaaccaacatctgctcttgatcctgagactatcggagatgttctagcagttatgcagaaactggcgcatgatgggatgaacatgatcatcgttacccacgaaatgggctttgctcgagaggttgcggaccgcattatctttatggccgacggagaagttttagtagatacgacagatgtcgataacttttttgacaatccaagcgaacctcgtgcccaacaattcctcagcaaaattatcaaccacgaaagtgacaaagtcaaa

SEQ ID NO: 1110 - protein, 252 aa, Streptococcus pneumoniae
  amino acid ABC transporter, ATP-binding protein; Cellular location: cytoplasm; Similar to strain R6 sequence 15902772 (2.E-72)
MALVEFKNVEKYYGDYHAFRNINLRFEKGQVVVLLGPSGSGKSTLIRTINGLETVDKGSLLVNGHQVAGASQKDLVPLRKEVGMVFQHFNLYPHKAVLENVTLAPIEVLGIDKKEAEKTAQKYLEFVNMWDKKDSYPAMLSGGQKQRIAIARGLAMHPELLLFDEPTSALDPETIGDVLAVMQKLAHDGMNMIIVTHEMGFAREVADRIIFMADGEVLVDTTDVDNFFDNPSEPRAQQFLSKIINHESDKVK

SEQ ID NO: 1111 - DNA, 2232 bp, Streptococcus pneumoniae
gtggatgtctttttgataacacctacttatgaatggcagtttgccctgcaggtagaagatgcggattttacaaagatagccaagaaggctggactgggtcctgaggtggctcggttattgtttgagagagggattcagaaccaagaaagtctgaagaagtttttagaaccttccttggaggacttacatgatgcttatctgctccatgatatggacaaggcagtggagcggattcgtcaggctattgaagaaggggaaaatattcttgtttatggagactatgatgcggatggcatgacttcggcttctattgtgaaggaaagtttggaacaacttggtgctgagtgccgagtttacctgccaaatcgttttaccgatggctatggccctaatgctagtgtttataaatactttatcgagcaagaagggatttccttgattgtgacggtggacaatggggttgctggtcatgaggctattgcattggctcagtctatgggagtagatgtcattgtgacagaccatcattccatgcctgaaaccctgccagatgcttatgctattgtccatcctgaacatccagatgcggattatccttttaaatatttggctggttgtggagttgctttcaagttggcttgtgccctgttagaagaagtgcaagtggaattgcttgatttggtcgctattggaactattgcagatatggtgagtctgacggatgaaaatcgtatcttagttcaatatggtctggaaatgttgggtcatacccagcgcattggtctgcaagaaatgctggacatggctgggattgctgccaacgaagtaacagaagaaacggttggtttccagattgctcctcgtttgaatgccttgggtcgcttggatgatcccaatcctgccattgatttgttgactggatttgatgatgaggaagcgcatgagattgcccttatgattcaccagaaaaacgaagagcgcaaggaaatcgttcagtctatctatgaagaagccaagaccatggtggatcctgagaagaaggttcaggtcttggccaaggaaggctggaatcctggggttctaggaatcgtggctggtcgtttattggaagaattgggacagacagtcattgttcttaatatagaagacggtcgtgccaagggcagtgctcgtagtgtggaagcggtcgatatttttgaagctctggatccccatcgagacctcttcatcgcctttggaggtcatgcaggtgcagcgggtatgacgctggaagttgagcaactctcagatttatctcaggttttggaagattatgttcgtgaaaaaggtgcagatgctggtggcaagaataagttaaacctagatgaagagttggatttggaggcacttagcttggaaacggtcaaaagttttgaacgtttagctccttttggaatggataatcagaaacctattttttatatcaagaattttcaggtcgaaagtgctcgtactatgggggcaggtaatgcccatctaaagctgaaaatttccaagggtgaggcgagttttgaagtggtagcctttggtcaaggcagatgggcgacagagttttctcaaaccaagaatctagagttagcggttaaattgtctgtcaaccaatggaatggccaaactgccctccagttgatgatggtggatgcgcgagtggaaggtgttcaactttttaacattcgtggaaaaaatgcagtcttgccagaaggtgttccagtcttggattttcctggagaactgccaaatcttgcggctagtgaagctgttgtcgtaaaaaacattccagaggatattactcagctgaagaccatttttcaggaacagcatttctctgctgtctatttcaaaaatgatattgacaaggcttattatctgacaggttatgggactagagatcagtttgccaaattgtacaagactatttaccagttcccagagtttgatattcgctacaagctgaaagatttggctgcatatcttaatattcaacaaatcttgctggtcaagatgattcaagtatttgaagaactaggctttgtgacgataaaagatggtgtgatgacagtcaataaagaggcgccaaagcgggagataggagaaagtcaaatttaccaaaatctcaaacaaaccgttaaagaccaagaaatgatggcgctgggtacggtgcaagaaatttatgattttttgatggaaaaagag

SEQ ID NO: 1112 - protein, 744 aa, Streptococcus pneumoniae
  single-stranded-DNA-specific exonuclease RecJ (recJ); Cellular location: membrane; Similar to strain R6 sequence 15902581 (0.E+01)
MDVFLITPTYEWQFALQVEDADFTKIAKKAGLGPEVARLLFERGIQNQESLKKFLEPSLEDLHDAYLLHDMDKAVERIRQAIEEGENILVYGDYDADGMTSASIVKESLEQLGAECRVYLPNRFTDGYGPNASVYKYFIEQEGISLIVTVDNGVAGHEAIALAQSMGVDVIVTDHHSMPETLPDAYAIVHPEHPDADYPFKYLAGCGVAFKLACALLEEVQVELLDLVAIGTIADMVSLTDENRILVQYGLEMLGHTQRIGLQEMLDMAGIAANEVTEETVGFQIAPRLNALGRLDDPNPAIDLLTGFDDEEAHEIALMIHQKNEERKEIVQSIYEEAKTMVDPEKKVQVLAKEGWNPGVLGIVAGRLLEELGQTVIVLNIEDGRAKGSARSVEAVDIFEALDPHRDLFIAFGGHAGAAGMTLEVEQLSDLSQVLEDYVREKGADAGGKNKLNLDEELDLEALSLETVKSFERLAPFGMDNQKPIFYIKNFQVESARTMGAGNAHLKLKISKGEASFEVVAFGQGRWATEFSQTKNLELAVKLSVNQWNGQTALQLMMVDARVEGVQLFNIRGKNAVLPEGVPVLDFPGELPNLAASEAVVVKNIPEDITQLKTIFQEQHFSAVYFKNDIDKAYYLTGYGTRDQFAKLYKTIYQFPEFDIRYKLKDLAAYLNIQQILLVKMIQVFEELGFVTIKDGVMTVNKEAPKREIGESQIYQNLKQTVKDQEMMALGTVQEIYDFLMEKE

SEQ ID NO: 1113 - DNA, 96 bp, Streptococcus pneumoniae
ttgaaaacagaccttcattttgaaaatcatcaaaaaaatggtataatggtaggaaaagattcggctgaaagtatcagaacttttagaataagaggg

SEQ ID NO: 1114 - protein, 32 aa, Streptococcus pneumoniae
  hypothetical protein; Cellular location: cytoplasm
MKTDLHFENHQKNGIMVGKDSAESIRTFRIRG

SEQ ID NO: 1115 - DNA, 1659 bp, Streptococcus pneumoniae
atgagtaatatcagtttaacaacacttggtggtgtgcgtgagaatggaaaaaatatgtacattgctgaaattggagagtccatttttgttttgaatgtagggttaaaatatcctgaaaatgaacaattaggggtcgatgtggtgattccaaacatggattacctttttgaaaatagcgaccgtattgctggggttttcttgacccacgggcatgcggatgccattggtgctctaccgtatctcttggcagaggctaaagttcctgtatttgggtctgagttgaccattgagttggcaaagctctttgtcaaaggaaatgatgccgttaagaaatttaatgatttccatgtcattgatgagaatacggagattgattttggtgggacagtggtttccttcttccctacgacttactccgttccagagagtctgggaattgtcttgaagacatcggaaggaagcatcgtttatacaggtgacttcaaatttgaccaaacggctagtgaatcttatgcaactgattttgctcgtttggcagagattggtcgtgacggcgtcctggctctcctcagtgattcggccaatgcagacagcaatattcaggtggctagtgaaagtgaagttagggatgaaattacccaaactattgctgactgggaaggtcgtatcatcgttgcagctgtttccagtaatctttctcgtattcagcagatttttgacgctgcggataaaacaggtcgacgtatcgtcttgacaggatttgatattgaaaatatcgtccgcacagcgattcgtcttaagaagttgtctttagccaacgaaattcttttgattaagcctaaagatatgtctcgctttgaagaccatgagttgattattcttgagacaggtcgtatgggtgagcctatcaatggacttcgtaagatgtcgattggtcgccatcgttatgtagaaatcaaggatggggacctagtctatattgctacggctccgtctattgctaaagaagcctttgttgcgcgtgtggaaaatatgatttatcaggcaggtggggttgtcaaattgattacccaaagtttacatgtatcagggcacggaaatgtgcgtgatttgcagctgatgatcaatcttttgcaacctaagtacctcttccctgtccaaggggagtatcgtgagttggatgctcacgctaaggctgccatggcagttgggatgttgccagaacgcatcttcattcctaaaaaggggacgaccatggcttacgagaatggagactttgttccagctggatcggtttcagcaggagatatcttgattgatgggaatgccattggtgatgttggaaatgttgttcttcgtgaccgtaaggtcttgtcagaggatggaattttcatcgtggctattacagtcaaccgtcgtgagaagaaaattgtggctagggctcgtgttcacacgcgtggatttgtttatctcaagaagagtcgcgatattctccgtgaaagttcagaattgattaaccaaacggtagaagagtatcttcaaggagatgactttgactgggcagatctcaaaggtaaggttcgtgacaatctgaccaagtacctctttgatcaaaccaagcgtcgcccagccattttaccagtagtcatggaagcaaaa

SEQ ID NO: 1116 - protein, 553 aa, Streptococcus pneumoniae
  metallo-beta-lactamase superfamily protein; Cellular location: cytoplasm; Similar to strain R6 sequence 15902582 (0.E+01)
MSNISLTTLGGVRENGKNMYIAEIGESIFVLNVGLKYPENEQLGVDVVIPNMDYLFENSDRIAGVFLTHGHADAIGALPYLLAEAKVPVFGSELTIELAKLFVKGNDAVKKFNDFHVIDENTEIDFGGTVVSFFPTTYSVPESLGIVLKTSEGSIVYTGDFKFDQTASESYATDFARLAEIGRDGVLALLSDSANADSNIQVASESEVRDEITQTIADWEGRIIVAAVSSNLSRIQQIFDAADKTGRRIVLTGFDIENIVRTAIRLKKLSLANEILLIKPKDMSRFEDHELIILETGRMGEPINGLRKMSIGRHRYVEIKDGDLVYIATAPSIAKEAFVARVENMIYQAGGVVKLITQSLHVSGHGNVRDLQLMINLLQPKYLFPVQGEYRELDAHAKAAMAVGMLPERIFIPKKGTTMAYENGDFVPAGSVSAGDILIDGNAIGDVGNVVLRDRKVLSEDGIFIVAITVNRREKKIVARARVHTRGFVYLKKSRDILRESSELINQTVEEYLQGDDFDWADLKGKVRDNLTKYLFDQTKRRPAILPVVMEAK

SEQ ID NO: 1117 - DNA, 777 bp, Streptococcus pneumoniae
atggcagtgatgaaaatcgagtattactcacaagtattggatatggagtggggggtgaatgtcctctaccctgatgccaatcgagtggaagaaccagagtgtgaagatattcccgtcttgtaccttttgcacgggatgtctggaaatcataatagttggcttaagcggaccaatgtagaacgcttgcttcgaggaactaatctcatcgttgttatgcccaataccagcaatggttggtacaccgatacccagtatggttttgactactacacggctctagcagaggaattgccacaggttctgaaacgcttcttccctaatatgacgagcaagcgtgaaaagacctttatcgctggtctttctatgggaggctacggctgcttcaaactggctcttacgacaaatcgtttttctcatgcagctagtttttcaggtgccctcagctttcaaaacttttctcctgaaagtcaaaatctgggaagtccagcctactggagaggtgtttttggagagattagagactggacaactagtccctattctcttgaaagtctggctaaaaaatcggataaaaagaccaaactttgggcgtggtgtggcgaacaggatttcttgtacgaagccaataatctcgcagtgaaaaatctcaaaaaactaggttttgatgtgacctatagccatagcgctggaactcacgagtggtactactgggaaaaacaattggaagtttttttaacaaccctaccaattgatttcaaattagaagagagactgact

SEQ ID NO: 1118 - protein, 259 aa, Streptococcus pneumoniae
  tributyrin esterase (estA); Cellular location: cytoplasm; Similar to strain R6 sequence 15902583 (e-156)
MAVMKIEYYSQVLDMEWGVNVLYPDANRVEEPECEDIPVLYLLHGMSGNHNSWLKRTNVERLLRGTNLIVVMPNTSNGWYTDTQYGFDYYTALAEELPQVLKRFFPNMTSKREKTFIAGLSMGGYGCFKLALTTNRFSHAASFSGALSFQNFSPESQNLGSPAYWRGVFGEIRDWTTSPYSLESLAKKSDKKTKLWAWCGEQDFLYEANNLAVKNLKKLGFDVTYSHSAGTHEWYYWEKQLEVFLTTLPIDFKLEERLT

SEQ ID NO: 1119 - DNA, 1218 bp, Streptococcus pneumoniae
atgtaccgttatcaaattggcattcccacattagaatatgatcagtttgtcaaagaacatgaattagccaatgtattacaaagtagtgcttgggaggaagttaagtctaattggcaacatgagaagtttggtgtttacagggaagaaaaattactggcgacagctagtattttgattagaactcttccgctaggctataaaatgttttacatcccaagaggacctatattggattatggggataaagaactcttgaattttgccattcagtctattaagtcctatgctcgcagtaagagagcggtttttgtgacttttgacccaagtatttgcctatctcaaagtttaatcaatcaggaaaagacagaatttcctgaaaatctggctattattgatagtttgcaacaaatgggagtaaggtggtcaggaaaaacggaggaaatgggagacaccattcaacctcgtattcaggcgaaaatatacaaggaaaattttgaagaagataaactttccaagtcaacaaaacaggctattcgaacagcacgaaacaaagggcttgagattcaatatggtggactggaactattagattcattttcggagttgatgaaaaaaactgagaagcgaaaagagattcatttgaggaatgaagcctattataaaaaattgttagataattttaaggacaaggcctatatcaccttggccaccttggatgtttctaaacgttcgcaagagttagaagaacagttagcgaaaaatagagccttggaagagacctttactgagtcgactcgaacttcaaaagtagaagcgcagaagaaggaaaaagaacgtttgttagaggaattgaccttcttgcaggaatatatagatgtaggtcaagcgagagttcctttagcggctactttgagtttggaatttggtactacctctgtcaatatatatgctggtatggatgatgattttaaacgttacaatgcaccaattttaacttggtatgaaacggctcgctatgcctttgaacgaggtatgatctggcaaaatttaggtggtgttgaaaactctctcaatggtggactttatcattttaaggaaaaatttaatccaacgattgaagaatacttgggtgaatttacaatgcccactcatcctctctatcctctgttaagacttgctcttgatttccgtaaaacattaagaaaaaaacatagaaag

SEQ ID NO: 1120 - protein, 406 aa, Streptococcus pneumoniae
  beta-lactam resistance factor (fibA); Cellular location: cytoplasm; Similar to strain R6 sequence 15902584 (0.E+01)
MYRYQIGIPTLEYDQFVKEHELANVLQSSAWEEVKSNWQHEKFGVYREEKLLATASILIRTLPLGYKMFYIPRGPILDYGDKELLNFAIQSIKSYARSKRAVFVTFDPSICLSQSLINQEKTEFPENLAIIDSLQQMGVRWSGKTEEMGDTIQPRIQAKIYKENFEEDKLSKSTKQAIRTARNKGLEIQYGGLELLDSFSELMKKTEKRKEIHLRNEAYYKKLLDNFKDKAYITLATLDVSKRSQELEEQLAKNRALEETFTESTRTSKVEAQKKEKERLLEELTFLQEYIDVGQARVPLAATLSLEFGTTSVNIYAGMDDDFKRYNAPILTWYETARYAFERGMIWQNLGGVENSLNGGLYHFKEKFNPTIEEYLGEFTMPTHPLYPLLRLALDFRKTLRKKHRK

SEQ ID NO: 1121 - DNA, 1230 bp, Streptococcus pneumoniae
atggcactaacaacactcacgaaagaagagtttcagacttattctgatcaggtttcttctcgttcctttatgcaatctgtccagatgggggatttgctagaaaaaagaggggctcgaattgtttatcttgctttgaaacaagaaggagaaattcaagttgcagctctggtttatagcctgcccatgctgggtggtctgcatatggaactcaattcggggccgatttatacccaacaagatgctcttccagttttttatgcagagttaaaagaatatgccaagcaaaatggtgtattagagttgcttgtaaaaccctatgaaacttatcaaacttttgatagccaaggtaatccaatagatgctgagaaaaaaagtattattcaagatttgactgatttaggttatcaatttgatggcttaacaacaggttacccaggtggagaaccagattggttatactataaagatttaactgaattaactgaaaagagtttgcttaaaagttttagcaaaaagggtaaacccttggtgaaaaaggctgaaacctttggcattcggttgaaaaagttaaaacgtgaagaactatcgatttttaagaatataacaaaagaaacctctgaacgtagagaatatagtgataaaagtttagaatattatgagcatttttatgatacttttggagaacaagcggagtttctcatagcaagcttaaatttttcggactatatgagcaaattgcaaggtgaacaaagtaaactagaagaaaacttggacaagttgcgacttgatttgagtaaaaatcctcattctgagaaaaaacaaaatcaactgagagaatattctagtcaatttgaaacgtttgaagttcgaaaagcagaagcgcgagacttgattgaaaaatatggagaagaagatattgttttagctgggagtttatttgtttatatgcctcaggaaacgacttatctctttagtggttcctacactgagtttaataagttctatgcccctgcactgcttcaaaaatatgttatgttggaaagcataaaacgtggaatacctaaatacaacttcctaggcattcaagggatttttgatggaagtgatggtgttttgcgttttaaacagaattttaatggctatattgtacgcaaagcaggtactttccgttaccatccatcgcctttaaaatacaaagctatccagttactcaaaaaaatagtaggacgt

SEQ ID NO: 1122 - protein, 410 aa, Streptococcus pneumoniae
  beta-lactam resistance factor (fibB); Cellular location: cytoplasm; Similar to strain R6 sequence 15902585 (0.E+01)
MALTTLTKEEFQTYSDQVSSRSFMQSVQMGDLLEKRGARIVYLALKQEGEIQVAALVYSLPMLGGLHMELNSGPIYTQQDALPVFYAELKEYAKQNGVLELLVKPYETYQTFDSQGNPIDAEKKSIIQDLTDLGYQFDGLTTGYPGGEPDWLYYKDLTELTEKSLLKSFSKKGKPLVKKAETFGIRLKKLKREELSIFKNITKETSERREYSDKSLEYYEHFYDTFGEQAEFLIASLNFSDYMSKLQGEQSKLEENLDKLRLDLSKNPHSEKKQNQLREYSSQFETFEVRKAEARDLIEKYGEEDIVLAGSLFVYMPQETTYLFSGSYTEFNKFYAPALLQKYVMLESIKRGIPKYNFLGIQGIFDGSDGVLRFKQNFNGYIVRKAGTFRYHPSPLKYKAIQLLKKIVGR

SEQ ID NO: 1123 - DNA, 720 bp, Streptococcus pneumoniae
ttgctagaaaggtggagagacatgcgctggctttttcgtttgataggggctttcttttcttttgtgtggcgtttgttttggcgtctggtttggatagttgtgctcttatgtgtgcttgctttcggacttctctggtatctgaacggagattttcaaggagcgctaaagcaagcagaacggtcagtaaaaattggtcaacaaagtattgaccaatgggagaaaacagggcaactgcctaagttaagccagacagatagtcaccagcattctgaaggaaggtgggcacaggcctctgctcgtatttacctggatccgcagatggattcacgctttcaagaggcttatttagaagcaatccagaactggaatcaaactggtgcttttaactttgaactcgtgactgagtctagtaaggcggatattacggctacggagatgaacgacggaggcactcctgtggcaggagaggcggaaagtcaaactaatctcttaacagggcaattcttgtccgtaacggtgcggttgaatcattattatttgtccaatccatactatggctactcctatgaacgccttgtccatacggcagaacatgagttaggtcatgcgattggcttggaccatacagatgagaagtctgtcatgcaaccagcaggttccttttatggtatccaggaagaggatgttgcaaacctccgaaaaatatatgagactagtgag

SEQ ID NO: 1124 - protein, 240 aa, Streptococcus pneumoniae
  conserved domain protein; Cellular location: membrane; Similar to strain R6 sequence 15902586 (e-128)
MLERWRDMRWLFRLIGAFFSFVWRLFWRLVWIVVLLCVLAFGLLWYLNGDFQGALKQAERSVKIGQQSIDQWEKTGQLPKLSQTDSHQHSEGRWAQASARIYLDPQMDSRFQEAYLEAIQNWNQTGAFNFELVTESSKADITATEMNDGGTPVAGEAESQTNLLTGQFLSVTVRLNHYYLSNPYYGYSYERLVHTAEHELGHAIGLDHTDEKSVMQPAGSFYGIQEEDVANLRKIYETSE

SEQ ID NO: 1125 - DNA, 1842 bp, Streptococcus pneumoniae
atgaacaacttgattaaatcaaaactagagctcttgccgaccagccctggttgctacattcataaggataaaaatggcaccattatctatgtaggaaaggctaaaaatctgcgtaatcgagtacggtcctattttcgtggaagtcatgataccaagacagaggctctggtgtctgaaattgtggattttgaatttattgttacggagtctaatattgaggcacttctcctagaaatcaacctgatcaaggaaaacaagcccaagtacaatatcatgctcaaggatgacaagtcctatcctttcatcaaaatcaccaatgagcgctatccacgcttgattatcactcgtcaggtcaaaaaggacggaggtctttattttggaccctatcccgatgtgggggcagccaatgaaatcaagcggttgctggatcggatattcccttttcgtaagtgtaccaacccgccctctaaggtctgtttttattaccatatcggccagtgtatggcccacaccatctgtaagaaggatgaggcttatttcaagtctatggcccaggaggtgtctgattttctgaaaggtcaggatgacaaaatcatcgatgatctcaagagtaaaatggcagtagcagcacaaagtatggagtttgaacgtgcggcggaataccgtgacctgattcaggctattggaacgcttcgaaccaagcaacgggtcatggcgaaagatttgcaaaatcgcgatgtctttggctactatgtggataagggctggatgtgtgtgcaggttttctttgtccgtcagggtaagctcatcgagcgcgatgtcaatctcttcccctacttcaatgatccagatgaggattttttgacctatgtaggacaattctatcaagaaaaatctcatctagttcccaatgaggtactgattccgcaggatattgacgaagaagctgtcaaggctttggtggattccaagattcttaagcctcaacgtggagagaaaaaacaactggtcaatctagccataaaaaatgctcgtgttagtctagagcagaagttcaatctgctagaaaaatctgtcgaaaagactcaaggagctattgaaaatctagggcgtttgctccaaatcccgaccccagtacgtatcgagtccttcgataactctaatatcatgggaactagccctgtttcggctatggtggtctttgtcaacggtaaaccgagtaagaaggattaccgtaagtacaagataaaaacggttgttggaccagacgactatgccagcatgagagaggtcattcgcagacgctatggtcgagtacagcgtgaggctttgactcctccagatttgattgtgattgatggggggcaaggtcaagtcaatatcgctaagcaggttatccaagaggaactgggcttggatattccaattgctgggctgcaaaagaatgataagcaccaaacccatgaattgctctttggagatccgcttgaggtggtggatttgtctcgcaattctcaggaatttttcctcctccaacgcatccaagatgaggtgcaccgctttgctatcactttccaccgccaactgcgctccaaaaattctttctcatctcaattggatgggattgacggtctgggacctaaacgcaagcagaatcttatgaagcatttcaagtctttgaccaaaatcaaggaagccagtgtggatgagattgtcgaagttggggtacctagagtcgttgcagaggctgtgcaaagaaagttgaacccgcagggagaagccttgcctcaagtagcagaagaaagagtagattaccaaacggaaggaaaccacaatgaacca

SEQ ID NO: 1126 - protein, 614 aa, Streptococcus pneumoniae
  excinuclease ABC, subunit C (uvrC); Cellular location: cytoplasm; Similar to strain R6 sequence 15902587 (0.E+01)
MNNLIKSKLELLPTSPGCYIHKDKNGTIIYVGKAKNLRNRVRSYFRGSHDTKTEALVSEIVDFEFIVTESNIEALLLEINLIKENKPKYNIMLKDDKSYPFIKITNERYPRLIITRQVKKDGGLYFGPYPDVGAANEIKRLLDRIFPFRKCTNPPSKVCFYYHIGQCMAHTICKKDEAYFKSMAQEVSDFLKGQDDKIIDDLKSKMAVAAQSMEFERAAEYRDLIQAIGTLRTKQRVMAKDLQNRDVFGYYVDKGWMCVQVFFVRQGKLIERDVNLFPYFNDPDEDFLTYVGQFYQEKSHLVPNEVLIPQDIDEEAVKALVDSKILKPQRGEKKQLVNLAIKNARVSLEQKFNLLEKSVEKTQGAIENLGRLLQIPTPVRIESFDNSNIMGTSPVSAMVVFVNGKPSKKDYRKYKIKTVVGPDDYASMREVIRRRYGRVQREALTPPDLIVIDGGQGQVNIAKQVIQEELGLDIPIAGLQKNDKHQTHELLFGDPLEVVDLSRNSQEFFLLQRIQDEVHRFAITFHRQLRSKNSFSSQLDGIDGLGPKRKQNLMKHFKSLTKIKEASVDEIVEVGVPRVVAEAVQRKLNPQGEALPQVAEERVDYQTEGNHNEP

SEQ ID NO: 1127 - DNA, 831 bp, Streptococcus pneumoniae
atgaaccataaaatcgcaattttatcagatgttcatggcaatgcgacggcgctagaagcagtgattgcagatgctaaaaatcaaggggccagtgaatattggcttctgggagatatttttcttcctggtccaggcgcaaatgacttagtcgccctgctaaaggaccttcctatcacagcaagtgttcgaggcaattgggatgatcgtgtccttgaggctttagatgggcaatatggcttagaagacccacaggaagttcagctcttgcgtatgacacagtatttgatggagcgaatggatcctgcaacgattgtctggctacgaagcttgcctttgctggaaaagaaagaaattgacggattgcgcttttctatctctcataatttacctgacaaaaactatggtggtgacttgctagttgagaatgatacagagaaatttgaccaactgctagatgcggaaacggacgtggcagtttatggtcatgttcacaagcagttgcttcgttatggaagtcaagggcaacaaatcatcaatccagggtcgattggcatgccctattttaattgggaggcgttaaaaaatcaccgttcccagtatgccgtgatagaagttgaagatggggaattactcaatatccaatttcgtaaagttgcttatgattacgaagctgagttagaattggccaagtccaaggggcttccctttatcgaaatgtatgaagaactgcgtcgtgacgataactatcaggggcacaatctggaattattagccagcttaatagaaaagcatgggtatgtagaggatgtgaagaatttttttgattttttg

SEQ ID NO: 1128 - protein, 277 aa, Streptococcus pneumoniae
  conserved hypothetical protein; Cellular location: cytoplasm; Similar to strain R6 sequence 15902588 (e-161)
MNHKIAILSDVHGNATALEAVIADAKNQGASEYWLLGDIFLPGPGANDLVALLKDLPITASVRGNWDDRVLEALDGQYGLEDPQEVQLLRMTQYLMERMDPATIVWLRSLPLLEKKEIDGLRFSISHNLPDKNYGGDLLVENDTEKFDQLLDAETDVAVYGHVHKQLLRYGSQGQQIINPGSIGMPYFNWEALKNHRSQYAVIEVEDGELLNIQFRKVAYDYEAELELAKSKGLPFIEMYEELRRDDNYQGHNLELLASLIEKHGYVEDVKNFFDFL

SEQ ID NO: 1129 - DNA, 813 bp, Streptococcus pneumoniae
ttgaatggagacagtatgaaaaaatttagcctattactagctatcctaccatttttggttgcctgtgagaatcaagctacacccaaagagactagcgctcaaaagacaatcgtccttgctacagctggcgacgtgccaccatttgactacgaagacaagggcaatctgacaggctttgatatcgaagttttaaaggcagtagatgaaaaactcagcgactacgagattcaattccaaagaaccgcctgggagagcatcttcccaggacttgattctggtcactatcaggctgcggccaataacttgagttacacaaaagagcgtgctgaaaaatacctttactcgcttccaatttccaacaatcccctcgtccttgtcagcaacaagaaaaatcctttgacttctcttgaccagatcgctggtaaaacaacacaagaggataccggaacttctaacgctcaattcatcaataactggaatcagaaacacactgataatcccgctacaattaatttttctggtgaggatattggtaaacgaatcctagaccttgctaacggagagtttgatttcctagtttttgacaaggtatccgttcaaaagattatcaaggaccgtggtttagacctctcagtcgttgatttaccttctgcagatagccccagcaattatatcattttctcaagcgaccaaaaagagtttaaagagcaatttgataaagcgctcaaagaactctatcaagacggaacccttgaaaaactcagcaatacctatctaggtggttcttacctcccagatcaatctcagttacaa

SEQ ID NO: 1130 - protein, 271 aa, Streptococcus pneumoniae
  amino acid ABC transporter, amino acid-binding protein, putative; Cellular location: lipoprotein; Similar to strain R6 sequence 15902589 (e-151)
MNGDSMKKFSLLLAILPFLVACENQATPKETSAQKTIVLATAGDVPPFDYEDKGNLTGFDIEVLKAVDEKLSDYEIQFQRTAWESIFPGLDSGHYQAAANNLSYTKERAEKYLYSLPISNNPLVLVSNKKNPLTSLDQIAGKTTQEDTGTSNAQFINNWNQKHTDNPATINFSGEDIGKRILDLANGEFDFLVFDKVSVQKIIKDRGLDLSVVDLPSADSPSNYIIFSSDQKEFKEQFDKALKELYQDGTLEKLSNTYLGGSYLPDQSQLQ

SEQ ID NO: 1131 - DNA, 108 bp, Streptococcus pneumoniae
atgtctgtgatagaaaaacttaatcatgaaaaatccctgcaagctctttcaaattatggtagaatggaagcagtagaattagaaaaggaaatcgattatgaaatttct

SEQ ID NO: 1132 - protein, 36 aa, Streptococcus pneumoniae
  hypothetical protein; Cellular location: cytoplasm
MSVIEKLNHEKSLQALSNYGRMEAVELEKEIDYEIS

SEQ ID NO: 1133 - DNA, 603 bp, Streptococcus pneumoniae
atgaaatttcttgaattaaataaaaaacgtcatgcgactaagcattttactgataagcttgttgatcccaaagatgtgcgtacggctatcgaaattgcaaccttggcgccaagcgcccacaacagccagccttggaaatttgtggtggtacgtgagaaaaatgctgaactggcaaagttagcttatggttccaattttgaacaggtatcatcagcgcctgtaaccattgccttgtttacagatacggacttagccaaacgtgctcgtaagattgcccgtgttggtggtgctaataacttttctgaagagcaacttcaatattttatgaaaaatctgccagctgagtttgcccgttacagtgagcaacaagtcagcgactacctagctctcaatgcaggtttggttgccatgaacttggttcttgcattgacagaccaaggaattggttctaacattattcttggttttgacaaatcaaaagttaatgaagttttggaaatcgaagaccgtttccgcccagaactcttgatcacagtgggttatacagacgaaaaattggaaccaagctaccgcttgccagtagatgaaatcatcgagaaaaga

SEQ ID NO: 1134 - protein, 201 aa, Streptococcus pneumoniae
  nitroreductase family protein; Cellular location: membrane; Similar to strain R6 sequence 15902590 (e-110)
MKFLELNKKRHATKHFTDKLVDPKDVRTAIEIATLAPSAHNSQPWKFVVVREKNAELAKLAYGSNFEQVSSAPVTIALFTDTDLAKRARKIARVGGANNFSEEQLQYFMKNLPAEFARYSEQQVSDYLALNAGLVAMNLVLALTDQGIGSNIILGFDKSKVNEVLEIEDRFRPELLITVGYTDEKLEPSYRLPVDEIIEKR

SEQ ID NO: 1135 - DNA, 1398 bp, Streptococcus pneumoniae
atgacagcaattgattttacagcagaagtagaaaaacgcaaagaagacctcttggctgacttgtttagccttttggaaatcaattcagaacgtgatgacagcaaggctgatgcccagcatccatttgggcctggtccagtaaaagccttggagaaattccttgaaatcgcagaccgcgatggctacccaactaagaatgttgataactatgcaggacattttgagtttggtgatggagaagaagttctcggaatctttgcccatatggatgtggtgcctgctggtagcggttgggacacagacccttacacaccaactatcaaagatggtcgcctttatgcgcgcggggcttcggacgataagggtcctacaacagcttgttactatggtttgaaaatcatcaaagaattgggtcttccaacttctaagaaagttcgcttcatcgttggaacagacgaagaatcaggctgggcagacatggactactactttgagcacgtaggacttgccaaaccagatttcggtttctcaccagatgctgaatttccaatcatcaatggtgaaaaaggaaatatcacggaatacctccactttgcaggagaaaatacaggtgttgcccgtcttcacagctttacaggtggtttacgtgaaaatatggtaccagaatcagcaacagcagtcgtttcaggtgacttggctgacttgcaagctaaactagatgcctttgttgcagaacacaaacttagaggagaactccaagaagaagctggcaaatacaaggtgacgatcattggtaaatcagcccacggtgctatgcctgcttcaggtgtcaatggcgcaacttaccttgccctcttcctcagccagtttggctttgctggtccagccaaagactaccttgacatcgcaggtaaaattctcttgaacgatcatgagggtgaaaatcttaagattgctcatgtggatgaaaagatgggtgctctttctatgaatgccggcgtcttccacttcgatgaaacaagtgctgataataccattgccctcaacatccgctatccaaaaggaacaagtccagaacaaatcaagtcaatccttgaaaacttgccagttgtttctgttagcctgtctgaacacggtcacacgcctcactatgtgccaatggaagatccacttgtgcaaaccttgttgaatatctatgaaaaacaaactggctttaaaggtcatgaacaagtcatcggtggtggaacctttggtcgcttgctagaacgcggagttgcctacggtgctatgttcccagactcgattgataccatgcaccaagccaatgaatttatcgccttggatgatcttttccgagcagcagcaatttatgccgaagctatttacgaattgatcaaa

SEQ ID NO: 1136 - protein, 466 aa, Streptococcus pneumoniae
  dipeptidase (pepV); Cellular location: cytoplasm; Similar to strain R6 sequence 15902591 (0.E+01)
MTAIDFTAEVEKRKEDLLADLFSLLEINSERDDSKADAQHPFGPGPVKALEKFLEIADRDGYPTKNVDNYAGHFEFGDGEEVLGIFAHMDVVPAGSGWDTDPYTPTIKDGRLYARGASDDKGPTTACYYGLKIIKELGLPTSKKVRFIVGTDEESGWADMDYYFEHVGLAKPDFGFSPDAEFPIINGEKGNITEYLHFAGENTGVARLHSFTGGLRENMVPESATAVVSGDLADLQAKLDAFVAEHKLRGELQEEAGKYKVTIIGKSAHGAMPASGVNGATYLALFLSQFGFAGPAKDYLDIAGKILLNDHEGENLKIAHVDEKMGALSMNAGVFHFDETSADNTIALNIRYPKGTSPEQIKSILENLPVVSVSLSEHGHTPHYVPMEDPLVQTLLNIYEKQTGFKGHEQVIGGGTFGRLLERGVAYGAMFPDSIDTMHQANEFIALDDLFRAAAIYAEAIYELIK

SEQ ID NO: 1137 - DNA, 576 bp, Streptococcus pneumoniae
atgtctcaaatcgaaagaatcaaacaggctatcatggcggattcgcagaatgccagctatacagagcgtggcattgagcctctctttgcagcgccaaaaactgctcgcatcaatatcatcggtcaggctccgggacttaaaactcaagaagcaggcctttactggaaagataaaagtggtgaccgcttgcgggactggctaggtgtggatgaagataccttttacaattcaggttattttgctgttttgcctatggatttctactttccaggacatggcaagtcgggtgatcttccgcctcgtacaggttttgcagaaaaatggcatccgcaggtcttacaggaattgcctgatattcagttaaccctcttgattgggcaatatgcccaagcctactatttacaggagaaaatcagtgggaaggtaacggagagggtgaaacactataaagactatctgccagcctattttccgctagttcacccatcaccacgaaatcaaatctggatggccaaaaatccttggtttgaggcagaagtagtgccagatttgaaaaaaagaattaaaaccatttta

SEQ ID NO: 1138 - protein, 192 aa, Streptococcus pneumoniae
  conserved hypothetical protein; Cellular location: cytoplasm; Similar to strain R6 sequence 15902592 (e-111)
MSQIERIKQAIMADSQNASYTERGIEPLFAAPKTARINIIGQAPGLKTQEAGLYWKDKSGDRLRDWLGVDEDTFYNSGYFAVLPMDFYFPGHGKSGDLPPRTGFAEKWHPQVLQELPDIQLTLLIGQYAQAYYLQEKISGKVTERVKHYKDYLPAYFPLVHPSPRNQIWMAKNPWFEAEVVPDLKKRIKTIL

SEQ ID NO: 1139 - DNA, 285 bp, Streptococcus pneumoniae
atgaaagaaatagcctttgacgcattttaccagctttaccaaaacgaccagctttctttagtggatgtgagagaagtggatgagtttgcagctcttcatttagaaggtgcccacaacctaccgcttagtcaattggctgatagttatgattaattggacaaagatcgcttgcattatattatttgcaaatctggaatgagatcggcgcgtgcttgccaattcctattagaacaaggttataatgttatcaatgtccagggtggcatgttagcctttgaagaactt

SEQ ID NO: 1140 - skipped

SEQ ID NO: 1141 - DNA, 1336 bp, Streptococcus pneumoniae
atgaaggagatttttatggctaaaaaaggtaccctaacaggtttgctcctgtttggaatattttttggtgcggggaacttgatttttccgccttctctaggtgctctatctggagaacattttcttcctgccatcgcaggttttgtcttttcaggcgttggtatcgccgtcttgacccttattattggaacgctaaatcctaaaggatatatctacgagatttcaacgaagatagcgccttggtttgcgactctttacctctcagttctttacttgtcaatcggtccattctttgctaccccacgtactgctacaacagcttacgaagtagggattagcccccttttgtcggatgcaaataaaggacttggcttgattgtatttacggttctgtattttgcggcagcctatttgatttcgcttaatccatcaaaaatcttagaccgcattggacgtattttaacgccagtctttgcaattttgattgttatcttggtcgttctgggagctatcaaatatggtggaacaagtcctcaagctgcttcactgcttatcaagcttctgcctttggtacaggtttcctagaaggttacaataccttggacgcccttgcctcagtggcctttagcgtaatcgcagttcaaaccttgaaacaacttggattttcaagtaagaaagaatacatttcaactatttgggttgttggtatcgttgttgcccttgccttcagcgctctttacatcggtttaggttttcttggaaatcatttcccagtaccagctgaagcgatgaagggtggaacaccaggtgtttacatcttgtcacaagccactcaagaaatctttggctcaacagctcaactcttccttgcagctatggttaccgtaacctgcttcacaacgactgttggtttgattgtgtcaacagctgagttctttaatgagcgcttcccacaaatcagctacaaggtttatgcgacagcctttaccttgattggatttgctattgccaatttgggtcttgatgcgattatcaagtactcaattccagtactggttatcttgtacccaatcacgattgctatcgttatgattgtcattgtcaacaaatttgttgccctttcaaaaccaggtatgcagttgacaattgctgtggttacagttattgccattgcaagcgtactaggaagctcgttaaggttgagtttcttgcaaatcttgttagcgttcttccttttgccaaggcatctctcccatggttggtgccagccattgttggaatcttgctctcattggttctaccaaacaagcaagaaagcgatgtttttgaaatggaa

SEQ ID NO: 1142 - protein, 194 aa, Streptococcus pneumoniae
  branched-chain amino acid transporter, FRAMESHIFT
MKEIFMAKKGTLTGLLLFGIFFGAGNLIFPPSLGALSGEHFLPAIAGFVFSGVGIAVLTLIIGTLNPKGYIYEISTKIAPWFATLYLSVLYLSIGPFFATPRTATTAYEVGISPLLSDANKGLGLIVFTVLYFAAAYLISLNPSKILDRIGRILTPVFAILIVILVVLGAIKYGGTSPQAASLLIKLLPLVQVS

SEQ ID NO: 1143 - DNA, 120 bp, Streptococcus pneumoniae
gtgattattccatttcaaaaacatcgctttcttgcttgtttggtagaaccaatgagagcaagattccaacaatggctggcaccaaccatgggagagatgccttggcaaaaggaagaacgc

SEQ ID NO: 1144 - protein, 40 aa, Streptococcus pneumoniae
  hypothetical protein
MIIPFQKHRFLACLVEPMRARFQQWLAPTMGEMPWQKEER

SEQ ID NO: 1145 - DNA, 144 bp, Streptococcus pneumoniae
ttgtttggtagaaccaatgagagcaagattccaacaatggctggcaccaaccatgggagagatgccttggcaaaaggaagaacgctaacaagatttgcaagaaactcaaccttaacgagcttcctagtacgcttgcaatggcaa

SEQ ID NO: 1146 - protein, 48 aa, Streptococcus pneumoniae
  hypothetical protein
MFGRTNESKIPTMAGTNHGRDALAKGRTLTRFARNSTLTSFLVRLQWQ

SEQ ID NO: 1147 - DNA, 1035 bp, Streptococcus pneumoniae
atgaatcaaacagtagaatatatcaaagaactgacagccattgcgtcgccaacaggctttactcgtgagattgcggactatttagtcaagactctagaaggttttggttaccagccggttcgcacatccaagggcggtgtcaatgtaactattaaaggtcaaaatgatgagcaacatcgctatgtgactgcccatgtagatacgcttggtgctattgtccgtgctgtcaaaccagacggccgtctcaaaatggaccgtatcggtggctttccttggaacatgattgaaggagaaaactgtaccattcatgtggctagcacaggtgaaaaagtatcaggaaccatcctcatccaccaaacttcttgccatgtctataaggatgcaggaactgcagaacgcacgcaagacaatatggaagtgcgtttggacgccaaagtaactagtgaaaaagaaactcgtgctcttggcattgaggtcggtgattttatcagttttgacccacgaactgtcgtgacagagacaggttttatcaagtctcgccatttggatgacaaggtcagtgcggcgattttgctcaatctccttcgcatttataaggaagagaagattgaattgcccgtaacaactcattttgctttttcagtctttgaagaagtgggacacggtgcaaactctaacattcctgctcaggtagtagaatatctggctgtggatatgggagccatgggagatgaccagcaaacagacgaatatacagtgtctatctgtgtcaaggatgcttctggaccttatcactatgacttccgtcaacatttggtggctttggcgaaagagcaagatattccatttaagctggatatctatccattttatggttcggacgcttcagcggctatgtctgcaggggcagaagtcaaacacgcccttctcggtgctggtatagagtctagccattcctatgagcgtacccatattgactcggtgatcgcaacagaacgaatggtcgatgcttatcttaagagcacgttggtggac

SEQ ID NO: 1148 - protein, 345 aa, Streptococcus pneumoniae
  conserved hypothetical protein; Cellular location: cytoplasm; Similar to strain R6 sequence 15902596 (0.E+01)
MNQTVEYIKELTAIASPTGFTREIADYLVKTLEGFGYQPVRTSKGGVNVTIKGQNDEQHRYVTAHVDTLGAIVRAVKPDGRLKMDRIGGFPWNMIEGENCTIHVASTGEKVSGTILIHQTSCHVYKDAGTAERTQDNMEVRLDAKVTSEKETRALGIEVGDFISFDPRTVVTETGFIKSRHLDDKVSAAILLNLLRIYKEEKIELPVTTHFAFSVFEEVGHGANSNIPAQVVEYLAVDMGAMGDDQQTDEYTVSICVKDASGPYHYDFRQHLVALAKEQDIPFKLDIYPFYGSDASAAMSAGAEVKHALLGAGIESSHSYERTHIDSVIATERMVDAYLKSTLVD

SEQ ID NO: 1149 - DNA, 501 bp, Streptococcus pneumoniae
atgcttatcttaagagcacgttggtggactaatatgtgccttatttgtcagagaattgacctcatcaagaaggaagaaaatccttactttgtcaaagagttggaaacaggctatcttgtggttggagaccaccagtattttgaaggctatagtctctttctagccaaggagcatgtcagcgaattgcaccatttgaaaaaggagacaagactccgttttctagaagaaatgagtttagtccaagaggcagttgccaaggcctttgctgctgagaaaatgaatatcgaactgctaggaaatggcgatgctcatcttcattggcatctgtttccacgacggacaggtgatatgaatggtcatggtctcaagggtcgtggaccagtctggtgggttccctttgaagaaatgacagcagaaacctgccaagcaaaaccggatgagattaaaagattagtcaaacgtttatcgtcagaagtagataaactattagaaataaaggag

SEQ ID NO: 1150 - protein, 167 aa, Streptococcus pneumoniae
  HIT family protein; Cellular location: cytoplasm; Similar to strain R6 sequence 15902597 (8.E-98)
MLILRARWWTNMCLICQRIDLIKKEENPYFVKELETGYLVVGDHQYFEGYSLFLAKEHVSELHHLKKETRLRFLEEMSLVQEAVAKAFAAEKMNIELLGNGDAHLHWHLFPRRTGDMNGHGLKGRGPVWWVPFEEMTAETCQAKPDEIKRLVKRLSSEVDKLLEIKE

SEQ ID NO: 1151 - DNA, 714 bp, Streptococcus pneumoniae
atgaagaaaagatacctagtcttgacagctttgctagccttgagtctagcagcttgttcacaagaaaaaacaaaaaatgaagatggagaaactaagacagaacagacagccaaagctgatggaacagtcggtagtaagtctcaaggagctgcccagaagaaagcagaagtggtcaataaaggtgattactacagcattcaagggaaatacgatgaaatcatcgtagccaacaaacactatccattgtctaaagactataatccaggggaaaatccaacagccaaggcagagttggtcaaactcatcaaagcgatgcaagaggcaggtttccctattagtgatcattacagtggttttagaagttatgaaactcagaccaagctctatcaagattatgtcaaccaagatggaaaggcagcagctgaccgttactctgcccgtcctggctatagcgaacaccagacaggcttggcctttgatgtgattgggactgatggtgatttggtgacagaagaaaaagcagcccaatggctcttggatcatgcagctgattatggctttgttgtccgttatctcaaaggcaaggaaaaggaaacaggctatatggctgaagaatggcacctgcgttatgtaggaaaagaagctaaagaaattgctgcaagtggtctcagtttggaagaatactatggctttgaaggcggagactacgtcgat

SEQ ID NO: 1152 - protein, 238 aa, Streptococcus pneumoniae
  conserved hypothetical protein; Cellular location: lipoprotein; Similar to strain R6 sequence 15902598 (e-137)
MKKRYLVLTALLALSLAACSQEKTKNEDGETKTEQTAKADGTVGSKSQGAAQKKAEVVNKGDYYSIQGKYDEIIVANKHYPLSKDYNPGENPTAKAELVKLIKAMQEAGFPISDHYSGFRSYETQTKLYQDYVNQDGKAAADRYSARPGYSEHQTGLAFDVIGTDGDLVTEEKAAQWLLDHAADYGFVVRYLKGKEKETGYMAEEWHLRYVGKEAKEIAASGLSLEEYYGFEGGDYVD

SEQ ID NO: 1153 - DNA, 222 bp, Streptococcus pneumoniae
atggctttgaaggcggagactacgtcgattaatactcttcgaaaatctcttcaaaccacgtcagcgtcgccttacctactgactgcgtcggttctattcacaacctcaaaacagtgttttgagctgacttcgtcagttttatctgcaacctcaaagctgtactttgagcagcctgcggctagcttcctagtttgctctttgattttcattgagtacaaaaag

SEQ ID NO: 1154 - protein, 74 aa, Streptococcus pneumoniae
  box element
MALKAETTSINTLRKSLQTTSASPYLLTASVLFTTSKQCFELTSSVLSATSKLYFEQPAASFLVCSLIFIEYKK

SEQ ID NO: 1155 - DNA, 423 bp, Streptococcus pneumoniae
atggctaaaaaagtcgaaaaacttgtaaaattgcaaatccctgctggtaaagctacaccagctccaccggttggacctgctcttggtcaagctggtatcaacatcatgggattcacaaaagagttcaacgctcgtacagctgaccaagctggtatgatcattccagttgttatctcagtttacgaagataaatcatttactttcgttacgaaaacaccaccagctgctgttcttttgaaaaaagctgcaggtgttgaaaaaggatcaggtacacctaataaaactaaagttgctacagttactcgtgcacaagtacaagaaattgcagaaactaagatgccagatttgaacgcagcaaacgtagagtctgcaatgcgtatgatcgaaggtactgctcgttctatgggattcactgttgttgac

SEQ ID NO: 1156 - protein, 141 aa, Streptococcus pneumoniae
  ribosomal protein L11 (rplK); Cellular location: cytoplasm; Similar to strain R6 sequence 15902599 (2.E-75)
MAKKVEKLVKLQIPAGKATPAPPVGPALGQAGINIMGFTKEFNARTADQAGMIIPVVISVYEDKSFTFVTKTPPAAVLLKKAAGVEKGSGTPNKTKVATVTRAQVQEIAETKMPDLNAANVESAMRMIEGTARSMGFTVVD

SEQ ID NO: 1157 - DNA, 687 bp, Streptococcus pneumoniae
atggctaaaaaaagcaaacaacttcgtgctgctcttgagaaaatcgacagcacaaaagcatacagtgtagaagaagctgtagcacttgcaaaagaaactaactttgcaaaatttgatgcaactgtagaagttgcttacaacttgaacatcgacgttaaaaaagctgaccaacaaatccgtggagcaatggtattgccaaacggtactggtaaaacttcacgtgttcttgttttcgcacgtggtgcaaaagctgaagaagcaaaagctgctggtgcagactttgttggtgaagatgaccttgttgctaaaatcaacgacggttggttggacttcgacgtagttatcgctacacctgatatgatggctcttgttggacgtcttggacgtgtccttggaccacgtaacttgatgccaaaccctaaaactggtactgtaacaatggatgttgctaaagcagttgaagagtctaaaggtggtaaaatcacttaccgtgctgaccgtgcaggtaacgttcaagcaatcatcggtaaagtatcatttgaagctgaaaaattggttgaaaactttaaagctttcaacgaaacaatccaaaaagcaaaaccagctacagctaaaggaacttacgtaacaaacttgactatcacaactactcaaggtgttggtatcaaagttgacgtaaactcactt

SEQ ID NO: 1158 - protein, 229 aa, Streptococcus pneumoniae
  ribosomal protein L1 (rplA); Cellular location: cytoplasm; Similar to strain R6 sequence 15902600 (e-125)
MAKKSKQLRAALEKIDSTKAYSVEEAVALAKETNFAKFDATVEVAYNLNIDVKKADQQIRGAMVLPNGTGKTSRVLVFARGAKAEEAKAAGADFVGEDDLVAKINDGWLDFDVVIATPDMMALVGRLGRVLGPRNLMPNPKTGTVTMDVAKAVEESKGGKITYRADRAGNVQAIIGKVSFEAEKLVENFKAFNETIQKAKPATAKGTYVTNLTITTTQGVGIKVDVNSL

SEQ ID NO: 1159 - DNA, 201 bp, Streptococcus pneumoniae
gtgttatactcaatgaaaaccaaagagcaaactaggaaactagccgcaggttgctcaaaacactgttttgaggttgtagatggaactgacgtagtcagctcaaaacactgttttgaggttgtggatagaactgacgaagtcagtaaccatacgcacggcaaggcgacgttgacgtggtttgaagagattttcgaagagtat

SEQ ID NO: 1160 - protein, 67 aa, Streptococcus pneumoniae
  box element
MLYSMKTKEQTRKLAAGCSKHCFEVVDGTDVVSSKHCFEVVDRTDEVSNHTHGKATLTWFEEIFEEY

SEQ ID NO: 1161 - DNA, 360 bp, Streptococcus pneumoniae
ttgttagaagttggtttaaatttcctaatcagtttgttcacatttaccttcgatatattatatcccatagttaaggttggtcatacagatgattatagtcatggagccgtaaaacttagtgtttctttagttgacaaagatgccatgaaaaaaatatttgtaactgtaataggatattttgaaataaatatagatgaaaatatcaccgatattctatacgtaaatggtactgctattctttatctttatttacgttcaattgtttcaatagtttcggcaattgatagcagtgaagcaatgttgctacctatcattaatgttttagagttactagataaatctcaaccttttgaagaagaa

SEQ ID NO: 1162 - protein, 120 aa, Streptococcus pneumoniae
  hypothetical protein; Cellular location: membrane
MLEVGLNFLISLFTFTFDILYPIVKVGHTDDYSHGAVKLSVSLVDKDAMKKIFVTVIGYFEINIDENITDILYVNGTAILYLYLRSIVSIVSAIDSSEAMLLPIINVLELLDKSQPFEEE

SEQ ID NO: 1163 - DNA, 339 bp, Streptococcus pneumoniae
ttgttctcatcttatttcaatccgctatatattatggtatcgaatcttcatcagaatgataaaattaatcaattgatatctgattacaaacagaatatgaaagctttttatatcactattgaaaaatttatacgagatgatgaaagccttaagtgttattttataaaggttatttcaagtcgttccaaggtaacaagtctagatcagattgaagctgataaaacgatacaaagaaaatattcaagtgagctaaaaaaatttattggattttataatgagattatttgtgaggaaaatagtttcctacatgtacgaaagaggtggtcgagttggtttagg

SEQ ID NO: 1164 - protein, 113 aa, Streptococcus pneumoniae
  conserved domain protein; Cellular location: cytoplasm
MFSSYFNPLYIMVSNLHQNDKINQLISDYKQNMKAFYITIEKFIRDDESLKCYFIKVISSRSKVTSLDQIEADKTIQRKYSSELKKFIGFYNEIICEENSFLHVRKRWSSWFR

SEQ ID NO: 1165 - DNA, 165 bp, Streptococcus pneumoniae
atgctcagaatgattgtctctaaacaatacctgctcttttacctcattcatgaaaaagaagtccataccctgagaattatcaactcacgcatcgactacctaaaccaactcgaccacctctttcgtacatgtaggaaactattttcctcacaaataatctcatta

SEQ ID NO: 1166 - protein, 55 aa, Streptococcus pneumoniae
  hypothetical protein; Cellular location: cytoplasm
MLRMIVSKQYLLFYLIHEKEVHTLRIINSRIDYLNQLDHLFRTCRKLFSSQIISL

SEQ ID NO: 1167 - DNA, 990 bp, Streptococcus pneumoniae
atggcaatgatagaagtggaacatcttcagaaaaattttgtgaagactgttaaggaaccgggcttgaagggggctttgcgctcctttattcatcctgaaaagcagacctttgaagcggtcaaggatttgacctttgaggttccaaaagggcagattttaggatttatcggggcaaatggtgctgggaagtcgacaaccattaaaatgctgacaggaattttgaaaccaacatctggtttttgtcggattaacggcaagattccccaggacaatcggcaagattatgtcaaagatattggcgtagtctttggacaacgcacccagctatggtgggatttggctctgcaagagacctacactgtcttaaaagagatttatgatgtgccagactcgctctttcataagcgtatggactttttgaatgaagtcttggatttgaaggactttatcaaggatcccgtgcggactctttcactgggacaacggatgcgggcggatattgcggcctccttgctccacaatcccaaggttctttttttagatgagccgaccattggtttggacgtttcggttaaggataatattcgtcgggcaattactcagatcaatcaagaggaagaaactaccattcttttgaccactcacgatttgagtgatattgagcaactttgtgatcggattttcatgattgacaaggggcaagagatttttgatggaacggtgagccaactcaaggagacctttggtaagatgaagactctctcttttgaactgctaccaggtcaaagtcatctcgtctctcactatgacggtctgtctgatatgaccattgatagacaaggaaacagcctcaacattgaatttgatagttctcgctaccagtcagctgacattatcaagcaaaccctgtctgattttgaaatccgcgatttgaagatggtggatacggatattgaggatattatccgtcgcttctaccgaaaggagctc

SEQ ID NO: 1168 - protein, 330 aa, Streptococcus pneumoniae
  ABC transporter, ATP-binding protein; Cellular location: cytoplasm; Similar to strain R6 sequence 15902601 (0.E+01)
MAMIEVEHLQKNFVKTVKEPGLKGALRSFIHPEKQTFEAVKDLTFEVPKGQILGFIGANGAGKSTTIKMLTGILKPTSGFCRINGKIPQDNRQDYVKDIGVVFGQRTQLWWDLALQETYTVLKEIYDVPDSLFHKRMDFLNEVLDLKDFIKDPVRTLSLGQRMRADIAASLLHNPKVLFLDEPTIGLDVSVKDNIRRAITQINQEEETTILLTTHDLSDIEQLCDRIFMIDKGQEIFDGTVSQLKETFGKMKTLSFELLPGQSHLVSHYDGLSDMTIDRQGNSLNIEFDSSRYQSADIIKQTLSDFEIRDLKMVDTDIEDIIRRFYRKEL

SEQ ID NO: 1169 - DNA, 858 bp, Streptococcus pneumoniae
ttgaggatattatccgtcgcttctaccgaaaggagctctaggatgatcaaattgtggagacgttataaaccctttatcaatgcaggggttcaggagttgattacttaccgagtcaactttattctctatcggattggcgatgtcatgggggcttttgtggccttttatctctggaaggctgtctttgattcttcgcaagagtctttgattcagggcttcagtatggcggatatcaccctctacatcatcatgagttttgtgaccaatcttctgactagatccgattcgtcctttatgattggggaggaggtcaaggatggctccattatcatgcgtttgttgcgaccagtgcattttgcggcctcctatcttttcaccgagcttggttccaagtggttgatttttatcagcgttggccttccatttttaagtgtcattgtcttgatgaaaatcatatcgggtcaaggtattgtagaggtgctaggattaactgtcatttatctttttagcttaacgctcgcctatctgattaactttttctttaatatttgctttggattttcagcctttgtgtttaaaaatctttggggttccaacctacttaagacttccatagtggcttttatgtcggggagtttgattcccttggcattttttccaaaggttgtttcagatattctctcctttttgcctttttcatccttgatttatactccagttatgatcattgttggaaaatacgatgccagtcagattcttcaggcactccttttgcagttcttctggctcttagtgatggtgggattgtctcagttaatttggaaacgggtccagtcctttatcaccattcaaggaggt

SEQ ID NO: 1170 - protein, 286 aa, Streptococcus pneumoniae
  membrane protein; Cellular location: membrane; Similar to strain R6 sequence 15902602 (e-152)
MRILSVASTERSSRMIKLWRRYKPFINAGVQELITYRVNFILYRIGDVMGAFVAFYLWKAVFDSSQESLIQGFSMADITLYIIMSFVTNLLTRSDSSFMIGEEVKDGSIIMRLLRPVHFAASYLFTELGSKWLIFISVGLPFLSVIVLMKIISGQGIVEVLGLTVIYLFSLTLAYLINFFFNICFGFSAFVFKNLWGSNLLKTSIVAFMSGSLIPLAFFPKVVSDILSFLPFSSLIYTPVMIIVGKYDASQILQALLLQFFWLLVMVGLSQLIWKRVQSFITIQGG

SEQ ID NO: 1171 - DNA, 783 bp, Streptococcus pneumoniae
atgaaaaaatatcaacgaatgcatctgatttttatcagacaatacatcaaacaaatcatggaatataaggtagattttgtggttggtgtcttgggagtctttctgactcaaggcttgaatctcttgtttctcaatgtcatctttcaacatattccattcctagaaggctggacctttcaagagatagctttcatttatggattttccttgattcccaagggaatggaccatctcttttttgacaatctctgggcactagggcaacgcctagtccgaaaaggggagtttgacaagtatctgactcgtcccatcaatcctctctttcacatcctagttgaaacctttcagattgatgccttgggtgaactcttagtcggtggtattttattgggaacaacagtgaccagcattgtttggactcttccaaaattcctgcttttcctagtttgtattccttttgcgaccttgatttatacttctcttaaaatcgcaacagccagtatcgccttttggactaagcagtcaggcgccatgatttacatcttctatatgttcaatgactttgctaagtatccgatttctatttacaattctcttcttcgttggttgattagctttatcgtgcctttcgcctttacagcctactatccagctagctatttcttacaggaaaaggatgtgttctttaacgtaggaggtttgatgttgatttctctggttttctttgttatttcccttaaactttgggataagggcttagattcctacgaaagtgcgggttcg

SEQ ID NO: 1172 - protein, 261 aa, Streptococcus pneumoniae
  conserved hypothetical protein; Cellular location: membrane; Similar to strain R6 sequence 15902603 (e-151)
MKKYQRMHLIFIRQYIKQIMEYKVDFVVGVLGVFLTQGLNLLFLNVIFQHIPFLEGWTFQEIAFIYGFSLIPKGMDHLFFDNLWALGQRLVRKGEFDKYLTRPINPLFHILVETFQIDALGELLVGGILLGTTVTSIVWTLPKFLLFLVCIPFATLIYTSLKIATASIAFWTKQSGAMIYIFYMFNDFAKYPISIYNSLLRWLISFIVPFAFTAYYPASYFLQEKDVFFNVGGLMLISLVFFVISLKLWDKGLDSYESAGS

SEQ ID NO: 1173 - DNA, 279 bp, Streptococcus pneumoniae
atgatgtttgtaattgaagaagtcaaggatgaaaatcaaaaaaaggcagttgtcgctgaggttttgaaggatttgccagaatggtttggaatcccagaaagcacacaagcctatatagaaggaaccacgacactgcaagtttggaccgcctatcaggagagtgatttgactagatttgtaagcttatcctattcgagtgaagattgtgcagagattgattgtctcggcgtaaaaaagcttatcaaggtagaaaaattgggagccaattgcttgctactt

SEQ ID NO: 1174 - protein, 93 aa, Streptococcus pneumoniae
  hypothetical protein; Cellular location: cytoplasm
MMFVIEEVKDENQKKAVVAEVLKDLPEWFGIPESTQAYIEGTTTLQVWTAYQESDLTRFVSLSYSSEDCAEIDCLGVKKLIKVEKLGANCLLL

SEQ ID NO: 1175 - DNA, 243 bp, Streptococcus pneumoniae
ttgtctcggcgtaaaaaagcttatcaaggtagaaaaattgggagccaattgcttgctactttagagagtgaagctcgtaaaaaagttggttatctgcaggtcaaaacagtggcagaaggttctaataaagattatgatcgaacaaatgacttttatcgaggtcttggctttaaaaagttagagatttttcctcaactatggaatccgcaaaatccttgtcagattttgattaaaaagcttgaa

SEQ ID NO: 1176 - protein, 81 aa, Streptococcus pneumoniae
  hypothetical protein; Cellular location: cytoplasm; Similar to strain R6 sequence 15902604 (6.E-42)
MSRRKKAYQGRKIGSQLLATLESEARKKVGYLQVKTVAEGSNKDYDRTNDFYRGLGFKKLEIFPQLWNPQNPCQILIKKLE

SEQ ID NO: 1177 - DNA, 222 bp, Streptococcus pneumoniae
atgaaaatcaaagagcaaactaggaaactagccgcagattgctcaaaacagtgttttgaggttgtagatggaactgacgtagtcagctcaaaacactgttttgaggttgtggatagaactgacgaagtcagtaaccatacgcacggcaaggcgacgttgacgtggtttgaagagattttcgaagagtataagtccaaaactttcgttaaccgggatacatta

SEQ ID NO: 1178 - protein, 74 aa, Streptococcus pneumoniae
  box element
MKIKEQTRKLAADCSKQCFEVVDGTDVVSSKHCFEVVDRTDEVSNHTHGKATLTWFEEIFEEYKSKTFVNRDTL

SEQ ID NO: 1179 - DNA, 6420 bp, Streptococcus pneumoniae
atgaaaaaaagtacagtattgtcattaaccacagctgcagttattttagcagcctatgcccctaatgaggtagtcttagcagacacatctagctctgaagatgctttaaacatctctgataaagaaaaagtagcagaaaataaagagaaacatgaaaatatccatagtgctatggaaacttcacaggattttaaagagaagaaaacagcagtcattaaggaaaaagaagttgttagtaaaaatcctgtgatagacaataacactagcaatgaagaagcaaaaatcaaagaagaaaattccaataaatcccaaggagattatacggactcatttgtgaataaaaacacagaaaatcccaaaaaagaagataaagttgtctatattgctgaatttaaagataaagaatctggagaaaaagcaatcaaggaactatccagtcttaagaatacaaaagttttatatacttatgatagaatttttaacggtagtgccatagaaacaactccagataacttggacaaaattaaacaaatagaaggtatttcatcggttgaaagggcacaaaaagtccaacccatgatgaatcatgccagaaaggaaattggagttgaggaagctattgattacctaaagtctatcaatgctccgtttgggaaaaattttgatggtagaggtatggtcatttcaaatatcgatactggaacagattatagacataaggctatgagaatcgatgatgatgccaaagcctcaatgagatttaaaaaagaagacttaaaaggcactgataaaaattattggttgagtgataaaatccctcatgcgttcaattattataatggtggcaaaatcactgtagaaaaatatgatgatggaagggattattttgacccacatgggatgcatattgcagggattcttgctggaaatgatactgaacaagacatcaaaaactttaacggcatagatggaattgcacctaatgcacaaattttctcttacaaaatgtattctgacgcaggatctgggtttgcgggtgatgaaacaatgtttcatgctattgaagattctatcaaacacaacgttgatgttgtttcggtatcatctggttttacaggaacaggtcttgtaggtgagaaatattggcaagctattcgggcattaagaaaagcaggcattccaatggttgtcgctacgggtaactatgcgacttctgcttcaagttcttcatgggatttagtagcaaataatcatctgaaaatgaccgacactggaaatgtaacacgaactgcagcacatgaagatgcgatagcggtcgcttctgctaaaaatcaaacagttgagtttgataaagttaacataggtggagaaagttttaaatacagaaatataggggcctttttcgataagagtaaaatcacaacaaatgaagatggaacaaaagctcctagtaaattaaaatttgtatatataggcaaggggcaagaccaagatttgataggtttggatcttaggggcaaaattgcagtaatggatagaatttatacaaaggatttaaaaaatgcttttaaaaaagctatggataagggtgcacgcgccattatggttgtaaatactgtaaattactacaatagagataattggacagagcttccagctatgggatatgaagcggatgaaggtactaaaagtcaagtgttttcaatttcaggagatgatggtgtaaagctatggaacatgattaatcctgataaaaaaactgaagtcaaaagaaataataaagaagattttaaagataaattggagcaatactatccaattgatatggaaagttttaattccaacaaaccgaatgtaggtgacgaaaaagagattgactttaagtttgcacctgacacagacaaagaactctataaagaagatatcatcgttccagcaggatctacatcttgggggccaagaatagatttacttttaaaacccgatgtttcagcacctggtaaaaatattaaatccacgcttaatgttattaatggcaaatcaacttatggctatatgtcaggaactagtatggcgactccaatcgtggcagcttctactgttttgattagaccgaaattaaaggaaatgcttgaaagacctgtattgaaaaatcttaagggagatgacaaaatagatcttacaagtcttacaaaaattgccctacaaaatactgcgcgacctatgatggatgcaacttcttggaaagaaaaaagtcaatactttgcatcacctagacaacagggagcaggcctaattaatgtggccaatgctttgagaaatgaagttgtagcaactttcaaaaacactgattctaaaggtttggtaaactcatatggttccatttctcttaaagaaataaaaggtgataaaaaatactttacaatcaagcttcacaatacatcaaacagacctttgacttttaaagtttcagcatcagcgataactacagattctctaactgacagattaaaacttgatgaaacatataaagatgaaaaatctccagatggtaagcaaattgttccagaaattcacccagaaaaagtcaaaggagcaaatatcacatttgagcatgatactttcactataggcgcaaattctagctttgatttgaatgcggttataaatgttggagaggccaaaaacaaaaataaatttgtagaatcatttattcattttgagtcagtggaagaaatggaagctctaaactccaacgggaagaaaataaacttccaaccttctttgtcgatgcctctaatgggatttgctgggaattggaaccacgaaccaatccttgataaatgggcttgggaagaagggtcaagatcaaaaacactgggaggttatgatgatgatggtaaaccgaaaattccaggaaccttaaataagggaattggtggagaacatggtatagataaatttaatccagcaggagttatacaaaatagaaaagataaaaatacaacatccctggatcaaaatccagaattatttgctttcaataacgaagggatcaacgctccatcatcaagtggttctaagattgctaacatttatcctttagattcaaatggaaatcctcaagatgctcaacttgaaagaggattaacaccttctccacttgtattaagaagtgcagaagaaggattgatttcaatagtaaatacaaataaagagggagaaaatcaaagagacttaaaagtcatttcgagagaacactttattagaggaattttaaattctaaaagcaatgatgcaaagggaatcaaatcatctaaactaaaagtttggggtgacttgaagtgggatggactcatctataatcctagaggtagagaagaaaatgcaccagaaagtaaggataatcaagatcctgctactaagataagaggtcaatttgaaccgattgcggaaggtcaatatttctataaatttaaatatagattaactaaagattacccatggcaggtttcctatattcctgtaaaaattgataacaccgcccctaagattgtttcggttgatttttcaaatcctgaaaaaattaagttgattacaaaggatacttatcataaggtaaaagatcagtataagaatgaaacgctatttgcgagagatcaaaaagaacatcctgaaaaatttgacgagattgcgaacgaagtttggtatgctggcgccgctcttgttaatgaagatggagaggttgaaaaaaatcttgaagtaacttacgcaggtgagggtcaaggaagaaatagaaaacttgataaagacggaaataccatttatgaaattaaaggtgcgggagatttaaggggaaaaatcattgaagtcattgcattagatggttctagcaatttcacaaagattcatagaattaaatttgctaatcaggctgatgaaaaggggatgatttcctattatctagtagatcctgatcaagattcatctaaatatcaaaagcttggcgagattgcagaatctaaatttaaaaatttaggaaatggaaaagagggtagtctaaaaaaagatacaactggggtagaacatcatcatcaagaaaatgaagagtctattaaagaaaaatctagttttactattgatagaaatatttcaacaattagagactttgaaaataaagacttaaagaaactcattaaaaagaaatttagagaagttgatgattttacaagtgaaactggtaagagaatggaggaatacgattataaatacgatgataaaggaaatataatagcctacgatgatgggactgatctagaatatgaaactgagaaacttgacgaaatcaaatcaaaaatttatggtgttctaagtccgtctaaagatggacactttgaaattcttggaaagataagtaatgtttctaaaaatgccaaggtatattatgggaataactataaatctatagaaatcaaagcgaccaagtatgatttccactcaaaaacgatgacatttgatctatacgctaatattaatgatattgtggatggattagcttttgcaggagatatgagattatttgttaaagataatgatcagaaaaaagctgaaattaaaattagaatgcctgaaaaaattaaggaaactaaatcagaatatccctatgtatcaagttatgggaatgtcatagaattaggggaaggagatctttcaaaaaacaaaccagacaatttaactaaaatggaatctggtaaaatctattctgattcagaaaaacaacaatatctgttaaaggataatatcattctaagaaaaggctatgcactaaaagtgactacctataatcctggaaaaacggatatgttagaaggaaatggagtctatagcaaggaagatatagcaaaaatacaaaaggccaatcctaatctaagagccctttcagaaacaacaatttatgctgatagtagaaatgttgaagatggaagaagtacccaatctgtattaatgtcggctttggacggctttaacattataaggtatcaagtgtttacatttaaaatgaacgataaaggggaagctatcgataaagacggaaatcttgtgacagattcttctaaacttgtattatttggtaaggatgataaagaatacactggagaggataagttcaatgtagaagctataaaagaagatggctccatgttatttattgataccaaaccagtaaacctttcaatggataagaactactttaatccatctaaatctaataaaatttatgtacgaaatccagaattttatttaagaggtaagatttctgataagggtggttttaactgggaattgagagttaatgaatcggttgtagataattatttaatctacggagatttacacattgataacactagagattttaatattaagctgaatgttaaagacggtgacatcatggactggggaatgaaagactataaagcaaacggatttccagataaggtaacagatatggatggaaatgtttatcttcaaactggctatagcgatttgaatgctaaagcagttggagtccactatcagtttttatatgataatgttaaacccgaagtaaacattgatcctaagggaaatactagtatcgaatatgctgatggaaaatctgtagtctttaacatcaatgataaaagaaataatggattcgatggtgagattcaagaacaacatatttatataaatggaaaagaatatacatcatttaatgatattaaacaaataatagacaagacactaaacattaagattgttgtaaaagattttgcaagaaatacaaccgtaaaagaattcattttaaataaagatacgggagaggtaagtgaattaaaacctcatagggtaactgtgaccattcaaaatggaaaagaaatgagttcaacgatagtgtcggaagaagattttattttacctgtttataagggtgaattagaaaaaggataccaatttgatggttgggaaatttctggtttcgaaggtaaaaaagacgctggctatgttattaatctatcaaaagatacctttataaaacctgtattcaagaaaatagaggagaaaaaggaggaagaaaataaacctacttttgatgtatcgaaaaagaaagataacccacaagtaaaccatagtcaattaaatgaaagtcacagaaaagaggatttacaaagagaagagcattcacaaaaatctgattcaactaaggatgttacagctacagttcttgataaaaacaatatcagtagtaaatcaactactaacaatcctaataagttgccaaaaactggaacagcaagcggagcccagacactattagctgccggaataatgtttatagtaggaatttttcttggattgaagaaaaaaaatcaagat

SEQ ID NO: 1180 - protein, 2140 aa, Streptococcus pneumoniae
  serine protease, subtilase family; Cellular location: Peptidoglycan-bound (LPXTG); Similar to strain R6 sequence 15902605 (0.E+01)
MKKSTVLSLTTAAVILAAYAPNEVVLADTSSSEDALNISDKEKVAENKEKHENIHSAMETSQDFKEKKTAVIKEKEVVSKNPVIDNNTSNEEAKIKEENSNKSQGDYTDSFVNKNTENPKKEDKVVYIAEFKDKESGEKAIKELSSLKNTKVLYTYDRIFNGSAIETTPDNLDKIKQIEGISSVERAQKVQPMMNHARKEIGVEEAIDYLKSINAPFGKNFDGRGMVISNIDTGTDYRHKAMRIDDDAKASMRFKKEDLKGTDKNYWLSDKIPHAFNYYNGGKITVEKYDDGRDYFDPHGMHIAGILAGNDTEQDIKNFNGIDGIAPNAQIFSYKMYSDAGSGFAGDETMFHAIEDSIKHNVDVVSVSSGFTGTGLVGEKYWQAIRALRKAGIPMVVATGNYATSASSSSWDLVANNHLKMTDTGNVTRTAAHEDAIAVASAKNQTVEFDKVNIGGESFKYRNIGAFFDKSKITTNEDGTKAPSKLKFVYIGKGQDQDLIGLDLRGKIAVMDRIYTKDLKNAFKKAMDKGARAIMVVNTVNYYNRDNWTELPAMGYEADEGTKSQVFSISGDDGVKLWNMINPDKKTEVKRNNKEDFKDKLEQYYPIDMESFNSNKPNVGDEKEIDFKFAPDTDKELYKEDIIVPAGSTSWGPRIDLLLKPDVSAPGKNIKSTLNVINGKSTYGYMSGTSMATPIVAASTVLIRPKLKEMLERPVLKNLKGDDKIDLTSLTKIALQNTARPMMDATSWKEKSQYFASPRQQGAGLINVANALRNEVVATFKNTDSKGLVNSYGSISLKEIKGDKKYFTIKLHNTSNRPLTFKVSASAITTDSLTDRLKLDETYKDEKSPDGKQIVPEIHPEKVKGANITFEHDTFTIGANSSFDLNAVINVGEAKNKNKFVESFIHFESVEEMEALNSNGKKINFQPSLSMPLMGFAGNWNHEPILDKWAWEEGSRSKTLGGYDDDGKPKIPGTLNKGIGGEHGIDKFNPAGVIQNRKDKNTTSLDQNPELFAFNNEGINAPSSSGSKIANIYPLDSNGNPQDAQLERGLTPSPLVLRSAEEGLISIVNTNKEGENQRDLKVISREHFIRGILNSKSNDAKGIKSSKLKVWGDLKWDGLIYNPRGREENAPESKDNQDPATKIRGQFEPIAEGQYFYKFKYRLTKDYPWQVSYIPVKIDNTAPKIVSVDFSNPEKIKLITKDTYHKVKDQYKNETLFARDQKEHPEKFDEIANEVWYAGAALVNEDGEVEKNLEVTYAGEGQGRNRKLDKDGNTIYEIKGAGDLRGKIIEVIALDGSSNFTKIHRIKFANQADEKGMISYYLVDPDQDSSKYQKLGEIAESKFKNLGNGKEGSLKKDTTGVEHHHQENEESIKEKSSFTIDRNISTIRDFENKDLKKLIKKKFREVDDFTSETGKRMEEYDYKYDDKGNIIAYDDGTDLEYETEKLDEIKSKIYGVLSPSKDGHFEILGKISNVSKNAKVYYGNNYKSIEIKATKYDFHSKTMTFDLYANINDIVDGLAFAGDMRLFVKDNDQKKAEIKIRMPEKIKETKSEYPYVSSYGNVIELGEGDLSKNKPDNLTKMESGKIYSDSEKQQYLLKDNIILRKGYALKVTTYNPGKTDMLEGNGVYSKEDIAKIQKANPNLRALSETTIYADSRNVEDGRSTQSVLMSALDGFNIIRYQVFTFKMNDKGEAIDKDGNLVTDSSKLVLFGKDDKEYTGEDKFNVEAIKEDGSMLFIDTKPVNLSMDKNYFNPSKSNKIYVRNPEFYLRGKISDKGGFNWELRVNESVVDNYLIYGDLHIDNTRDFNIKLNVKDGDIMDWGMKDYKANGFPDKVTDMDGNVYLQTGYSDLNAKAVGVHYQFLYDNVKPEVNIDPKGNTSIEYADGKSVVFNINDKRNNGFDGEIQEQHIYINGKEYTSFNDIKQIIDKTLNIKIVVKDFARNTTVKEFILNKDTGEVSELKPHRVTVTIQNGKEMSSTIVSEEDFILPVYKGELEKGYQFDGWEISGFEGKKDAGYVINLSKDTFIKPVFKKIEEKKEEENKPTFDVSKKKDNPQVNHSQLNESHRKEDLQREEHSQKSDSTKDVTATVLDKNNISSKSTTNNPNKLPKTGTASGAQTLLAAGIMFIVGIFLGLKKKNQD

SEQ ID NO: 1181 - DNA, 332 bp, Streptococcus pneumoniae
ttgagctattcagaagacttgaaacaccactataatctctatcaactcttgctttttcactttcagaataaggagcctgacaaatttttcggactcattgaggacaatctgaatcaagttcatcctctaaaaccttcctcaaagataaagagaagattgtcaatgcccttcaactacactattctaatgccaaactggaagcgaccaataatctcatcaaacttatcaagcgcaatgcctttggttttcgaaactttgaaaacttcaaaaaacggatttttatcgctctgaatatcaaaaaagaaaggacaaaatttgtcctttctcgagct

SEQ ID NO: 1182 - protein, 96 aa, Streptococcus pneumoniae
  IS1167, transposase, truncation FRAMESHIFT
MSYSEDLKHHYNLYQLLLFHFQNKEPDKFFGLIEDNLNQVHPLKPSSKIKRRLSMPFNYTILMPNWKRPIISSNLSSAMPLVFETLKTSKNGFLSL

SEQ ID NO: 1183 - DNA, 144 bp, Streptococcus pneumoniae
atggacaatgctatatggcataaatcaagtaccttaaagattccgactaatattggttttgcatttattcctccatacacaccagagatgaaccccattgaacaagtgtggaaagagattcgtaaacgtggatttatagtaaaa

SEQ ID NO: 1184 - protein, 48 aa, Streptococcus pneumoniae
  transposase family protein, truncation; Cellular location: cytoplasm; Similar to strain R6 sequence 15902688 (2.E-23)
MDNAIWHKSSTLKIPTNIGFAFIPPYTPEMNPIEQVWKEIRKRGFIVK

SEQ ID NO: 1185 - DNA, 225 bp, Streptococcus pneumoniae
ttgcgagagagactattgactcagcccttacttcatgcggatgaaacttcttatcgggttctagagagtcatagccatctgacctactattggacctttttgtctgggaaagttgagaatcaagcaatcacgctgtaccatcatgatcagagtcggagtggttcggtagtacaagaattcctaggagattattctggctatgttcattgtgatatgttgcggcag

SEQ ID NO: 1186 - protein, 75 aa, Streptococcus pneumoniae
  IS66 family element, Orf3, degenerate
MRERLLTQPLLHADETSYRVLESHSHLTYYWTFLSGKVENQAITLYHHDQSRSGSVVQEFLGDYSGYVHCDMLRQ

SEQ ID NO: 1187 - DNA, 447 bp, Streptococcus pneumoniae
ttggtaaactgcgaaccgctagaagcttatcgtcaactggaagaagctgaacttgttggatgttgggcgcatgtgagaaggaaattttttgaagcgacccccaagcaagcagataaatcatccttaggagctaaaggtttagcttattgtgatcagttattttccttggaaatagactgggaggctttgccagctgatgaacgactacagaaacgtcaagaacatctccagcccctaatggaagacttctttgcttggtgccgccgtcagtcagttttagcaggttcaaaactaggaagggcaattgaatacagcctcaagtatgaagaaacctttaagactattttgaaagacggacatctggtcctttccaataatctagctgaacgcgccattaaatcattggttatgggacggagtaaaagagtccagtggactcttttagcc

SEQ ID NO: 1188 - protein, 149 aa, Streptococcus pneumoniae
  conserved domain protein
MVNCEPLEAYRQLEEAELVGCWAHVRRKFFEATPKQADKSSLGAKGLAYCDQLFSLEIDWEALPADERLQKRQEHLQPLMEDFFAWCRRQSVLAGSKLGRAIEYSLKYEETFKTILKDGHLVLSNNLAERAIKSLVMGRSKRVQWTLLA

SEQ ID NO: 1189 - DNA, 495 bp, Streptococcus pneumoniae
atggaaagaagggaaaaacttatggtattagattatttctttgacaaaaaccttgtgttttgcttagaagcggatagtcaagaacaactctttgatcaggttgcaactttattggaagaacgagaaattgtcactccaacttatcgtgaagccttgatcacgcgtgaaaagtcatttccaactggtttagatatggaatttctaggaaaggacttgccaaatgtagcgattcctcacacagatattgttcataatctagctgagaaagtggtggttgttcgattagaaaaaccaataacttttcacaatatgatagctcctgataaggaagtagaagtatccctactcttctttatcattaataattcaagttcaagtcaaacgaacattcttgctcagttaatggacttcttcacaggaaatggtcatcttgaagacctatcaaaaatttctgaaccagaagccctttatacttacattgctgaagcaaccgct

SEQ ID NO: 1190 - protein, 165 aa, Streptococcus pneumoniae
  PTS system IIA component, putative; Cellular location: cytoplasm; Similar to strain R6 sequence 15902606 (7.E-86)
MERREKLMVLDYFFDKNLVFCLEADSQEQLFDQVATLLEEREIVTPTYREALITREKSFPTGLDMEFLGKDLPNVAIPHTDIVHNLAEKVVVVRLEKPITFHNMIAPDKEVEVSLLFFIINNSSSSQTNILAQLMDFFTGNGHLEDLSKISEPEALYTYIAEATA

SEQ ID NO: 1191 - DNA, 303 bp, Streptococcus pneumoniae
atgattaaaattcttgctgcctgcggtgcaggtgttaactcaagtcaccaaattaaaagtgctctagaagaagaactttcaaaccgtggttatgatgttcactgtgatgcagtcatggtgaaagatgtaaacgaagaccttatgaaaggttacgatatctttacaccaatcgctgcaacagaccttggttttgaaccaggtatcccagttatcgaagctgggccaatcttattccgtatcccagcaatgagcgctccagtatttgacaatattgaagcagctattaaagaacacggattaagc

SEQ ID NO: 1192 - protein, 101 aa, Streptococcus pneumoniae
  PTS system, IIB component, putative; Cellular location: cytoplasm; Similar to strain R6 sequence 15902607 (1.E-54)
MIKILAACGAGVNSSHQIKSALEEELSNRGYDVHCDAVMVKDVNEDLMKGYDIFTPIAATDLGFEPGIPVIEAGPILFRIPAMSAPVFDNIEAAIKEHGLS

SEQ ID NO: 1193 - DNA, 1473 bp, Streptococcus pneumoniae
atggatgcaatctttgacctaatcggaaaggttttcaatcccatcttagaaatgggtggacctgtcatcatgttaatcattttgacagtattggctttactttttggagtgaaattctccaaagcgcttgaaggtggtatcaaacttgccatcgctcttacaggtatcggtgctatcatcggtatgctaaacactgctttctcagcatcactagcaaaattcgttgaaaacactggtatccaattgagtattaccgacgttggttgggcaccacttgctacaatcacttggggttctgcttggacactatacttcttgctcatcatgttgattgtcaacatagtgatgctagctatgaagaaaacagatacacttgatgtcgatatctttgatatctggcacttgtctatcacaggtctcttgattaaatggtatgctgataacaatggtgtgagtcaaggggtttcactctttattgctacagcagctatcgtccttgtcggtgtgttgaaaattatcaactctgacttgatgaaacctacatttgatgaccttcttaacgccccaagttcatcaccaatgacatcaactcacatgaactacatgatgaacccagttatcatggttttggataagatttttgaaaaattcttcccaggccttgataaatatgactttgatgctgctaaattgaacaagaaaatcggtttctggggatctaaattcttcatcggtttcatccttggtatcgttatcggtattatgggaactccacatccaattgcaggtgttgcagatgcagataaatggcgtcttgttatcaaaggatggttgtctcttggtttgactgccggtgtatctttggaactcttctcacttatcggttcatggttcatcgcagccgtagaaccactatcacaaggtattacaaacgttgctactaaacgtcttcaaggacgtaaattcaatatcggtcttgactggccattcatcgctggtcgtgctgaaatctgggcttgtgccaacgtacttgcaccaatcatgttgattgaagcagtgcttctttcaaaagttggaaatggtatcttgccacttgcaggtatcatcgctatgggtgttactccagctctcttggttgtaactcgtggtaaattgctccgtatgattatcttcggaacactcttgttgccactcttccttctttcaggtacacttattgcaccatttgcaacagaacttgctaaaggtgtaggtgccttcccagaaggtgtgagccaaactcaattgattactcactctactcttgaaggaccaatcgaaaaacttcttggttggacaattggtaacactacaactggtgatatcaaagcaatccttggtgcagtagtcttccttgtattctatatcggtatctttgcttggtacagaaaacaaatgatcaaacgtaacgaagagtacgcagcaaaagcaaaa

SEQ ID NO: 1194 - protein, 491 aa, Streptococcus pneumoniae
  PTS system, IIC component, putative; Cellular location: membrane; Similar to strain R6 sequence 15902608 (0.E+01)
MDAIFDLIGKVFNPILEMGGPVIMLIILTVLALLFGVKFSKALEGGIKLAIALTGIGAIIGMLNTAFSASLAKFVENTGIQLSITDVGWAPLATITWGSAWTLYFLLIMLIVNIVMLAMKKTDTLDVDIFDIWHLSITGLLIKWYADNNGVSQGVSLFIATAAIVLVGVLKIINSDLMKPTFDDLLNAPSSSPMTSTHMNYMMNPVIMVLDKIFEKFFPGLDKYDFDAAKLNKKIGFWGSKFFIGFILGIVIGIMGTPHPIAGVADADKWRLVIKGWLSLGLTAGVSLELFSLIGSWFIAAVEPLSQGITNVATKRLQGRKFNIGLDWPFIAGRAEIWACANVLAPIMLIEAVLLSKVGNGILPLAGIIAMGVTPALLVVTRGKLLRMIIFGTLLLPLFLLSGTLIAPFATELAKGVGAFPEGVSQTQLITHSTLEGPIEKLLGWTIGNTTTGDIKAILGAVVFLVFYIGIFAWYRKQMIKRNEEYAAKAK

SEQ ID NO: 1195 - DNA, 279 bp, Streptococcus pneumoniae
atgaaaatcaaagagcaaactaggaagctagccgcaggttgctcaaaacacagttttgaggttgtagataagactgacgaagtcagctcaaaacatggttttgaggttgtagatgaaactgacgaagtcagctcaaaacatggttttgaggttgtagatgaaactgacgaagtcagctcaaaacatggttttgaggttgtagatgaaactgacgaagtcagtaatcatatctacggcaaggcgacactgacgaagtttgaattggattttcgcagagtg

SEQ ID NO: 1196 - protein, 93 aa, Streptococcus pneumoniae
  box element
MKIKEQTRKLAAGCSKHSFEVVDKTDEVSSKHGFEVVDETDEVSSKHGFEVVDETDEVSSKHGFEVVDETDEVSNHIYGKATLTKFELDFRRV

SEQ ID NO: 1197 - DNA, 6699 bp, Streptococcus pneumoniae
atggggaaaggccattggaatcggaaaagagtttatagcattcgtaagtttgctgtgggagcttgctcagtaatgattgggacttgtgcagttttattaggaggaaatatagctggagaatctgtagtttatgcggatgaaacacttattactcatactgctgagaaacctaaagaggaaaaaatgatagtagaagaaaaggctgataaagctttggaaactaaaaatatagttgaaaggacagaacaaagtgaacctagttcaactgaggctattgcatctgagaagaaagaagatgaagccgtaactccaaaagaggaaaaagtgtctgctaaaccggaagaaaaagctccaaggatagaatcacaagcttcaaatcaagaaaaaccgctcaaggaagatgctaaagctgtaacaaatgaagaagtgaatcaaatgattgaagacaggaaagtggattttaatcaaaattggtactttaaactcaatgcaaattctaaggaagccattaaacctgatgcagacgtatctacgtggaaaaaattagatttaccgtatgactggagtatctttaacgatttcgatcatgaatctcctgcacaaaatgaaggtggacagctcaacggtggggaagcttggtatcgcaagactttcaaactagatgaaaaagacctcaagaaaaatgttcgccttacttttgatggcgtctacatggattctcaagtttatgtcaatggtcagttagtggggcattatccaaatggttataaccagttctcatatgatatcaccaaataccttcaaaaagatggtcgtgagaatgtgattgctgtccatgcagtcaacaaacagccaagtagccgttggtattcaggaagtggtatctatcgtgatgtgactttacaagtgacagataaggtgcatgttgagaaaaatgggacaactattttaacaccaaaacttgaagaacaacaacatggcaaggttgaaactcatgtgaccagcaaaatcgtcaatacggacgacaaagaccatgaacttgtagccgaatatcaaatcgttgaacgaggtggtcatgctgtaacaggcttagttcgtacagcgagtcgtaccttaaaagcacatgaatcaacaagcctagatgcgattttagaagttgaaagaccaaaactctggactgttttaaatgacaaacctgccttgtacgaattgattacgcgtgtttaccgtgacggtcaattggttgatgctaagaaggatttgtttggttaccgttactatcactggactccaaatgaaggtttctctttgaatggtgaacgtattaaattccatggagtatccttgcaccacgaccatggggcgcttggagcagaagaaaactataaagcagaatatcgccgtctcaaacaaatgaaggagatgggagttaactccatccgtacaacccacaaccctgctagtgagcaaaccttgcaaatcgcagcagaactaggtttactcgttcaggaagaggcctttgatacgtggtatggtggcaagaaaccttatgactatggacgtttctttgaaaaagatgccactcacccagaagctcgaaaaggtgaaaaatggtctgattttgacctacgtaccatggtcgaaagaggcaaaaacaaccctgctatcttcatgtggtcaattggtaatgaaataggtgaagctaatggtgatgcccactctttagcaactgttaaacgtttggttaaggttatcaaggatgttgataagactcgctatgttaccatgggagcagataaattccgtttcggtaatggtagcggagggcatgagaaaattgctgatgaactcgatgctgttggatttaactattctgaagataattacaaagcccttagagctaagcatccaaaatggttgatttatggatcagaaacatcttcagctacccgtacacgtggaagttactatcgccctgaacgtgaattgaaacatagcaatggacctgagcgtaattatgaacagtcagattatggaaatgatcgtgtgggttgggggaaaacagcaaccgcttcatggacttttgaccgtgacaacgctggctatgctggacagtttatctggacaggtacggactatattggtgaacctacaccatggcacaaccaaaatcaaactcctgttaagagctcttactttggtatcgtagatacagccggcattccaaaacatgacttctatctctaccaaagccaatgggtttctgttaagaagaaaccgatggtacaccttcttcctcactggaactgggaaaacaaagaattagcatccaaagtagctgactcagaaggtaagattccagttcgtgcttattcgaatgcttctagtgtagaattgttcttgaatggaaaatctcttggtcttaagactttcaataaaaaacaaaccagcgatgggcggacttaccaagaaggtgcaaatgctaatgaactttatcttgaatggaaagttgcctatcaaccaggtaccttggaagcaattgctcgtgatgaatctggcaaggaaattgctcgagataagattacgactgctggtaagccagcggcagttcgtcttattaaggaagaccatgcgattgcagcagatggaaaagacttgacttacatctactatgaaattgttgacagccaggggaatgtggttccaactgctaataatctggttcgcttccaattgcatggccaaggtcaactggtcggtgtagataacggagaacaagccagccgtgaacgctataaggcgcaagcagatggttcttggattcgtaaagcatttaatggtaaaggtgttgccattgtcaaatcaactgaacaagcagggaaattcaccctgactgcccactctgatctcttgaaatcgaaccaagtcactgtctttactggtaagaaagaaggacaagagaagactgttttggggacagaagtgccaaaagtacagaccattattggagaggcacctgaaatgcctaccactgttccgtttgtatacagtgatggtagccgtgcagaacgtcctgtaacctggtcttcagtagatgtgagcaagcctggtattgtaacggtgaaaggtatggctgacggacgagaagtagaagctcgtgtagaagtgattgctcttaaatcagagctaccagttgtgaaacgtattgctccaaatactgacttgaattctgtagacaaatctgtttcctatgttttgattgatggaagtgttgaagagtatgaagtggacaagtgggagattgccgaagaagataaagctaagttagcaattccaggttctcgtattcaagcgaccggttatttagaaggtcaaccaattcatgcaacccttgtggtagaagaaggcaatcctgcggcacctgcagtaccaactgtaacggttggtggtgaggcagtaacaggtcttactagtcaaaaaccaatgcaataccgcactcttgcttatggagctaagttgccagaagtcacagcaagtgctaaaaatgcagctgttacagttcttcaagcaagcgcagcaaacggcatgcgtgcgagcatctttattcagcctaaagatggtggccctcttcaaacctatgcaattcaattccttgaagaagcgccaaaaattgctcacttgagcttgcaagtggaaaaagctgacagtctcaaagaagaccaaactgtcaaattgtcggttcgagctcactatcaagatggaacgcaagctgtattaccagctgataaagtaaccttctctacaagtggtgaaggggaagtcgcaattcgtaaaggaatgcttgagttgcataagccaggagcagtcactctgaacgctgaatatgagggagctaaagaccaagttgaactcactatccaagccaatactgagaagaagattgcgcaatccatccgtcctgtaaatgtagtgacagatttgcatcaggaaccaagtcttccagcaacagtaacagttgagtatgacaaaggtttccctaaaactcataaagtcacttggcaagctattccgaaagaaaaactagactcctatcaaacatttgaagtactaggtaaagttgaaggaattgaccttgaagcgcgtgcaaaagtctctgtagaaggtatcgtttcagttgaagaagtcagtgtgacaactccaatcgcagaagcaccacaattaccagaaagtgttcggacatatgattcaaatggtcacgtttcatcagctaaggttgcatgggatgcgattcgtccagagcaatacgctaaggaaggtgtctttacagttaatggtcgcttagaaggtacgcaattaacaactaaacttcatgttcgcgtatctgctcaaactgagcaaggtgcaaacatttctgaccaatggaccggttcagaattgccacttgcctttgcttcagactcaaatccaagcgacccagtttcaaatgttaatgacaagctcatttcctacaataaccaaccagccaatcgttggacaaactggaatcgtactaatccagaagcttcagtcggtgttctgtttggagattcaggtatcttgagcaaacgctccgttgataatctaagtgtcggattccatgaagaccatggagttggtgtaccgaagtcttatgtgattgagtattatgttggtaagactgtcccaacagctcctaaaaaccctagttttgttggtaatgaggaccatgtctttaatgattctgccaactggaaaccagttactaatctaaaagcccctgctcaactcaaggctggagaaatgaaccactttagctttgataaagttgaaacctatgctgttcgtattcgcatggttaaagcagataacaagcgtggaacgtctatcacagaggtacaaatctttgcgaaacaagttgcggcagccaagcaaggacaaacaagaatccaagttgacggcaaagacttagcaaacttcaaccctgatttgacagactactaccttgagtctgtagatggaaaagttccggcagtcacagcaagtgttagcaacaatggtctcgctaccgtcgttccaagcgttcgtgaaggtgagccagttcgtgtcatcgcgaaagctgaaaatggcgacatcttaggagaataccgtctgcacttcactaaggataagagcttactttctcataaaccagttgctgcggttaaacaagctcgcttgctacaagtaggtcaagcacttgaattgccgactaaggttccagtttacttcacaggtaaagacggctacgaaacaaaagacctgacagttgaatgggaagaagttccagcggaaaatctgacaaaagcaggtcaatttactgttcgaggccgtgtccttggtagtaaccttgttgctgagatcactgtacgagtgacagacaaacttggtgagactctttcagataaccctaactatgatgaaaacagtaaccaggcctttgcttcagcaaccaatgatattgacaaaaactctcatgaccgcgttgactatctcaatgacggagatcattcagaaaatcgtcgttggacaaactggtcaccaacaccatcttctaatccagaagtatcagcgggtgtgattttccgtgaaaatggtaagattgtagaacggactgttacacaaggaaaagttcagttctttgcagatagtggtacggatgcaccatctaaactcgttttagaacgctatgtcggtccagagtttgaagtgccaacctactattcaaactaccaagcctacgacgcagaccatccattcaacaatccagaaaattgggaagctgttccttatcgtgcggataaagacattgcagctggtgatgaaatcaacgtaacatttaaagctatcaaagccaaagctatgagatggcgtatggagcgtaaagcagataagagcggtgttgcgatgattgagatgaccttccttgcaccaagtgaattgcctcaagaaagcactcaatcaaagattcttgtagatggaaaagaacttgctgatttcgctgaaaatcgtcaagactatcaaattacctataaaggtcaacggccaaaagtctcagttgaagaaaacaatcaagtagcttcaactgtggtagatagtggagaagatagctttccagtacttgttcgcctcgtttcagaaagtggaaaacaagtcaaggaataccgtatccacttgactaaggaaaaaccagtttctgagaagacagttgctgctgtacaagaagatcttccaaaaatcgaatttgttgaaaaagatttggcatacaagacagttgagaaaaaagattcaacactgtatctaggtgaaactcgtgtagaacaagaaggaaaagttggaaaagaacgtatctttacagcgattaatcctgatggaagtaaggaagaaaaactccgtgaagtggtagaagttccgacagaccgcatcgtcttggttggaaccaaaccagtagctcaagaagctaaaaaaccacaagtgtcagaaaaagcagatacaaaaccaattgattcaagtgaagctagtcaaactaataaagcccagttaccaagtacaggtagtgcggcaagccaagcagcagtagcagcaggtttaactcttctaggtttgagtgcaggattagtagttactaaaggtaaaaaagaagac

SEQ ID NO: 1198 - protein, 2233 aa, Streptococcus pneumoniae
  beta-galactosidase (bgaA); Cellular location: Peptidoglycan-bound (LPXTG); Similar to strain R6 sequence 15902609 (0.E+01)
MGKGHWNRKRVYSIRKFAVGACSVMIGTCAVLLGGNIAGESVVYADETLITHTAEKPKEEKMIVEEKADKALETKNIVERTEQSEPSSTEAIASEKKEDEAVTPKEEKVSAKPEEKAPRIESQASNQEKPLKEDAKAVTNEEVNQMIEDRKVDFNQNWYFKLNANSKEAIKPDADVSTWKKLDLPYDWSIFNDFDHESPAQNEGGQLNGGEAWYRKTFKLDEKDLKKNVRLTFDGVYMDSQVYVNGQLVGHYPNGYNQFSYDITKYLQKDGRENVIAVHAVNKQPSSRWYSGSGIYRDVTLQVTDKVHVEKNGTTILTPKLEEQQHGKVETHVTSKIVNTDDKDHELVAEYQIVERGGHAVTGLVRTASRTLKAHESTSLDAILEVERPKLWTVLNDKPALYELITRVYRDGQLVDAKKDLFGYRYYHWTPNEGFSLNGERIKFHGVSLHHDHGALGAEENYKAEYRRLKQMKEMGVNSIRTTHNPASEQTLQIAAELGLLVQEEAFDTWYGGKKPYDYGRFFEKDATHPEARKGEKWSDFDLRTMVERGKNNPAIFMWSIGNEIGEANGDAHSLATVKRLVKVIKDVDKTRYVTMGADKFRFGNGSGGHEKIADELDAVGFNYSEDNYKALRAKHPKWLIYGSETSSATRTRGSYYRPERELKHSNGPERNYEQSDYGNDRVGWGKTATASWTFDRDNAGYAGQFIWTGTDYIGEPTPWHNQNQTPVKSSYFGIVDTAGIPKHDFYLYQSQWVSVKKKPMVHLLPHWNWENKELASKVADSEGKIPVRAYSNASSVELFLNGKSLGLKTFNKKQTSDGRTYQEGANANELYLEWKVAYQPGTLEAIARDESGKEIARDKITTAGKPAAVRLIKEDHAIAADGKDLTYIYYEIVDSQGNVVPTANNLVRFQLHGQGQLVGVDNGEQASRERYKAQADGSWIRKAFNGKGVAIVKSTEQAGKFTLTAHSDLLKSNQVTVFTGKKEGQEKTVLGTEVPKVQTIIGEAPEMPTTVPFVYSDGSRAERPVTWSSVDVSKPGIVTVKGMADGREVEARVEVIALKSELPVVKRIAPNTDLNSVDKSVSYVLIDGSVEEYEVDKWEIAEEDKAKLAIPGSRIQATGYLEGQPIHATLVVEEGNPAAPAVPTVTVGGEAVTGLTSQKPMQYRTLAYGAKLPEVTASAKNAAVTVLQASAANGMRASIFIQPKDGGPLQTYAIQFLEEAPKIAHLSLQVEKADSLKEDQTVKLSVRAHYQDGTQAVLPADKVTFSTSGEGEVAIRKGMLELHKPGAVTLNAEYEGAKDQVELTIQANTEKKIAQSIRPVNVVTDLHQEPSLPATVTVEYDKGFPKTHKVTWQAIPKEKLDSYQTFEVLGKVEGIDLEARAKVSVEGIVSVEEVSVTTPIAEAPQLPESVRTYDSNGHVSSAKVAWDAIRPEQYAKEGVFTVNGRLEGTQLTTKLHVRVSAQTEQGANISDQWTGSELPLAFASDSNPSDPVSNVNDKLISYNNQPANRWTNWNRTNPEASVGVLFGDSGILSKRSVDNLSVGFHEDHGVGVPKSYVIEYYVGKTVPTAPKNPSFVGNEDHVFNDSANWKPVTNLKAPAQLKAGEMNHFSFDKVETYAVRIRMVKADNKRGTSITEVQIFAKQVAAAKQGQTRIQVDGKDLANFNPDLTDYYLESVDGKVPAVTASVSNNGLATVVPSVREGEPVRVIAKAENGDILGEYRLHFTKDKSLLSHKPVAAVKQARLLQVGQALELPTKVPVYFTGKDGYETKDLTVEWEEVPAENLTKAGQFTVRGRVLGSNLVAEITVRVTDKLGETLSDNPNYDENSNQAFASATNDIDKNSHDRVDYLNDGDHSENRRWTNWSPTPSSNPEVSAGVIFRENGKIVERTVTQGKVQFFADSGTDAPSKLVLERYVGPEFEVPTYYSNYQAYDADHPFNNPENWEAVPYRADKDIAAGDEINVTFKAIKAKAMRWRMERKADKSGVAMIEMTFLAPSELPQESTQSKILVDGKELADFAENRQDYQITYKGQRPKVSVEENNQVASTVVDSGEDSFPVLVRLVSESGKQVKEYRIHLTKEKPVSEKTVAAVQEDLPKIEFVEKDLAYKTVEKKDSTLYLGETRVEQEGKVGKERIFTAINPDGSKEEKLREVVEVPTDRIVLVGTKPVAQEAKKPQVSEKADTKPIDSSEASQTNKAQLPSTGSAASQAAVAAGLTLLGLSAGLVVTKGKKED

SEQ ID NO: 1199 - DNA, 621 bp, Streptococcus pneumoniae
atggaagagttagtgaccttagattgtttgtttattgacagaactaagattgaagccaatgccaacaagtatagttttgtgtggaagaaaacgacagagaaattctccgccaaacttcaagaacagatacaggtctattttcaagaagaaatcactccccttctgattaaatatgccatgtttgataagaaacaaaagagagggtataaagagtcagctaaaaacttagcgaattggcactataatgacaaggaggatagctacacacatcctgatggctggtattatcgttttcaccataccaaatatcagaaaacacagacagactttcaacaagaaatcaaggtttactacgccgacgaacctgaatcagcccctcaaaagggactgtatatgaacgaacgctatcaaaacttgaaagctaaagaatgtcaggcgcttttatctccccaaggtagacagattttcgctcaacgcaagattgatgtggaacctgtctttgggcagataaaggcttctttgggttacaagagatgtaatctgagagggaagcgtcaagtgagaattgacatgggattggtacttatggccaataacctcctaaaatatagtaaaatgaaa

SEQ ID NO: 1200 - protein, 207 aa, Streptococcus pneumoniae
  conserved hypothetical protein, degenerate
MEELVTLDCLFIDRTKIEANANKYSFVWKKTTEKFSAKLQEQIQVYFQEEITPLLIKYAMFDKKQKRGYKESAKNLANWHYNDKEDSYTHPDGWYYRFHHTKYQKTQTDFQQEIKVYYADEPESAPQKGLYMNERYQNLKAKECQALLSPQGRQIFAQRKIDVEPVFGQIKASLGYKRCNLRGKRQVRIDMGLVLMANNLLKYSKMK

SEQ ID NO: 1201 - DNA, 150 bp, Streptococcus pneumoniae
gtggtgaataccttggaggaacgtcacttctacacctcctatcatgcctttgatcgcccgtcttatcaccctaaaatgcttgtatctactcttctatttgcctattcacaagggattttctctggtcgaaaaattgaaaaatggaagagt

SEQ ID NO: 1202 - protein, 50 aa, Streptococcus pneumoniae
  hypothetical protein
MVNTLEERHFYTSYHAFDRPSYHPKMLVSTLLFAYSQGIFSGRKIEKWKS

SEQ ID NO: 1203 - DNA, 105 bp, Streptococcus pneumoniae
ttggatggttacgatagtcttggtaaaatagaattgcccaataaaccatttagaaaggctatcccatgcatattcactataacacaaatcaaacaactttaccac

SEQ ID NO: 1204 - protein, 35 aa, Streptococcus pneumoniae
  hypothetical protein
MDGYDSLGKIELPNKPFRKAIPCIFTITQIKQLYH

SEQ ID NO: 1205 - DNA, 318 bp, Streptococcus pneumoniae
ttgatactgaccttagtcgtctgcattatcctaaccaaactttttagattaaaaaaactaggacgaaactttgcggatttggcttttccagtcttggtatttgagtattacttgattacagctaaaacctttacccataatttcctccctagactggggctagccctctcgatcctagccattattctcgtctttttcttccttttgaaaaaacgcagcttttactaccctaaatttatcaaattcttctggcgtgcaggattcttattaacccttatcatgtatatagaaatgattgttgaattgttcttaatgaaa

SEQ ID NO: 1206 - protein, 106 aa, Streptococcus pneumoniae
  hypothetical protein; Cellular location: membrane; Similar to strain R6 sequence 15902612 (6.E-56)
MILTLVVCIILTKLFRLKKLGRNFADLAFPVLVFEYYLITAKTFTHNFLPRLGLALSILAIILVFFFLLKKRSFYYPKFIKFFWRAGFLLTLIMYIEMIVELFLMK

SEQ ID NO: 1207 - DNA, 1023 bp, Streptococcus pneumoniae
atggaaacgagaaacagaggaatttataggaaagtcaggcttttgagattgtgggtgatttttgttataatgaaagtcatgaaatcttataataccttgaatgattattatcgaaaactctttggagaaaagacttttaaagtccctattgatgcgggatttgattgtcccaatcgtgatgggactgtggctcatgggggctgtactttttgtacggtttctggttctggagatgccattgtggcaccggatgcgcctatccgtgagcaattttataaggaaattgactttatgcaccgcaagtggccggatgttcggaagtatctggtttattttcaaaattttaccaacacccatgaaaaggtggaagttattcgagagcgttatgaacaggctatcaatgagccaggtgtggtaggaatcaatattggaacgcgcccagactgtttaccagacgaaaccatcgaatatttggctgagttatcggagtgcatgcatgtgacggttgaattgggcttgcaaactacttatgaagcaacctctgacctgattaaccgtgcgcattcttatgaattgtaggtggaaacggtcaagcgtttgagaaagtatccaaaaattgagattgtttcccatttgatcaatggtttgcctggtgaaacccatgagatgatggttgaaaatgtccgccgttgtgtcacggataacgatattcaagggattaaactgcatttgctccatcttatgacaaatactcgtatgcaacgagattaccatgaggggcgtttacaattgatgagtcaggacgaatatgtcagggtcatctgtgaccaactggaaattattcccaaacatatcgtcatccatcgaattacaggagatgcgcctagggatatgctgcttggtcctatgtggagcctcaataaatgggaagtcctcaacagcattgagatggagatgcgacgtcgtggaagtgttcaaggatgcaaggctgtaaaacaggagtttgaaaatgaaaagaccact

SEQ ID NO: 1208 - skipped

SEQ ID NO: 1209 - DNA, 555 bp, Streptococcus pneumoniae
atgaaaagaccacttgagatggcacatgattttttggctgaggtcgtgacaaaagaggatgtcgtagtggatgcgactatgggaaatggtcatgacacgctttttttagccaagctagccaagcaagtctatgcctttgatattcagaagcaagccttggaaaagacccaagagcgtttgcatcaggctgacttgacaaatgcccagttaatcttgcaaggccatgagacactggaccagtttgtgataaaagctaaggcagggatttttaatctgggctatttgccggcagctgataagtctgtcatcacccgaccgcagacaacgattgaggcattagaaaagctatgtggcttacttgtcaaaggtggacgaattgctattatgatttactatggtcatgaaggaggcgatctcgagagagatgctgtcttggattttgtgatccagttgaaccaacaagagtacacagctgccatttaccgaactttaaaccaagtcaacaacccgccgtttttagtgatgattgaaaaattagagagatacagacatgga

SEQ ID NO: 1210 - protein, 185 aa, Streptococcus pneumoniae
  conserved hypothetical protein; Cellular location: cytoplasm; Similar to strain R6 sequence 15902615 (e-101)
MKRPLEMAHDFLAEVVTKEDVVVDATMGNGHDTLFLAKLAKQVYAFDIQKQALEKTQERLHQADLTNAQLILQGHETLDQFVIKAKAGIFNLGYLPAADKSVITRPQTTIEALEKLCGLLVKGGRIAIMIYYGHEGGDLERDAVLDFVIQLNQQEYTAAIYRTLNQVNNPPFLVMIEKLERYRHG

SEQ ID NO: 1211 - DNA, 252 bp, Streptococcus pneumoniae
atggataaacaatacttacacgaaaagctggatgccatgcgccagaattttgttgaatcaacccaccacgaacgagcgatgggcgtgctagaccaagcgcatatgagcaaaaaaatgcttaaaatcaagaaaaaattagttgctcttgaaatggaacggtgccagagaaaaattgagcacaaagactgttccaagattgaccaaaaaatcaaagagcagaaggagatatttgaatcctgttgtaaaaaagat

SEQ ID NO: 1212 - protein, 84 aa, Streptococcus pneumoniae
  hypothetical protein; Cellular location: cytoplasm; Similar to strain R6 sequence 15902616 (5.E-45)
MDKQYLHEKLDAMRQNFVESTHHERAMGVLDQAHMSKKMLKIKKKLVALEMERCQRKIEHKDCSKIDQKIKEQKEIFESCCKKD

SEQ ID NO: 1213 - DNA, 99 bp, Streptococcus pneumoniae
ttgaatcctgttgtaaaaaagattaaggaggacgtgcgtggaattactgatttacctcatcctatttttactggttttgattgtctcaagtacaaccaa

SEQ ID NO: 1214 - protein, 33 aa, Streptococcus pneumoniae
  hypothetical protein; Cellular location: cytoplasm
MNPVVKKIKEDVRGITDLPHPIFTGFDCLKYNQ

SEQ ID NO: 1215 - DNA, 1086 bp, Streptococcus pneumoniae
ttgattgtctcaagtacaaccaataagctcctgccctttttgcctctccctttggtgcaaattcttttgggaattgtgattggtctctttttacccaatactgactttcaccttaatacggagttgtttttggcactggttatcggacccttgcttttccgagaggctgaagaagcagatgttacggctattttaaaacactggcgaatcattgtttatctcatatttccagtgatttttatctcgaccctgagtttgggtggcttggcccatcttctttggttcagccttcccttggcagcttgcttggctgttggggcagcccttggtcctacggacttggtggcctttgcctctctttcggagcgttttagctttcctaagcgcgtgtccaatattcttaagggcgaaggactcttgaatgatgcttctggtttggtggcttttcaggtagctttgacagcttggacaactggagctttttctctggggcaagctagcagttcgctcatcttttcaatcctaggcggttttttaattggatttttaacagccatgaccaaccgcttcctccataccttcttgctaagtgtgcgcgcaacggatattgccagtgaacttttattagaattgagtttgcctctagtgaccttctttctggcagaagaagttcatgtttcaggtattattgccgtcgtagttgctggaattttaaaggcaagtcgcttcaagaaaatcacgctcctcgaagcccaagtggatacggtgaccgagacggtctggcatacagtgacctttatgctcaacggttctgtctttgtgattttagggatggagttggaaatgatagcagaacctatcttgaccaatccaatctataatcctctacttttattgctatctcttatcgcccttacctttgtcctttttgtcattcgttttattatgatctatggctattatgcctatagaacccgacgcctcaagaaaaagctaaataagtatatgaaggacatgtttctcttgaccttttcaggtgttaagggaacggtgtcgattgctacgattctcttgataccaagtaat

SEQ ID NO: 1216 - protein, 362 aa, Streptococcus pneumoniae
  sodium/hydrogen exchanger family protein; Cellular location: membrane; Similar to strain R6 sequence 15902617 (0.E+01)
MIVSSTTNKLLPFLPLPLVQILLGIVIGLFLPNTDFHLNTELFLALVIGPLLFREAEEADVTAILKHWRIIVYLIFPVIFISTLSLGGLAHLLWFSLPLAACLAVGAALGPTDLVAFASLSERFSFPKRVSNILKGEGLLNDASGLVAFQVALTAWTTGAFSLGQASSSLIFSILGGFLIGFLTAMTNRFLHTFLLSVRATDIASELLLELSLPLVTFFLAEEVHVSGIIAVVVAGILKASRFKKITLLEAQVDTVTETVWHTVTFMLNGSVFVILGMELEMIAEPILTNPIYNPLLLLLSLIALTFVLFVIRFIMIYGYYAYRTRRLKKKLNKYMKDMFLLTFSGVKGTVSIATILLIPSN

SEQ ID NO: 1217 - DNA, 906 bp, Streptococcus pneumoniae
ttgcttttccttgttgcaggtgtgacgcttgttagctttttaacaggtctcttggtcttgcctcatctttctgatgaagaggaagaaagcaaggattatcttatgcatatcgccattttgaatgaagtaacgctagagttggaaaaagagttggaagacaccagaaataaacttcccctctatgcggctattgacaattatcatggacgtattgaaaatctcattttaagccaagaaaaccaggatgatcaagaagactgggctgctttgaaactcttgattcttagtattgaaagtgatggtttggaacaggcctatgaagaggggaacattagcaatcgtgcttaccgagtttaccaacgttatctgaaaaatatagaacaaggaatcaatcgtaaacttgcctcaagactgacctattattttcttgtttccttgaggattttacgttttctccttcatgaagtttttactctcggaaagaccttccgtagctggaagaacaaggagcaaagccgtctccgtgctcttgattatgaccaaattgcagagctctatcttgccaatacagagatgattattgaaagtttggaaaacctgaagggagtctacagacgctctttgattagttttatgcaggagtctcgtcttcgagaaacagctattatcagcagtggtgcctttgtcgaacgggttatcaatcgtgtcaaacccaacaatatcgatgaaatgctgagaggctattatctggagcgcaagttgattttcgaatacgaagaaaaacgattgattacgactaagtatgccaagaaattacgacaaaatgtaaataacttagagaactattccttgaaggaagctgccaataccctaccgtatgatatggtggaattggtaagaagaaat

SEQ ID NO: 1218 - protein, 302 aa, Streptococcus pneumoniae
  hypothetical protein (Na+/H+ antiporter); Cellular location: outside; Similar to strain R6 sequence 15902617 (e-167)
MLFLVAGVTLVSFLTGLLVLPHLSDEEEESKDYLMHIAILNEVTLELEKELEDTRNKLPLYAAIDNYHGRIENLILSQENQDDQEDWAALKLLILSIESDGLEQAYEEGNISNRAYRVYQRYLKNIEQGINRKLASRLTYYFLVSLRILRFLLHEVFTLGKTFRSWKNKEQSRLRALDYDQIAELYLANTEMIIESLENLKGVYRRSLISFMQESRLRETAIISSGAFVERVINRVKPNNIDEMLRGYYLERKLIFEYEEKRLITTKYAKKLRQNVNNLENYSLKEAANTLPYDMVELVRRN

SEQ ID NO: 1219 - DNA, 858 bp, Streptococcus pneumoniae
atgaaaaagtggtggaaagagctgatagacaaacctttattaaaagcttttttgcattattatcaagcatcagatagtgagttgaccagtgtcgcagtagcctactattggttgatttcgattttccccctgcttttggtggtggtcaatatcctcccctattttcagattcctgtgggagaatttttgggctttatgaaagacgtcctgcccccaagcctctatgaaggtgtggaaaaaatagccagagaagtcttgacgcaaccttcaacaggtttattgagtttttctgttttatcggcgttatggagtttttcaaaatctatgaatttcttgcaaaaagcttttaacaaggcttatggcgtcgaaaagagtcgtggacttatttcccatcagatgctaagtctcctagtcagttttggcttgcagctcctctttgcgtttgccttgtttttgatcttatttggtcagatgattttggctttacttgctcattattggacaaaagatggcattatctatcaggctttacaagggttggcaggtcctctgatttacgccctcctctttgctatcttggtcatgctttattattttcttcccaatctatctaacaggaaaattagctataccctaccaggcagtgcctttgttctcttagtgattttaggtttactaactctgttctctagttatctcaattactatgtccatcatttggtggatgtccgaattttaggttccgttcttcttgttgttatgatgttttggtttatcttgattgctaaaattgttatcctaggcgcggtgatcaatgccagtatgcagagtttgaaagatccggtctttaaaaaagac

SEQ ID NO: 1220 - protein, 286 aa, Streptococcus pneumoniae
  conserved hypothetical protein; Cellular location: membrane; Similar to strain R6 sequence 15902618 (e-159)
MKKWWKELIDKPLLKAFLHYYQASDSELTSVAVAYYWLISIFPLLLVVVNILPYFQIPVGEFLGFMKDVLPPSLYEGVEKIAREVLTQPSTGLLSFSVLSALWSFSKSMNFLQKAFNKAYGVEKSRGLISHQMLSLLVSFGLQLLFAFALFLILFGQMILALLAHYWTKDGIIYQALQGLAGPLIYALLFAILVMLYYFLPNLSNRKISYTLPGSAFVLLVILGLLTLFSSYLNYYVHHLVDVRILGSVLLVVMMFWFILIAKIVILGAVINASMQSLKDPVFKKD

SEQ ID NO: 1221 - DNA, 708 bp, Streptococcus pneumoniae
atgggtcatattttcttttttctaagtgtctttttggcagggattctatccttcttttctccttgtatcttacctttgttaccggtctatacaggagtgttactagatgataaggatggtgctcaggcttctagcggcaaattttcaatctcagttactagtttattacgaactctggcctttatagcaggaatttcctttatatttattttgttgggctatggagctggttttttaggcgatttgctttatgcttcttggttccaatatcttactggggcaattattatccttcttggtttgcaccaaatggagattctacactttaaggggctttataaggaaaagaggctacaactgcaaggacaggggcaaaatggtaagggctatagtcaggcatttttattgggcttgacctttagttttgcttggacgccttgcgtggggccggttctggggtctgttttggccttggcggcttcaggtggttcaggagcttggcagggagctggtctcatgttggtgtatacgctgggcttggcgctaccattcttgcttctagctctgacctctagttatgttttgaaacatttccgaaaacttcatccctatctcggaatcctcaaaaaagtgggtggttttctcattattgtgatgggcttcttggttctgtttggaaatgcttcaattttaagtcaattatttgaa

SEQ ID NO: 1222 - protein, 236 aa, Streptococcus pneumoniae
  cytochrome c-type biogenesis protein CcdA (ccdA); Cellular location: membrane; Similar to strain R6 sequence 15902619 (e-133)
MGHIFFFLSVFLAGILSFFSPCILPLLPVYTGVLLDDKDGAQASSGKFSISVTSLLRTLAFIAGISFIFILLGYGAGFLGDLLYASWFQYLTGAIIILLGLHQMEILHFKGLYKEKRLQLQGQGQNGKGYSQAFLLGLTFSFAWTPCVGPVLGSVLALAASGGSGAWQGAGLMLVYTLGLALPFLLLALTSSYVLKHFRKLHPYLGILKKVGGFLIIVMGFLVLFGNASILSQLFE

SEQ ID NO: 1223 - DNA, 564 bp, Streptococcus pneumoniae
atgaaaaaatggcaaacatgtgttcttggagcaggttcgctcctttgtttgacggcttgttcaggcaagtccgtgactagtgaacaccaaacgaaagatgaaatgaagacggagcagacagctagtaaaacaagcgcagctaaagggaaagaggtggctgattttgaattgatgggagtagatggcaagacctaccgtttatctgattacaagggcaagaaagtctatctcaaattctgggcttcttggtgttccatctgtctggctagtcttccagatacggatgagattgctaaagaagctggtgatgactatgtggtcttgacagtagtgtcaccaggacataagggagagcaatctgaagcggactttaagaattggtataagggattggattataaaaatctcccagtcctagttgacccatcaggcaaacttttggaaacttatggtgtccgttcttacccaacccaagcctttatagacaaagaaggcaagctggtcaaaacacatccaggattcatggaaaaagatgcaattttgcaaactttgaaggaattagcc

SEQ ID NO: 1224 - protein, 188 aa, Streptococcus pneumoniae
  thioredoxin family protein; Cellular location: lipoprotein; Similar to strain R6 sequence 15902620 (e-109)
MKKWQTCVLGAGSLLCLTACSGKSVTSEHQTKDEMKTEQTASKTSAAKGKEVADFELMGVDGKTYRLSDYKGKKVYLKFWASWCSICLASLPDTDEIAKEAGDDYVVLTVVSPGHKGEQSEADFKNWYKGLDYKNLPVLVDPSGKLLETYGVRSYPTQAFIDKEGKLVKTHPGFMEKDAILQTLKELA

SEQ ID NO: 1225 - DNA, 1110 bp, Streptococcus pneumoniae
atgaatgataagttaaaaatcttcttgttgctaggagtattttttctagccataaccggtttctatgttctattgatacgaaatgcagggcagacagatgcctcgcaaattgaaaaggcggcagttagccaaggaggaaaagcagtgaaaaaaacagaaattagtaaagacgcagacttgcacgaaatttatctagctggaggttgtttctggggagtggaggaatatttctcacgtgttcccggggtgacggatgccgtttcaggctatgcaaatggtagaggagaaacaaccaagtacgaattgattaaccaaacaggtcatgcagaaaccgtccatgtcacctatgatgccaagcaaatttctctcaaggaaatcctgcttcactatttccgcattatcaatccaaccagcaaaaataaacaaggaaatgatgtggggacccagtaccgtactggtgtttattacacagatgacaaggatttggaagtgattaaccaagtctttgatgaggtggctaagaaatacgatcaacctctagcagttgaaaaggaaaacttgaagaattttgtggtggctgaggattaccatcaagactatctcaagaaaaatccaaatggctactgccatatcaatgttaatcaggcggcctatcctgtcattgatgccagcaaatatccaaaaccaagtgatgaggaattgaaaaagaccctgtcacctgaggagtatgcagttacccaggaaaatcaaacagaacgagctttctcaaaccgttactgggataaatttgaatccggtatctatgtggatatagcaactggggaacctctcttttcatcaaaagacaaatttgagtctggttgtggctggcctagttttacccaacccatcagtccagatgttgtcacctacaaggaagataagtcctacaatatgacgcgtatggaagtgcggagccgagtaggagattctcaccttgggcatgtctttacggatggtccacaggacaagggcggcttacgttactgtatcaatagcctctctatccgctttattcccaaagaccaaatggaagaaaaaggctacgcttatttactagattatgttgat

SEQ ID NO: 1226 - protein, 370 aa, Streptococcus pneumoniae
  peptide methionine sulfoxide reductase (msrA); Cellular location: cytoplasm; Similar to strain R6 sequence 15902621 (0.E+01)
MNDKLKIFLLLGVFFLAITGFYVLLIRNAGQTDASQIEKAAVSQGGKAVKKTEISKDADLHEIYLAGGCFWGVEEYFSRVPGVTDAVSGYANGRGETTKYELINQTGHAETVHVTYDAKQISLKEILLHYFRIINPTSKNKQGNDVGTQYRTGVYYTDDKDLEVINQVFDEVAKKYDQPLAVEKENLKNFVVAEDYHQDYLKKNPNGYCHINVNQAAYPVIDASKYPKPSDEELKKTLSPEEYAVTQENQTERAFSNRYWDKFESGIYVDIATGEPLFSSKDKFESGCGWPSFTQPISPDVVTYKEDKSYNMTRMEVRSRVGDSHLGHVFTDGPQDKGGLRYCINSLSIRFIPKDQMEEKGYAYLLDYVD

SEQ ID NO: 1227 - DNA, 753 bp, Streptococcus pneumoniae
gtggtaaaggagcagagcatgacctacacaatcttaatcgtagaagatgaatatctggtaagacaaggtttgactaaactggtcaatgtagcagcctacgatatggaaatcatcggtcaggctgaaaatggaaggcaggcttgggaattgatccaaaagcaggtgccagatatcattttaaccgatatcaacatgcctcatctaaatggcatccagttggccagtctggtacgagaaacctatcctcaggttcatttggtctttttaacaggttacgatgattttgattatgccttgtctgctgtcaaactaggtgtggacgactacctgctcaaacccttttctcgtcaggatattgaggaaatgttggggaaaatcaaacaaaaactagacaaggaagagaaagaagagcagttacaagatttattgactaataggtttgaaggaaacatggcccagaaaatccagtctcatctggctgatagccaatttagtttaaagtctttagccagtgacttaggttttagtccgacctatctgagttccttgattaagaaagagttgggcttgccttttcaggattatctggtgagagaacgtgttaaacaagccaagctcttgcttttaactacagatctgaagatttatgagatcgcagagaaggttggttttgaagatatgaactattttacccaacgttttaagcagattgcaggtgtgacacctcgtcagtttaagaagggagaagaccga

SEQ ID NO: 1228 - protein, 251 aa, Streptococcus pneumoniae
  DNA-binding response regulator; Cellular location: cytoplasm; Similar to strain R6 sequence 15902622 (e-137)
MVKEQSMTYTILIVEDEYLVRQGLTKLVNVAAYDMEIIGQAENGRQAWELIQKQVPDIILTDINMPHLNGIQLASLVRETYPQVHLVFLTGYDDFDYALSAVKLGVDDYLLKPFSRQDIEEMLGKIKQKLDKEEKEEQLQDLLTNRFEGNMAQKIQSHLADSQFSLKSLASDLGFSPTYLSSLIKKELGLPFQDYLVRERVKQAKLLLLTTDLKIYEIAEKVGFEDMNYFTQRFKQIAGVTPRQFKKGEDR

SEQ ID NO: 1229 - DNA, 126 bp, Streptococcus pneumoniae
ttggacggtgcttggcgtgtcatcattggaaaagttagaccaggttcggagtcagctcttgtggaccttgcttggggccagtgtcacatctcttcttgtctgtctctgcttagtgtggttcagtct

SEQ ID NO: 1230 - protein, 42 aa, Streptococcus pneumoniae
  hypothetical protein
MDGAWRVIIGKVRPGSESALVDLAWGQCHISSCLSLLSVVQS

SEQ ID NO: 1231 - DNA, 1689 bp, Streptococcus pneumoniae
atgaagcgttcttctcttttagttagaatggttatttccatctttctggtctttctcattctcctagctctggttggaactttctactatcaatcaagttcttcagccattgaggccaccattgagggcaacagccaaacgaccatcagccagactagccactttattcagtcttatatcaaaaaactagaaaccacctcgactggtttgacccagcagacggatgttctggcctatgctgagaatcccagtcaagacaaggtcgagggaatccgagatttgtttttgaccatcttgaagtcagataaggacttgaaaactgttgtgctggtgaccaaatctggtcaggtcatttctacagatgacagtgtgcagatgaaaacttcctctgatatgatggctgaggattggtaccaaaaggccattcatcagggagctatgcctgttttgactccagctcgtaaatcagatagtcagtgggtcatttctgtcactcaagaacttgttgatgcaaagggagccaatcttggtgtgcttcgtttggatatttcttatgaaactctggaagcctatctcaatcaactccagttggggcagcagggctttgccttcattatcaatgaaaaccatgaatttgtctaccatcctcaacacacagtttatagttcgtctagcaaaatggaggctatgaaaccctacatcgatacaggtcagggttatactcctggtcacaaatcctacgtcagtcaagagaagattgcaggaactgattggacggtgcttggcgtgtcatcattggaaaagttagaccaggttcggagtcagctcttgtggaccttgcttggggccagtgtcacatctcttcttgtctgtctctgcttagtgtggttcagtcttaaacgctggattgctcctttgaaggatttgagagaaaccatgttggaaattgcttctggtgctcaaaatcttcgtgccaaggaagttggtgcctatgaactgagagaagtaactcgccaatttaatgctatgttggatcagattgatcagttgatggtagctattcgtagccaggaagaaacgacccgtcagtaccaacttcaagccctttcgagccagattaatccacatttcctctataacactttggacaccatcatctggatggctgaatttcatgatagtcagcgagtggtgcaggtgaccaagtccttggcaacctatttccgcttggcgctcaatcaaggcaaggacttgatttgtctctctgacgaaatcaatcatgtccgccagtatctctttatccagaaacaacgctatggagataagctggaatacgaaattaatgaaaatgttgcctttgataatttagtcttacccaagctggtcctacaaccccttgtagaaaatgctctttaccatggcattaaggaaaaggaaggtcagggccatattaaactttctgtccagaaacaggattcgggattggtcatccgtattgaggatgatggcgttggcttccaagatgctggtgatagtagtcaaagtcaactcaaacgtgggggagttggtcttcaaaatgtcgatcaacggctcaaacttcattttggagccaattaccatatgaagattgattctagaccccaaaaagggacgaaagttgaaatatatataaatagaatagaaactagc

SEQ ID NO: 1232 - protein, 563 aa, Streptococcus pneumoniae
  sensor histidine kinase, putative; Cellular location: membrane; Similar to strain R6 sequence 15902623 (0.E+01)
MKRSSLLVRMVISIFLVFLILLALVGTFYYQSSSSAIEATIEGNSQTTISQTSHFIQSYIKKLETTSTGLTQQTDVLAYAENPSQDKVEGIRDLFLTILKSDKDLKTVVLVTKSGQVISTDDSVQMKTSSDMMAEDWYQKAIHQGAMPVLTPARKSDSQWVISVTQELVDAKGANLGVLRLDISYETLEAYLNQLQLGQQGFAFIINENHEFVYHPQHTVYSSSSKMEAMKPYIDTGQGYTPGHKSYVSQEKIAGTDWTVLGVSSLEKLDQVRSQLLWTLLGASVTSLLVCLCLVWFSLKRWIAPLKDLRETMLEIASGAQNLRAKEVGAYELREVTRQFNAMLDQIDQLMVAIRSQEETTRQYQLQALSSQINPHFLYNTLDTIIWMAEFHDSQRVVQVTKSLATYFRLALNQGKDLICLSDEINHVRQYLFIQKQRYGDKLEYEINENVAFDNLVLPKLVLQPLVENALYHGIKEKEGQGHIKLSVQKQDSGLVIRIEDDGVGFQDAGDSSQSQLKRGGVGLQNVDQRLKLHFGANYHMKIDSRPQKGTKVEIYINRIETS

SEQ ID NO: 1233 - DNA, 561 bp, Streptococcus pneumoniae
atgaacgagacacagattcaaagagaaacacgtcaggtagtggaagatgttttagaaaagaccaatttgaagcagggggccctttttgttttaggtctatcttctagtgaggtgctaggtggtcatattgggaaagaatccagtcaagagattggtgagctgatagtggagactatcttggatattctaggtagtagaggtatccatttagcagttcaaggttgtgagcatgtcaatcgggctctcgttgttgaacgtcaggtggcagagcagtttggtctggaaattgtcagtgtccatcctactcttcatgcaggaggttcggggcagttggcagcctttaagtttatgcaggatccagttgaggttgaatttatcaaggctcatgctggattggatatcggagacactgcaattggcatgcatgtcaagcatgttcaggttccgattcgccctattttgagagagattggtcatgcccatgtaacggcactggctagtcgtccaaaattaatcggaggtgcgcgtgcgcactatccgcaagatgctattaggaagttt

SEQ ID NO: 1234 - protein, 187 aa, Streptococcus pneumoniae
  conserved hypothetical protein; Cellular location: cytoplasm; Similar to strain R6 sequence 15902624 (e-101)
MNETQIQRETRQVVEDVLEKTNLKQGALFVLGLSSSEVLGGHIGKESSQEIGELIVETILDILGSRGIHLAVQGCEHVNRALVVERQVAEQFGLEIVSVHPTLHAGGSGQLAAFKFMQDPVEVEFIKAHAGLDIGDTAIGMHVKHVQVPIRPILREIGHAHVTALASRPKLIGGARAHYPQDAIRKF

SEQ ID NO: 1235 - DNA, 5643 bp, Streptococcus pneumoniae
atggctccttctgtagtggacgcagccacctatcactatgtaaataaagagattatttcacaagaagctaaagatttaattcagacaggaaagcctgacaggaatgaagttgtatatggtttggtgtatcaaaaagatcagttgcctcaaacagggacagaagcatctgttttgacagcttttggtttgctgactgttgggagcttgcttttaatctacaagagaaagaaaattgctagcgtctttctagttggagctatgggattggtagttcttcctagtgcaggggctgtagacccagttgcgaccctagcgctggctagtcgagagggtgttgttgaaatggagggctatcgctatgttggttatctatcaggtgacatcctcaaaacgcttggcttggacactgttttagaagaaacctcagcaaaacctggagaggtgactgtggtcgaagttgagactcctcaatcaataacaaatcaggagcaagctaggacagaaaaccaagtagtagagacagaggaagctccaaaagaagaagcacctaaaacagaagaaagtccaaaggaagaaccaaaatcggaggtaaaacctactgacgacacccttcctaaagtagaagaggggaaagaagattcagcagaaccagctccagttgaagaagtaggtggagaagttgagtcaaaaccagaggaaaaagtagcagttaagccagaaagtcaaccatcagacaaaccagctgaggaatcaaaagttgaacaagcaggtgaaccagtcgcgccaagagaagacgaaaaggcaccagtcgagccagaaaagcaaccagaagctcctgaagaagagaaggctgtagaggaaacaccgaaacaagaagagtcaactccagataccaaggctgaagaaactgtagaaccaaaagaggagactgttaatcaatctattgaacaaccaaaagttgaaacgcctgctgtagaaaaacaaacagaaccaacagaggaaccaaaagttgaacaagcaggtgaaccagtcgcgccaagagaagacgaacaggcaccaacggcaccagttgagccagaaaagcaaccagaagttcctgaagaagagaaggctgtagaggaaacaccgaaaccagaagataaaataaagggtattggtactaaagaaccagttgataaaagtgagttaaataatcaaattgataaagctagttcagtttctcctactgattattctacagcaagttacaatgctcttggacctgttttagaaactgcaaaaggtgtctatgcttcagagcctgtaaaacagcctgaggtaaatagcgagacaaataaacttaaaacggctattgacgctctaaacgttgataaaactgaattaaacaatacgattgcagatgcaaaaacaaaggtaaaagaacattacagtgatagaagttggcaaaacctccaaactgaagttacaaaggctgaaaaagttgcagctaatacagatgctaaacaaagtgaagttaacgaagctgttgaaaaattaactgcaactattgaaaaattggttgaattatctgaaaagccaatattaacattgactagtaccgataagaaaatattggaacgtgaagctgttgctaagtatactctagaaaatcaaaacaaaacaaaaatcaaatcaatcacagctgaattgaaaaaaggagaagaagttattaatactgtagtccttacagatgacaaggtaacaacagaaactataagcgctgcatttaagaacctagagtactacaaagaatacaccctatctacaactatgatttacgacagaggtaacggtgaagaaactgaaactctagaaaatcaaaatattcaattagatcttaaaaaagttgagcttaaaaatattaaacgtacagatttaatcaaatacgaaaatggaaaagaaactaatgaatcactgataacaactattcctgatgataagagcaattattatttaaaaataacttcaaataatcagaaaactacattactagctgttaaaaatatagaagaaactacggttaacggaacacctgtatataaagttacagcaatcgcagacaatttagtctctagaactgctgataataaatttgaagaagaatacgttcactatattgaaaaacctaaagtccacgaagataatgtatattataatttcaaagaattagtggaagctattcaaaacgatccttcaaaagaatatcgtctgggacaatcaatgagcgctagaaatgttgttcctaatggaaaatcatatatcactaaagaattcacaggaaaacttttaagttctgaaggaaaacaatttgctattactgaattggaacatccattatttaatgtgataacaaacgcaacgataaataatgtgaattttgaaaatgtagagatagaacgttctggtcaagataatattgcatcattagccaatactatgaaaggttcttcagttattacaaatgtcaaaattacaggcacactttcaggtcgtaataatgttgctggatttgtaaataatatgaatgatggaactcgtattgaaaatgttgctttctttggcaaactacactctacaagtggaaatggctctcatacagggggaattgcaggtacaaactatagaggaattgttagaaaagcatatgttgatgctactattacaggaaacaaaacacgcgccagcttgttagttcctaaagtagattatggattaactctagaccatcttattggtacaaaagctctcctaactgagtcggttgtaaaaggtaaaatagatgtttcaaatccagtagaagttggagcaatagcaagtaagacttggcctgtaggtacggtaagtaattctgtcagctatgctaagattatccgtggagaggagttattcggctctaacgacgttgatgattctgattatgctagtgctcatataaaagatttatatgcggtagagggatattcgtcaggtaatagatcatttaggaaatctaaaacatttactaaattaactaaagaacaagctgatgctaaagttactactttcaatattactgctgataaattagaaagtgatctatctcctcttgcaaaacttaatgaagaaaaagcctattctagtattcaagattataacgctgaatataaccaagcctataaaaatcttgaaaaattaataccattctacaataaagattatattgtatatcaaggtaataaattaaataaagaacaccatctaaatactaaagaagttctttctgttaccgcgatgaacaacaatgagtttatcacaaacctagatgaagctaataaaattattgttcactatgcggacggtacaaaagattactttaacttgtcttctagcagtgaaggtttaagtaatgtaaaagaatatactataactgacttaggaattaaatatacacctaatatcgttcaaaaagataacactactcttgttaatgatataaaatctattttagaatcagtagagcttcagtctcaaacgatgtatcagcatctaaatcgattaggtgactatagagttaatgcaatcaaagatttatatttagaagaaagcttcacagatgttaaagaaaacttaacaaacctaatcacaaaattagttcaaaacgaagaacatcaactaaatgattctccagctgctcgtcaaatgattcgtgataaagtcgagaaaaacaaagcagctttattactaggtttaacttacctaaatcgttactatggagttaaatttggtgatgttaatattaaagaattaatgctattcaaaccagatttctatggtgaaaaagttagcgtattagacagattaattgaaatcggttctaaagagaacaacattaaaggttcacgtacattcgacgcattcggtcaagtattggctaaatatactaaatcaggtaatttagatgcatttttaaattataatagacaattgttcacaaatatagacaatatgaacgattggtttattgatgctacagaagaccatgtctacatcgcagaacgcgcttctgaggtcgaagaaattaaaaattctaaacatcgtgcattcgataatttaaaacgaagtcaccttagaaatactatactcccactactgaatattgataaagcacatctttatttaatttcaaattataatgcaattgcctttggtagtgcagagcgattaggtaaaaaatcattagaagatattaaagatatcgttaacaaagctgcagatggttatagaaactattatgatttctggtatcgtctagcgtctgataacgttaaacaacgactactaagagatgctgttattcctatttgggaaggttataacgctcctggtggatgggttgaaaaatatggccgctataataccgacaaagtatatactcctcttagagaattctttggtcctatggataagtattataattataatggaacaggagcttatgctgctatatatcctaactctgatgatattagaactgatgtaaaatatgttcatttagaaatggttggtgaatacggtatttcagtttacacacatgaaacaacacacgtcaacgaccgtgcgatttacttaggtggctttggacaccgtgaaggtactgatgctgaagcatatgctcagggtatgctacaaactcctgttactggtagtggatttgatgagtttggttctttaggtattaatatggtatttaaacgcaaaaatgatgggaatcagtggtatattacagatccaaaaactctaaaaacacgagaagatattaatagatatatgaagggttataatgacactttaactcttcttgatgaaattgaggctgaatctgtgatttctcaacaaaataaagatttaaatagtgcatggttcaaaaaaatagatagagaataccgtgataacaataaattaaatcaatgggataaaattcgaaatctaagtcaagaagagaaaaatgaattaaatattcaatctgttaatgatttagttgatcaacaattaatgactaatcgcaatccaggtaatggtatctataaacccgaagcaattagctataacgatcaatcaccttatgtaggtgttagaatgatgaccggtatctacggaggtaatactagtaaaggtgctcctggagctgtttcattcaaacataatgcttttagattatggggttactacggatacgaaaatgggttcttaggttatgcttcaaataaatataaacaacaatctaaaacagatggtgagtctgttctaagtgatgaatatattatcaagaaaatatctaacaatacatttaatactattgaagaatttaaaaaagcttacttcaaagaagttaaagataaagcaacgaaaggattaacaacattcgaagtaaatggttcttccgtttcatcatacgatgatttactgacattgtttaaagaagctgttaaaaaagatgccgaaactcttaaacaagaagcaaacggtaataaaacagtatctatgaataatacagttaaattaaaagaagctgtttataagaaacttcttcaacaaacaaatagctttaaaacttcaatctttaaa

SEQ ID NO: 1236 - protein, 1881 aa, Streptococcus pneumoniae
  zinc metalloprotease ZmpB, putative; Cellular location: Peptidoglycan-bound (LPXTG); Similar to strain R6 sequence 15902625 (0.E+01)
MAPSVVDAATYHYVNKEIISQEAKDLIQTGKPDRNEVVYGLVYQKDQLPQTGTEASVLTAFGLLTVGSLLLIYKRKKIASVFLVGAMGLVVLPSAGAVDPVATLALASREGVVEMEGYRYVGYLSGDILKTLGLDTVLEETSAKPGEVTVVEVETPQSITNQEQARTENQVVETEEAPKEEAPKTEESPKEEPKSEVKPTDDTLPKVEEGKEDSAEPAPVEEVGGEVESKPEEKVAVKPESQPSDKPAEESKVEQAGEPVAPREDEKAPVEPEKQPEAPEEEKAVEETPKQEESTPDTKAEETVEPKEETVNQSIEQPKVETPAVEKQTEPTEEPKVEQAGEPVAPREDEQAPTAPVEPEKQPEVPEEEKAVEETPKPEDKIKGIGTKEPVDKSELNNQIDKASSVSPTDYSTASYNALGPVLETAKGVYASEPVKQPEVNSETNKLKTAIDALNVDKTELNNTIADAKTKVKEHYSDRSWQNLQTEVTKAEKVAANTDAKQSEVNEAVEKLTATIEKLVELSEKPILTLTSTDKKILEREAVAKYTLENQNKTKIKSITAELKKGEEVINTVVLTDDKVTTETISAAFKNLEYYKEYTLSTTMIYDRGNGEETETLENQNIQLDLKKVELKNIKRTDLIKYENGKETNESLITTIPDDKSNYYLKITSNNQKTTLLAVKNIEETTVNGTPVYKVTAIADNLVSRTADNKFEEEYVHYIEKPKVHEDNVYYNFKELVEAIQNDPSKEYRLGQSMSARNVVPNGKSYITKEFTGKLLSSEGKQFAITELEHPLFNVITNATINNVNFENVEIERSGQDNIASLANTMKGSSVITNVKITGTLSGRNNVAGFVNNMNDGTRIENVAFFGKLHSTSGNGSHTGGIAGTNYRGIVRKAYVDATITGNKTRASLLVPKVDYGLTLDHLIGTKALLTESVVKGKIDVSNPVEVGAIASKTWPVGTVSNSVSYAKIIRGEELFGSNDVDDSDYASAHIKDLYAVEGYSSGNRSFRKSKTFTKLTKEQADAKVTTFNITADKLESDLSPLAKLNEEKAYSSIQDYNAEYNQAYKNLEKLIPFYNKDYIVYQGNKLNKEHHLNTKEVLSVTAMNNNEFITNLDEANKIIVHYADGTKDYFNLSSSSEGLSNVKEYTITDLGIKYTPNIVQKDNTTLVNDIKSILESVELQSQTMYQHLNRLGDYRVNAIKDLYLEESFTDVKENLTNLITKLVQNEEHQLNDSPAARQMIRDKVEKNKAALLLGLTYLNRYYGVKFGDVNIKELMLFKPDFYGEKVSVLDRLIEIGSKENNIKGSRTFDAFGQVLAKYTKSGNLDAFLNYNRQLFTNIDNMNDWFIDATEDHVYIAERASEVEEIKNSKHRAFDNLKRSHLRNTILPLLNIDKAHLYLISNYNAIAFGSAERLGKKSLEDIKDIVNKAADGYRNYYDFWYRLASDNVKQRLLRDAVIPIWEGYNAPGGWVEKYGRYNTDKVYTPLREFFGPMDKYYNYNGTGAYAAIYPNSDDIRTDVKYVHLEMVGEYGISVYTHETTHVNDRAIYLGGFGHREGTDAEAYAQGMLQTPVTGSGFDEFGSLGINMVFKRKNDGNQWYITDPKTLKTREDINRYMKGYNDTLTLLDEIEAESVISQQNKDLNSAWFKKIDREYRDNNKLNQWDKIRNLSQEEKNELNIQSVNDLVDQQLMTNRNPGNGIYKPEAISYNDQSPYVGVRMMTGIYGGNTSKGAPGAVSFKHNAFRLWGYYGYENGFLGYASNKYKQQSKTDGESVLSDEYIIKKISNNTFNTIEEFKKAYFKEVKDKATKGLTTFEVNGSSVSSYDDLLTLFKEAVKKDAETLKQEANGNKTVSMNNTVKLKEAVYKKLLQQTNSFKTSIFK

SEQ ID NO: 1237 - DNA, 1719 bp, Streptococcus pneumoniae
atgcatagaaaaacagtgattgattttaggactttgggggagagatatacctttacccagcctattaaagagttgaaaacgagaaatgtagaagaagtggcagatttgctggcacaagtggaaagctaccaagagcaaggttattatgtggtggggtatgtcagctacgaggctgcacctgcttttgaggaaaaattagcagttcacaaggatcccctactgggagagtacctgctttactttactgttcatgatatcgtagaaacttcccctattcctctgacttatgaggatattgatttgccctcaaattggcaggaagtaacgtctgcagcagactatgaaaaggccattgcccaaattcaccatcatttacggcagggagatacctatcaggtcaactacaccgtccaacttaagcaaaagttaaatgccaatccttttgccatctacaatcgtatggtggtagagcaggaggcgggctacaatgcctatgtggaacatgacgagatgacagtgatttccatgagcccagagctcttttttgagcaaaatgatcgcgagttgacaacacgaccaatgaaggggacgactcagcgtggggtaactgaccaagaagatcttgaacaggccagttggttggaacaggatcccaaaaatcgctctgaaaatatgatgattgtggacctcttgcgcaatgatatgaaccgtatttctgaagttgggagcgagcacgtggagcgtctgtgtcaggtagagcagtattcaactgtttggcagatgacttcgaccatcaagagtcagttgcgagaggatgtggaccttgttgaaatcttccgctcactctttccttgtggttccataacgggtgcaccgaaaattgcgacaatggagattatcaaggacttggagcctcaaccgcgtggagtctactgtggaacgattggtctcttgcttccaaatggacgacggatttttaatgtggccattcgtaccattcaacttcacaaaggtcaagccatttatggagttggcggagggattacttgggatagcacatgggaatctgaataccgagaggttcatcaaaaggcagcagttctctatcgtaaacaagctcgcttccaattaattacaactggaaaaatcagccaaaaacaactgatgtttgaagaacaacatctggaaaggctgagaaaagctagtcgttattttgcttttccttttgatgcagaagacttgggacacaagattgaggaagagtgtcaggattgtgaagctaatcgagattaccgcttgcgaatcagccttagcaaatctggagagatagaagtcaatcgtcaagtattaacccctctcagtacaagcttttgtcaggcccaagtctgtcttcaggaagctgctttgaatcaatcctttacctactttaaaaccactcaccgaccgcatttgagcctaggagaacaagagaagatttaccacaataagtcaggagaactgcttgaaacctctataggaaatttggttctgaaaatcgctggaaaactctacacaccgcctatccgacttggaatcttgccaggaatttaccgtcagcatttgctagaaacaggacaggtagaagagaaagtcttgaccttggcagatttaacccaagcagaagctatttacggctgtaatgcagtgagaggcttgtatgaattaagccttgaggagaac

SEQ ID NO: 1238 - protein, 573 aa, Streptococcus pneumoniae
  chorismate binding enzyme; Cellular location: cytoplasm; Similar to strain R6 sequence 15902626 (0.E+01)
MHRKTVIDFRTLGERYTFTQPIKELKTRNVEEVADLLAQVESYQEQGYYVVGYVSYEAAPAFEEKLAVHKDPLLGEYLLYFTVHDIVETSPIPLTYEDIDLPSNWQEVTSAADYEKAIAQIHHHLRQGDTYQVNYTVQLKQKLNANPFAIYNRMVVEQEAGYNAYVEHDEMTVISMSPELFFEQNDRELTTRPMKGTTQRGVTDQEDLEQASWLEQDPKNRSENMMIVDLLRNDMNRISEVGSEHVERLCQVEQYSTVWQMTSTIKSQLREDVDLVEIFRSLFPCGSITGAPKIATMEIIKDLEPQPRGVYCGTIGLLLPNGRRIFNVAIRTIQLHKGQAIYGVGGGITWDSTWESEYREVHQKAAVLYRKQARFQLITTGKISQKQLMFEEQHLERLRKASRYFAFPFDAEDLGHKIEEECQDCEANRDYRLRISLSKSGEIEVNRQVLTPLSTSFCQAQVCLQEAALNQSFTYFKTTHRPHLSLGEQEKIYHNKSGELLETSIGNLVLKIAGKLYTPPIRLGILPGIYRQHLLETGQVEEKVLTLADLTQAEAIYGCNAVRGLYELSLEEN

SEQ ID NO: 1239 - DNA, 615 bp, Streptococcus pneumoniae
atgaaattaatatttttgcatgggttagggcagtcagcagagtcttggaaagaagttcggaatctactgacagattatccttctgaggctatcgagttatttccttctggagttagtaactatcaacaagctaaagagcgagtttatcagcacctagctcaagagacagaaccttttgttttgattggattgtccttaggtgctgccctgacactagaactttccagttacgatttaccaaatcttcgagctttgattctgtcaggatgcccgcttaaattagcagggaatatcctattttatcttcaattgctgatttttaaactacttcccaaaagagtatttgaaaaacagggagcagacaagactcttatggtcggagtttctgaggagttgaagacacttgatttaacggatatagcaggaacttacccttatccaaccttactaatttgtggcagcaaagataaaccgaatcttagttctatgaaagctctccatagactgttaacagattcgcagtttcagatcattcctgatggccctcatgtcttgaataaggcaaaaccaaaggagtttgtagaaaagaccagaagtttccttgaattgctgaaa

SEQ ID NO: 1240 - protein, 205 aa, Streptococcus pneumoniae
  conserved hypothetical protein; Cellular location: membrane
MKLIFLHGLGQSAESWKEVRNLLTDYPSEAIELFPSGVSNYQQAKERVYQHLAQETEPFVLIGLSLGAALTLELSSYDLPNLRALILSGCPLKLAGNILFYLQLLIFKLLPKRVFEKQGADKTLMVGVSEELKTLDLTDIAGTYPYPTLLICGSKDKPNLSSMKALHRLLTDSQFQIIPDGPHVLNKAKPKEFVEKTRSFLELLK

SEQ ID NO: 1241 - DNA, 996 bp, Streptococcus pneumoniae
atgaataaacgtctattttcaaaaatgagtctggtgacgttgccaattttagccttgttttcacaatcagttttggcggaagaaaacatccatttttcgagctgtaaggaagcttgggcgaatggctattcggatattcacgagggagaacctggttattctgccaagttagaccgtgatcatgatggtgtggcttgcgaattgaaaaatgctcctaagggtgcttttaaagcaaaacagtcaacggctattcaaatcaacacaagttcagcaacaacaagtggttgggttaagcaggacggcgcttggtactactttgatggaaatggaaatctagtgaaaaatgcatggcagggaagctattacctgaaagctgatggtaaaatggcacagagtgaatggatttatgactcttcttatcaagcttggtattatttgaaatcagatggttcttatgcaaaaaatgcatggcaaggagcttattaccttaaatcaaacggtaaaatggcacaaggtgagtgggtttatgattcttcttaccaagcatggtattacttgaaatcagatggttcatatgctcgcaatgcatggcaaggaaactactatttgaaatcagatggtaaaatggctaaaggtgaatgggtttatgatgccacctatcaagcttggtattatttgacatcagatggttcttatgcttacagtacatggcaaggaaattactatctaaaatcggatggtaaaatggctgtcaatgaatgggttgatggtggacgttattatgttggcgctgacggagtttggaaggaagttcaagcaagtacagcttcttctagtaatgatagcaatagtgaatattctgctgctttaggaaaggcaaaaagttataattcgttattccacatgtcaaaaaaacgtatgtatagacaattaacttctgattttgataaattttcaaatgatgcagctcaatatgccattgatcatttagatgat

SEQ ID NO: 1242 - protein, 332 aa, Streptococcus pneumoniae
  pneumococcal surface protein, putative; Cellular location: outside; Feature of note: WYY motif; Similar to strain R6 sequence 15902627 (0.E+01)
MNKRLFSKMSLVTLPILALFSQSVLAEENIHFSSCKEAWANGYSDIHEGEPGYSAKLDRDHDGVACELKNAPKGAFKAKQSTAIQINTSSATTSGWVKQDGAWYYFDGNGNLVKNAWQGSYYLKADGKMAQSEWIYDSSYQAWYYLKSDGSYAKNAWQGAYYLKSNGKMAQGEWVYDSSYQAWYYLKSDGSYARNAWQGNYYLKSDGKMAKGEWVYDATYQAWYYLTSDGSYAYSTWQGNYYLKSDGKMAVNEWVDGGRYYVGADGVWKEVQASTASSSNDSNSEYSAALGKAKSYNSLFHMSKKRMYRQLTSDFDKFSNDAAQYAIDHLDD

SEQ ID NO: 1243 - DNA, 960 bp, Streptococcus pneumoniae
atgatgagtcaaaagattattgggattgaccttggtggaacttctatcaaatttgcaatcttaacaacagcaggagaaatccaaggaaaatggtcaatcaagaccaacattttggatgagggaagtcatatcgttgatgatatgattgagtctattcaacatcgtttggacttgcttggattggcagcagcggacttccaaggcattggaatgggatcaccaggtgtggttgaccgtgacaaagggactgttatcggtgcctacaacttgaactggaaaacccttcaaccaatcaaacaaaagattgaaaaagctttgggcattccatttttcatcgataatgatgccaacgtagcagctcttggtgagcgctggatgggtgctggagataaccaaccagacgttgtctttataacactcggtactggtgttggtggtggtattgtcgcagaaggcaaattgcttcatggtgttgctggtgcagcaggtgaacttggtcatatcactgttgactttgaccaaccaatctcatgtacttgtggtaaaaaaggctgccttgagacagttgcttcagcaacagggattgtcaacttgactcgtcgctatgccgatgaatacgaaggcgatgcagccttgaaacgcttgattgataacggagaagaagtaactgctaagactgtctttgatctcgcaaaagaaggagacgaccttgctttgattgtttaccgtaacttctcacgttacttgggaatcgcttgtgctaacattggttcaatcctaaacccatcaacaatcgtcatcggtggtggtgtgtcagctgcgggagaattccttctacaaggtgttcaaaaagtttacgatgaaaatagtttcccacaagtacgcacatctactaaattagctcttgcaactctaggaaatgacgctggagttatcggagcagcatcacttgtattgcaa

SEQ ID NO: 1244 - protein, 320 aa, Streptococcus pneumoniae
  glucokinase (gki); Cellular location: membrane; Similar to strain R6 sequence 15902628 (0.E+01)
MMSQKIIGIDLGGTSIKFAILTTAGEIQGKWSIKTNILDEGSHIVDDMIESIQHRLDLLGLAAADFQGIGMGSPGVVDRDKGTVIGAYNLNWKTLQPIKQKIEKALGIPFFIDNDANVAALGERWMGAGDNQPDVVFITLGTGVGGGIVAEGKLLHGVAGAAGELGHITVDFDQPISCTCGKKGCLETVASATGIVNLTRRYADEYEGDAALKRLIDNGEEVTAKTVFDLAKEGDDLALIVYRNFSRYLGIACANIGSILNPSTIVIGGGVSAAGEFLLQGVQKVYDENSFPQVRTSTKLALATLGNDAGVIGAASLVLQ

SEQ ID NO: 1245 - DNA, 837 bp, Streptococcus pneumoniae
atgacaaaagcagatacgatttttaaagagaatattgaacgcattctaaaggaaggtgttttctcagagcaggctcgtcctaagtacaaggatgggactgttgctaattccaagtatgtaactggtgccttttccgagtacgacttatctaaaggagaatttcctatcacaaccttgcgtcccattgcaatcaaatccgccatcaaagaagttctctggatttaccaagaccagtcaaatagcttagaagtgcttaatgacaagtacaatgttcactactggaatgactgggaagttggagacacgggaaccattggtgagcgctatggtgccgttgttaagaaacacgacattatcaataagcttctcaaacagttggaaaccaatccttggaaccgccgcaatattatttcgctctgggattaccaagctttcgaagaaacagatgggctgctcccgtgcgcctttcagaccatgtttgatgttcggcgtgttgatggggaaatctatctggatgcgaccttgacccagcgctccaatgatatgctggtggcccaccacatcaacgctatgcagtatgtggctttgcagatgatgattgccaaacattttggctggaaggttgggaagttcttctacttcatcaacaacctccatatctatgataatcaatttgaacaagctcaggaattgctccgtcgggagccgtcaaactgccaaccacgcttggttttaaatgttcctgatgggactaatttctttgatatcaaagcagaagattttgagttggtggattatgaccctgttaagccacagttgaagtttgacctagctatt

SEQ ID NO: 1246 - protein, 279 aa, Streptococcus pneumoniae
  thymidylate synthase (thyA); Cellular location: cytoplasm; Similar to strain R6 sequence 15902629 (e-166)
MTKADTIFKENIERILKEGVFSEQARPKYKDGTVANSKYVTGAFSEYDLSKGEFPITTLRPIAIKSAIKEVLWIYQDQSNSLEVLNDKYNVHYWNDWEVGDTGTIGERYGAVVKKHDIINKLLKQLETNPWNRRNIISLWDYQAFEETDGLLPCAFQTMFDVRRVDGEIYLDATLTQRSNDMLVAHHINAMQYVALQMMIAKHFGWKVGKFFYFINNLHIYDNQFEQAQELLRREPSNCQPRLVLNVPDGTNFFDIKAEDFELVDYDPVKPQLKFDLAI

SEQ ID NO: 1247 - DNA, 168 bp, Streptococcus pneumoniae
atggctaaaggattcgctaaaggtcttgtaacaggtgtcgcaggaactgtcgctgccgttgcaggtgcagtatacgcatttaaaaagaaagtaatcgaaccagaagagcaaaaagcagctttcatcgaagaaaaccgtaaaaaagcagctcgtcgccgcgtatcacgt

SEQ ID NO: 1248 - protein, 56 aa, Streptococcus pneumoniae
  hypothetical protein; Cellular location: outside; Similar to strain R6 sequence 15902630 (3.E-26)
MAKGFAKGLVTGVAGTVAAVAGAVYAFKKKVIEPEEQKAAFIEENRKKAARRRVSR

SEQ ID NO: 1249 - DNA, 186 bp, Streptococcus pneumoniae
atgaaagctgctttttgctcttctggttcgattactttctttttaaatgcgtatactgcacctgcaacggcagcgacagttcctgcgacacctgttacaagacctttagcgaatcctttagccatgagtcttcctcctttatattctcaatcagccagcctcctcaagaggtcacatttttctgac

SEQ ID NO: 1250 - protein, 62 aa, Streptococcus pneumoniae
  hypothetical protein
MKAAFCSSGSITFFLNAYTAPATAATVPATPVTRPLANPLAMSLPPLYSQSASLLKRSHFSD

SEQ ID NO: 1251 - DNA, 882 bp, Streptococcus pneumoniae
atgaaaacaaaaataattgtgattgttggaccgactgctgttggaaagacggctctagctattgaagttgcaaagcgttttaatggcgaagtggttagtggagatagccagcaagtctatcgaggacttgatattgggacggccaaggctagtccagaagagcaggcagctgttcctcatcatttaatcgatgttagagagataaccgagtcttactcggcttttgattttgtttcagaagctaagatgactattgagggtattcacaaccgtggcaagctagccattatcgccggtgggactggactttatatccagagcttgctagaaggttaccacctaggtggggagactcctcatgaggagattttagcttatcgagctagtttggagccatattcagatgaggaattagcccatttggtggatcaagcaggccttgagattccccagtttaatcgtcgtcgtgctatgcgtgccttagaaattgcccattttggtcaggatttggaaaatcaagagaccttgtatgaaccgctgattatctgcttggatgatgaacgtagtcaactttatgagcgtatcaaccaccgagtggatttgatgtttgaggctgggcttttggatgaggccaagtggctgtttgaccattcccctaatgtacaggctgctaaaggaattggctataaggaactctttccttatttccgtggagagcagaccttggaggaagctagtgagagtcttaaacaggcgactcgtcgttttgccaagcgtcagctgacctggttccgtaatcgcatgcaggtcaccttttatcagattggagaatctggtgtacaagaccgcattttaagccagatagaggagtttttagatgat

SEQ ID NO: 1252 - protein, 294 aa, Streptococcus pneumoniae
  tRNA isopentenylpyrophosphate transferase (miaA); Cellular location: outside; Similar to strain R6 sequence 15902632 (e-164)
MKTKIIVIVGPTAVGKTALAIEVAKRFNGEVVSGDSQQVYRGLDIGTAKASPEEQAAVPHHLIDVREITESYSAFDFVSEAKMTIEGIHNRGKLAIIAGGTGLYIQSLLEGYHLGGETPHEEILAYRASLEPYSDEELAHLVDQAGLEIPQFNRRRAMRALEIAHFGQDLENQETLYEPLIICLDDERSQLYERINHRVDLMFEAGLLDEAKWLFDHSPNVQAAKGIGYKELFPYFRGEQTLEEASESLKQATRRFAKRQLTWFRNRMQVTFYQIGESGVQDRILSQIEEFLDD

SEQ ID NO: 1253 - DNA, 1236 bp, Streptococcus pneumoniae
atgattgaaacggagaaaaaagaggagcgagtcctgctgattggtgtggaattgcagggtatggacagttttgacctctccatggaagaattggctagtttagcgaaaacggcaggggcagtcgttgtagatagctacagacaaaaacgtgaaaaatatgattccaagaccttcgtcggctctggtaagttggaagagattgcgcttatggtggatgcagaagaaatcactactgtcatcgtcaacaatcgtctgaccccaaggcagaatgtcaatctagaggaagttctcggtgttaaggtcattgaccgtatgcagttgattttggatatctttgccatgcgggctcgaagccatgaagggaagctccaagtccacctagcccaactcaaataccttttgcctcgcttggttggtcaggggattatgctcagccgtcaggcagggggaattggttcccgtggtcctggtgaaagccagctggagctgaaccgtcgtagcgttcgcaatcaaatcacggatatcgagcgccagctcaaggtggttgagaaaaatcgtgcgactgtcagagaaaaacgtttggagtctagcacttttaagattggtttgattggttatactaatgctgggaaatcaactatcatgaacatcttgaccagtaagacccagtatgaagcagatgagctctttgcgactctggatgcgacaaccaagagtattcatctgggaggcaatctccaagtaactttgacagataccgttggctttatccaagatttgccgacagagttggtgtccagtttcaagtcaaccttggaagaaagcaagcatgtggaccttctggttcatgttatcgatgctagcaatccttaccacgaggagcatgaaaaaacggttctctccatcatgaaagacctggacatggaagatattcctcacttgacgctttataataaagcggatttggtggaggatttcacgcctacccaaacgccatataccctcatttctgccaagtctgaggacagtcgtgaaaacttgcaagcattattgctagataagattaaggaaatttttgaagcatttaccctgcgagtgcctttttcaaagtcctacaagattcatgatttagagagtgttgcaattctggaagaacgtgattatcaggaagacggcgaagtgattacaggctacatttccgagaaaaataaatggaggttagaagaattttatgac

SEQ ID NO: 1254 - protein, 412 aa, Streptococcus pneumoniae
  GTP-binding protein HflX (hflX); Cellular location: cytoplasm; Similar to strain R6 sequence 15902633 (0.E+01)
MIETEKKEERVLLIGVELQGMDSFDLSMEELASLAKTAGAVVVDSYRQKREKYDSKTFVGSGKLEEIALMVDAEEITTVIVNNRLTPRQNVNLEEVLGVKVIDRMQLILDIFAMRARSHEGKLQVHLAQLKYLLPRLVGQGIMLSRQAGGIGSRGPGESQLELNRRSVRNQITDIERQLKVVEKNRATVREKRLESSTFKIGLIGYTNAGKSTIMNILTSKTQYEADELFATLDATTKSIHLGGNLQVTLTDTVGFIQDLPTELVSSFKSTLEESKHVDLLVHVIDASNPYHEEHEKTVLSIMKDLDMEDIPHLTLYNKADLVEDFTPTQTPYTLISAKSEDSRENLQALLLDKIKEIFEAFTLRVPFSKSYKIHDLESVAILEERDYQEDGEVITGYISEKNKWRLEEFYD

SEQ ID NO: 1255 - DNA, 621 bp, Streptococcus pneumoniae
atgactgatattaaaactttggctctaaagtatggaggttatacaagtctggacaaggtctatctggatcagcttctagctggtaaaacagatcaggagcagttaacacttattacacctccgccaagtgttgttaatgcctactttgcagaactctatcagaaaaagagtcctcaggctgcgacggattattttgcagaactcagtcaggaactgaatctttacaatactgagccaagtttcaccctagaaaataagccttttattcggcttaatctgtctggtaaatcctttggtttttgttatgagagtgacggccttggtcggattttctttgaaaatgaggagaaaatctcggatgacttgctctttgaaattgcgcaaattttcccccatcaattagtctttgaagagtctggtaagatttacatgaagcctgtcgaggacgaggaagttatcagcctagaaagtctcacagctttgactgatttggaaagattggctgatggtcgaaaacgtctcaaaggctacagccaagaggatttattgcaagaagctgctgctttttctggcaaacgctatttccgatcggaaaaccgcacagccatgttatatattgat

SEQ ID NO: 1256 - protein, 207 aa, Streptococcus pneumoniae
  hypothetical protein; Cellular location: cytoplasm; Similar to strain R6 sequence 15902634 (e-115)
MTDIKTLALKYGGYTSLDKVYLDQLLAGKTDQEQLTLITPPPSVVNAYFAELYQKKSPQAATDYFAELSQELNLYNTEPSFTLENKPFIRLNLSGKSFGFCYESDGLGRIFFENEEKISDDLLFEIAQIFPHQLVFEESGKIYMKPVEDEEVISLESLTALTDLERLADGRKRLKGYSQEDLLQEAAAFSGKRYFRSENRTAMLYID

SEQ ID NO: 1257 - DNA, 927 bp, Streptococcus pneumoniae
atggatattcaatttttaggaacgggggctggtcagccctctaaagcccgcaacgtttcaagtctcgccctgaaacttttggatgagattaacgaagtttggctctttgactgtggagaaggtacgcaaaatcgcattctggaaaccacaattcgaccacgtaaggtcagcaaaatctttattacccatctgcatggagaccacatttttggtttgccaggtttcctttctagccgtgcctttcaggccaatgaagagcagacagatttggaaatctacggacctcaaggaatcaagtcatttgtcttaaccagccttcgtgtgtcaggttctcgtctgccctaccgcattcatttccatgagtttgaccaagattctctgggtaaaattcttgaaaccgataaattcactgtgtatgcagaggagctggaccacactattttctgtgttggctatcgtgtcatgcaaaaggatctagaagggacgctggatgctgaaaaactcaaggctgctggtgttccgttcggcccgctttttggtaaaatcaaaaacggccaggatcttgttttggaagacggaactgaaatcaaggcagcagactatatctcagcgccacgtccaggtaagattatcactattttaggagacactcgaaaaacgggtgccagtgtgcgtctggctgtcaatgcagatgtcctagttcatgagtccacttatggcaagggtgatgaaaaaattgctcgtaaccatggtcactcaactaatatgcaagctgcacaagtagcggtagaagcaggtgccaaacgcctcctactcaaccatatcagtgcccgtttcctctcaaaagatattagcaaactcaagaaagacgctgccacaatttttgaaaatgtccatgtggtcaaagacttggaagaagtggaaatc

SEQ ID NO: 1258 - protein, 309 aa, Streptococcus pneumoniae
  metallo-beta-lactamase superfamily protein; Cellular location: cytoplasm; Similar to strain R6 sequence 15902635 (e-176)
MDIQFLGTGAGQPSKARNVSSLALKLLDEINEVWLFDCGEGTQNRILETTIRPRKVSKIFITHLHGDHIFGLPGFLSSRAFQANEEQTDLEIYGPQGIKSFVLTSLRVSGSRLPYRIHFHEFDQDSLGKILETDKFTVYAEELDHTIFCVGYRVMQKDLEGTLDAEKLKAAGVPFGPLFGKIKNGQDLVLEDGTEIKAADYISAPRPGKIITILGDTRKTGASVRLAVNADVLVHESTYGKGDEKIARNHGHSTNMQAAQVAVEAGAKRLLLNHISARFLSKDISKLKKDAATIFENVHVVKDLEEVEI

SEQ ID NO: 1259 - DNA, 753 bp, Streptococcus pneumoniae
atgcctactattctcattaccggagctagcggtggtctagctcaagaaatggtcaaactcctgcccaatgaccaactcatcttgcttggtagaaataaggaaaaattagcccaactctacggaaattattcccatgcagaattgattgaaattgatattaccgacgattcagccctagaagctctggtaactgatctttatctccgctatggcaagattgatgtcttgattaacaacgctggttacgggatttttgagggatttgaccagattgctgataaagatattcaccagatgtttgaggtcaatacctttgccctgatgaatctgtctcgtcaccttgcggctcgtatgaaggaaagcagcaaagggcatatcatcaacatcgtcagcatggcaggtctaatagctactggcaagtctagtctttactcagcgaccaagtttgcggctattggtttttcaaatgctctgcgactcgaacttatgccctatggagtctatgtgacaacagtcaatccaggaccaatccgtacaggatttttcgaccaagccgacccagatggaacttatcttaaatcggttgatcgcttcctgctagaaccagatgcagtggctaaaaagattgtcaagattataggaaaaaacaaacgagaactcaatctcccgattttgttgaacctagcccataagttttatactctctttcccaagctagctgataagttggcaggggaaacttttaattataag

SEQ ID NO: 1260 - protein, 251 aa, Streptococcus pneumoniae
  oxidoreductase, short chain dehydrogenase/reductase family; Cellular location: cytoplasm; Similar to strain R6 sequence 15902636 (e-141)
MPTILITGASGGLAQEMVKLLPNDQLILLGRNKEKLAQLYGNYSHAELIEIDITDDSALEALVTDLYLRYGKIDVLINNAGYGIFEGFDQIADKDIHQMFEVNTFALMNLSRHLAARMKESSKGHIINIVSMAGLIATGKSSLYSATKFAAIGFSNALRLELMPYGVYVTTVNPGPIRTGFFDQADPDGTYLKSVDRFLLEPDAVAKKIVKIIGKNKRELNLPILLNLAHKFYTLFPKLADKLAGETFNYK

SEQ ID NO: 1261 - DNA, 996 bp, Streptococcus pneumoniae
ttgtgtttttttcaagaagagactcacacaatgctccttattttcctatcttctttagcgattctaaggcaagtatggtacaataaaaacatgagaattcaacaattacattatattatcaaaatcgtcgaaactggctccatgaatgaggcagccaagcaactctttatcactcagccaagtctctccaatgcagtgcgagatttggaaaatgaaatgggcattgagatctttatccgcaatcccaagggaatcaccttgacccgtgatggcatggagtttctctcttatgcccgtcaggttgtcgagcagacccagcttctggaggaacgctataaaaatcctgtcgcccaccgcgaactctttagcgtttcgtctcaacactatgcctttgtggtcaatgcctttgtctctttgctcaagaaaagcgatatggagaaatacgaactcttccttcgtgaaactcggacttgggagattatcgacgacgtcaagaacttccgcagtgaggtcggggtcctcttcttaaacagttacaaccgtgatgttttaaccaagatgctggatgacaatcacctgctagcccaccatctcttcacagcgcaaccgcatatctttgtcagcaagaccaaccctctggcaaagaaagacaaggtgaaactgtctgatttggagaatttcccttacctcagctatgaccaagggacgcacaactccttctacttttcagaagagattctttctcaagaacaccacaagaaatccattgtggtcagtgaccgtgccaccctctttaatctcttgattggtttggatggttataccattgcgacagggattttgaacagcaacctaaacggagacaatatcgtttctatcccactggatattgatgacccgatcgagctggtctatatccagcatgagaaaaccagcctatctaagatgggcgaacgctttatagactatctcctagaagaagttcagtttgatagt

SEQ ID NO: 1262 - protein, 332 aa, Streptococcus pneumoniae
  transcriptional regulator, putative; Cellular location: cytoplasm; Similar to strain R6 sequence 15902637 (0.E+01)
MCFFQEETHTMLLIFLSSLAILRQVWYNKNMRIQQLHYIIKIVETGSMNEAAKQLFITQPSLSNAVRDLENEMGIEIFIRNPKGITLTRDGMEFLSYARQVVEQTQLLEERYKNPVAHRELFSVSSQHYAFVVNAFVSLLKKSDMEKYELFLRETRTWEIIDDVKNFRSEVGVLFLNSYNRDVLTKMLDDNHLLAHHLFTAQPHIFVSKTNPLAKKDKVKLSDLENFPYLSYDQGTHNSFYFSEEILSQEHHKKSIVVSDRATLFNLLIGLDGYTIATGILNSNLNGDNIVSIPLDIDDPIELVYIQHEKTSLSKMGERFIDYLLEEVQFDS

SEQ ID NO: 1263 - DNA, 219 bp, Streptococcus pneumoniae
atgaaaacattctatgatgtgcagcaattcctcaaacgatttggtattattgtttacatgggaaaacgcttatatgatattgaactgatgaagttggaactatctcggatttacgatgcagggttgatggataaattagactatctagaggcagaagcagttcttcgcagagagcacaaggtagaattggattatattgagaaaaatggagaaaagaac

SEQ ID NO: 1264 - protein, 73 aa, Streptococcus pneumoniae
  conserved hypothetical protein; Cellular location: cytoplasm; Similar to strain R6 sequence 15902638 (6.E-38)
MKTFYDVQQFLKRFGIIVYMGKRLYDIELMKLELSRIYDAGLMDKLDYLEAEAVLRREHKVELDYIEKNGEKN

SEQ ID NO: 1265 - DNA, 378 bp, Streptococcus pneumoniae
atggttacttggattttgtgggcacttatactagcaatgttggcgtggatgggctttaactatcttcgtattcgccgtgcggctaaaattgtggacaatgaggagtttgaagccttgattcgtacgggtcaattgattgatttgcgcgacccagcagaattccacagaaaacatatccttggtgcacgcaatattccttcaagtcagttgaaaactagtcttgcagcccttcgtaaagataaacctgtccttctctacgaaaaccaacgtgcgcaacgagttacaaatgcagctctttacttgaaaaaacaaggtttttctgagatttatatcctttcttatggcttggattcttggaaagggaaagtgaagactagc

SEQ ID NO: 1266 - protein, 126 aa, Streptococcus pneumoniae
  conserved hypothetical protein; Cellular location: outside; Similar to strain R6 sequence 15902639 (5.E-69)
MVTWILWALILAMLAWMGFNYLRIRRAAKIVDNEEFEALIRTGQLIDLRDPAEFHRKHILGARNIPSSQLKTSLAALRKDKPVLLYENQRAQRVTNAALYLKKQGFSEIYILSYGLDSWKGKVKTS

SEQ ID NO: 1267 - DNA, 195 bp, Streptococcus pneumoniae
gtgggtatcttgtcgattattcttggtttgttatttccaattgtaggcctgattttgggtatcataggattggtcttggctatttcataccaaaaagagtcacaattagactataaaatagaaaagattcttaatatcttaggaattgtgatttctgtagttaactggattgtagcaatcgccttaatttttcgg

SEQ ID NO: 1268 - protein, 65 aa, Streptococcus pneumoniae
  hypothetical protein; Cellular location: outside; Similar to strain R6 sequence 15902640 (2.E-30)
MGILSIILGLLFPIVGLILGIIGLVLAISYQKESQLDYKIEKILNILGIVISVVNWIVAIALIFR

SEQ ID NO: 1269 - DNA, 723 bp, Streptococcus pneumoniae
atgcgtttagataatttattagctcaagaaaaaatcagccgaaaggccatgaagcaagcactcctcagaggggaaattctagtcgatggttgcccagcccgctccctagctcaaaatatcgatacaggactacaagaactcctttttcaggatcgaatcattcaaggctatgaacacacctatcttatgcttcataaacctgctggtgccgttacagccaacaaagacaaggaacttccgaccgtcatggacctgcttccatctaacatccagtctgacaagctctatgccgttggccgactggaccgagatacaacgggactcctcctcttgaccgataacggtcccttgggctttcagctcctccatccccaatatcatgtcgataagacttaccaagttgaggttaatggacttctaacacctgaccatatccaaacctttcaaaaaggaattgtctttttagatgacactgtctgtaaacccgcaaaactagagattctatctgcaagtccctccctcagtcaagcctctatcaccatttcagaaggaaaatttcatcaaatcaagaaaatgttcctctcggttggtgttaaggtgactagcctcaaaagaatccaatttggggacttcacattgaacccagatttagcagaaggtaactaccgccctttgaaccaaaaagagttacaaatcattaaaaactatttagagatgagtcga

SEQ ID NO: 1270 - protein, 241 aa, Streptococcus pneumoniae
  ribosomal small subunit pseudouridine synthase A (rsuA); Cellular location: cytoplasm; Similar to strain R6 sequence 15902641 (e-132)
MRLDNLLAQEKISRKAMKQALLRGEILVDGCPARSLAQNIDTGLQELLFQDRIIQGYEHTYLMLHKPAGAVTANKDKELPTVMDLLPSNIQSDKLYAVGRLDRDTTGLLLLTDNGPLGFQLLHPQYHVDKTYQVEVNGLLTPDHIQTFQKGIVFLDDTVCKPAKLEILSASPSLSQASITISEGKFHQIKKMFLSVGVKVTSLKRIQFGDFTLNPDLAEGNYRPLNQKELQIIKNYLEMSR

SEQ ID NO: 1271 - DNA, 1860 bp, Streptococcus pneumoniae
ttgaatattatagaggaaatcatgacaaaattaagagaagatatccgtaacattgcgattatcgcccacgttgaccacggtaaaacaaccctggttgacgaattattgaaacaatcagaaacgcttgatgcacggactgaattggcagagcgtgctatggactcaaacgatatcgaaaaagagcgtggaattaccatccttgctaaaaatactgccgttgcttacaacggaactcgtatcaacattatggacacaccaggacacgcggactttggtggagaagttgagcgtatcatgaaaatggttgacggtgttgtcttggtcgtagatgcctatgaaggaaccatgccacaaactcgtttcgtattgaaaaaagccttggaacaagaccttgtcccaatcgtggttgttaacaaaatcgataagccatcagctcgtccagcagaagtagtggatgaagtcttggaacttttcatcgagcttggtgcagatgacgaccagcttgatttcccagtggtttatgcttcagcgatcaacggaacttcttcattgtcagatgatccagctgaccaagaagcgactatggcaccaatctttgacacgattatcgaccatatcccagctccagtagataactcagatgagcctttgcagttccaagtgtcacttttggactacaatgacttcgttggacgtatcggtatcggtcgtgtcttccgtggtacagttaaggttggggaccaagttaccctttctaaacttgacggtacaactaaaaacttccgtgttacaaaactcttcggtttctttggtttggaacgtcgtgaaatccaagaagccaaagcgggtgacttgattgccgtttcaggtatggaagacatctttgtcggtgaaaccatcactccgacagatgcagtagaagctcttccaatcctacacatcgatgagccaactcttcaaatgactttcttggtcaacaactcaccatttgctggtaaagaaggtaaatgggtaacttctcgtaaggtggaagaacgcttgcaggcagaattgcaaacagacgtttcccttcgtgttgacccaactgattcaccagataaatggactgtttcaggacgtggagaattgcacttgtcaatccttatcgaaacaatgcgtcgtgagggctatgaacttcaagtatctcgtccagaagttatcgtaaaagaaatcgacggtattaaatgtgaaccatttgaacgtgtacaaatcgacactccagaagaataccaagggtctgttatccaaagcctttctgaacgtaaaggtgaaatgttggatatgatttcaactggtaatggtcaaactcgtttggtcttccttgttccagcgcgtggtttgattggatactcaactgagttcttatcaatgactcgtggttacggtatcatgaaccataccttcgaccaatacttgccattgattccaggggaaattggtggacgtcaccgtggtgcccttgtttctatcgatgctggtaaggctacaacttactcaatcatgtctatcgaagaacgtggtacgatctttgtcaacccaggtactgaggtttatgaaggaatgatcatcggtgaaaactctcgtgaaaatgacttgacagttaacatcacgaaggcaaaacaaatgaccaacgttcgttcagctactaaggaccaaacagctgttatcaagacgcctcgtatcttgacacttgaagagtctcttgagttcttgaacgacgatgagtacatggaagtaacgcctgagtctatccgtttgcgtaaacaaatccttaacaaagcagagcgtgagaaagctaacaagaagaaaaaatcagctgaa

SEQ ID NO: 1272 - protein, 620 aa, Streptococcus pneumoniae
  elongation factor Tu family protein; Cellular location: cytoplasm; Similar to strain R6 sequence 15902642 (0.E+01)
MNIIEEIMTKLREDIRNIAIIAHVDHGKTTLVDELLKQSETLDARTELAERAMDSNDIEKERGITILAKNTAVAYNGTRINIMDTPGHADFGGEVERIMKMVDGVVLVVDAYEGTMPQTRFVLKKALEQDLVPIVVVNKIDKPSARPAEVVDEVLELFIELGADDDQLDFPVVYASAINGTSSLSDDPADQEATMAPIFDTIIDHIPAPVDNSDEPLQFQVSLLDYNDFVGRIGIGRVFRGTVKVGDQVTLSKLDGTTKNFRVTKLFGFFGLERREIQEAKAGDLIAVSGMEDIFVGETITPTDAVEALPILHIDEPTLQMTFLVNNSPFAGKEGKWVTSRKVEERLQAELQTDVSLRVDPTDSPDKWTVSGRGELHLSILIETMRREGYELQVSRPEVIVKEIDGIKCEPFERVQIDTPEEYQGSVIQSLSERKGEMLDMISTGNGQTRLVFLVPARGLIGYSTEFLSMTRGYGIMNHTFDQYLPLIPGEIGGRHRGALVSIDAGKATTYSIMSIEERGTIFVNPGTEVYEGMIIGENSRENDLTVNITKAKQMTNVRSATKDQTAVIKTPRILTLEESLEFLNDDEYMEVTPESIRLRKQILNKAEREKANKKKKSAE

SEQ ID NO: 1273 - DNA, 252 bp, Streptococcus pneumoniae
atggtctatttagtcctaggaattttactgctcctactctatgtatttgcgacaccagaaagcattaaagggactgtcaatatcgtcgctatggtatgtattttagtggcactcttgattttattggttctatcttttctgaaaatttttcaattaccaacagaaatattcctagcaatagccatgttgatcctagcttactttagtgttagagacatcacactcatgccagtcaaaaaaagtaaaagaaga

SEQ ID NO: 1274 - protein, 84 aa, Streptococcus pneumoniae
  hypothetical protein; Cellular location: membrane; Similar to strain R6 sequence 15902643 (1.E-40)
MVYLVLGILLLLLYVFATPESIKGTVNIVAMVCILVALLILLVLSFLKIFQLPTEIFLAIAMLILAYFSVRDITLMPVKKSKRR

SEQ ID NO: 1275 - DNA, 96 bp, Streptococcus pneumoniae
ttgaaaccgctttcttatgtgataagaataacttttttattatttgttgtcaaggaaaaaatcgaattttttagatattttactatattacctctg

SEQ ID NO: 1276 - protein, 32 aa, Streptococcus pneumoniae
  hypothetical protein
MKPLSYVIRITFLLFVVKEKIEFFRYFTILPL

SEQ ID NO: 1277 - DNA, 93 bp, Streptococcus pneumoniae
atggaggagtatggacatatggagaaggttcaggaggtggttaggctttttcaaattactatcatggtaaaaaatatcattattcatctatcg

SEQ ID NO: 1278 - protein, 31 aa, Streptococcus pneumoniae
  hypothetical protein; Cellular location: cytoplasm
MEEYGHMEKVQEVVRLFQITIMVKNIIIHLS

SEQ ID NO: 1279 - DNA, 90 bp, Streptococcus pneumoniae
gtgagcagatgggatggtcattctgataaaggagaagctcctgctggaaaacctcctatgcatggatttggactaaatggggagaacaag

SEQ ID NO: 1280 - protein, 30 aa, Streptococcus pneumoniae
  hypothetical protein; Cellular location: cytoplasm; Similar to strain R6 sequence 15902644 (9.E-06)
MSRWDGHSDKGEAPAGKPPMHGFGLNGENK

SEQ ID NO: 1281 - DNA, 2019 bp, Streptococcus pneumoniae
atgaagaaactattcatattattatcaactttttttctcagcttcttccttgcttggattattgtcttacgtgcgccacaatatttatatgcaagctatgattccgtttctttacttcgtgtcaaaaaagatactcaggaaccgacgcgtgaggtatttgaacaggaattggagaattttgcaaactcagaacagagtttaatagctagaagaattgtagagccgagtaaggatgggacgactcactttacttatgcaacttatggtcagggaactttaccaaaagaattccaagaagctagccaagaaagtcgtgaacgtagtgatccgctaaatagttatctccttttgtcaggctccttgacgaaagaaaagcttgccgataaattaggagatttgggttataaagcaagtgctgaccgaaagataccgccctattttcttgcttttcgaatattactaaatccccttattttaattagtttagcaatatttggcttatctttctttgctttagtgattatcactcggattaaggaaatgagagcagcaggtataaaactcttttctggtcagactctcttatccatcatggggcattctttatctactgatatcaaatggctccttctatcagccctcctttccttcctaggtgggggagtcgttctttttagtcaaggtttgttttatcctatcttgttagccacctatggttttgggattagtttctatctgttgtttttattggcgatttcaattttactaatgctcctttacctaatgagtttgagttacaaagcattagttcccgttattaagggaagattaccccttaaacgcttgatggctttaaccctattgtgtcagttagtagctgtttttacagtaggctacgctgttaagacaggtttgacgtcttaccaacgattgaaagaacttgaaatttcaaaacaagcatggcaggacagagcagactattaccagatttcctttggcttaggtgatagaggaaaagatacagaaaatcagagcaagtggtatgcctttgccaaggaagcaatcgaagaagaacaagctctttatgtaaaggataatctgctccattttgccaatccacaaggaaaaaatgaacagggagagacactggatacctatagttcagatgctaatacgctctatgttagtcccagttatttggacaaggaaaaggtcgtggtagatgctgagaccaaacagaagttagcccatctccaaaaaggtgagtttatcctcttgctcccagaacatttgcgctctcgagaagcagaacttaagaaagtttttgaagaaagattgagttattatggaaaatctggtgaggaggcaagtgctcctttggattatgagatgaaagcgcacgttagttatctttcaatgggagaaaagcggtttgtttataataacggtgagaatcccgtatctactcagtatttgactgatccgattttagtggtattcacgccgacttctacaggtgatagttttatatccttatctagttggtctatcaatgctggaaaacaactctttatcaaaggatatgagagtgggctagaactcttgaagaaagctggaatttatgagcaagtatcctatcttaaagaaggaagaagtgtttatctaactcgttataatgaagttcaaactgaaacagcaactttaatcttaggagctattgttggaatagccagttccttgttactcttttattctgtcaatcttctatatttcgagcaattccgccgagatatcttgattaaacgaatttcaggtttacgattttttgaaacacatgctcagtatatggttagccaatttgctagttttgtatttggtgctagtctctttattttaagcagtcgagacttggtgattggcttgctcactttattggtctttctagctagtgcagttttgacgctttaccgtcaagcgcagaaagaatctcgtgtttctatgacaattatgaaaggaaaa

SEQ ID NO: 1282 - protein, 673 aa, Streptococcus pneumoniae
  conserved hypothetical protein; Cellular location: membrane; Similar to strain R6 sequence 15902645 (0.E+01)
MKKLFILLSTFFLSFFLAWIIVLRAPQYLYASYDSVSLLRVKKDTQEPTREVFEQELENFANSEQSLIARRIVEPSKDGTTHFTYATYGQGTLPKEFQEASQESRERSDPLNSYLLLSGSLTKEKLADKLGDLGYKASADRKIPPYFLAFRILLNPLILISLAIFGLSFFALVIITRIKEMRAAGIKLFSGQTLLSIMGHSLSTDIKWLLLSALLSFLGGGVVLFSQGLFYPILLATYGFGISFYLLFLLAISILLMLLYLMSLSYKALVPVIKGRLPLKRLMALTLLCQLVAVFTVGYAVKTGLTSYQRLKELEISKQAWQDRADYYQISFGLGDRGKDTENQSKWYAFAKEAIEEEQALYVKDNLLHFANPQGKNEQGETLDTYSSDANTLYVSPSYLDKEKVVVDAETKQKLAHLQKGEFILLLPEHLRSREAELKKVFEERLSYYGKSGEEASAPLDYEMKAHVSYLSMGEKRFVYNNGENPVSTQYLTDPILVVFTPTSTGDSFISLSSWSINAGKQLFIKGYESGLELLKKAGIYEQVSYLKEGRSVYLTRYNEVQTETATLILGAIVGIASSLLLFYSVNLLYFEQFRRDILIKRISGLRFFETHAQYMVSQFASFVFGASLFILSSRDLVIGLLTLLVFLASAVLTLYRQAQKESRVSMTIMKGK

SEQ ID NO: 1283 - DNA, 639 bp, Streptococcus pneumoniae
atgattgaactaaagaatatatctaaaaaatttggaagccgtcagctattttcagatatgaatcttcattttgaaggtgggaaaatttatgccttaatcggtacaagtggctgtggtaagacaacactcttgaatatgattggacgattggagccatatgacaaagggcaaatcatctatgatggcacttctcttaaggacatcaagccttctgttttctttagagattacttaggatacttatttcaagattttggcttaattgaaagccaaaccgtcaaagagaatctcaatctgggtttagttggtaaaaagttgaaggaaaaagagaaaatctctttgatgaaacaagctctaaaccgtgtaaacctctcttatttggatttgaagcaacctatatttgagttatcaggaggagaagcacaacgtgttgcactagcgaagataattttaaaggatccacctttgatcctcgcagatgaaccaaccgcttccttagaccccaaaaactctgaggaattactttccatcctagaatctttaaaaaatccgaatcggaccattattattgcgacccataatcctctgatttgggagcaagtggatcaggtcattcgagttaccgatttatcacataga

SEQ ID NO: 1284 - protein, 213 aa, Streptococcus pneumoniae
  ABC transporter, ATP-binding protein; Cellular location: cytoplasm; Similar to strain R6 sequence 15902646 (e-118)
MIELKNISKKFGSRQLFSDMNLHFEGGKIYALIGTSGCGKTTLLNMIGRLEPYDKGQIIYDGTSLKDIKPSVFFRDYLGYLFQDFGLIESQTVKENLNLGLVGKKLKEKEKISLMKQALNRVNLSYLDLKQPIFELSGGEAQRVALAKIILKDPPLILADEPTASLDPKNSEELLSILESLKNPNRTIIIATHNPLIWEQVDQVIRVTDLSHR

SEQ ID NO: 1285 - DNA, 1350 bp, Streptococcus pneumoniae
atgaaagtaatagatcaatttaaaaataagaaagtccttgttttaggtttggccaagtctggtgaatctgcagctcgtttgttggacaagctaggtgccattgtgacagtaaatgatgggaaacctttcgaggacaatccagctgcccaaagtttgctggaagaagggatcaaggtcattacaggtggccatcctttggaactcttggatgaagagtttgcccttatggtgaaaaatccaggtatcccctacaacaatcccatgattgaaaaggctttggccaagggaattccagtcttgactgaggtggaattggcttatttgatttcagaagcaccgattattggtatcacaggatcgaacggtaagacaaccacaacgactatgattggggaagttttgactgctgctggccaacatggtcttttatcagggaatatcggctatccagctagtcaggttgctcaaatagcatcagataaggacacgcttgttatggaactttcttctttccaactcatgggtgttcaagaattccatccagagattgcggttattaccaacctcatgccaactcatatcgactaccatgggtcattttcggaatatgtagcagccaagtggaatatccagaacaagatgacagcagctgatttccttgtcttgaactttaatcaagacttggcaaaagacttgacttccaagacagaagccactgttgtaccattttcaacacttgaaaaggttgatggagcttatctggaagatggtcaactctacttccgtggtgaagtagtcatggcagcgaatgaaatcggtgttccaggtagccacaatgtggaaaatgcccttgcgactattgctgtagccaagcttcgtgatgtggacaatcaaaccatcaaggaaactctttcagccttcggtggtgtcaaacaccgtctccagtttgtggatgacatcaagggtgttaaattctataacgacagtaaatcaactaatatcttggctactcaaaaagccttgtcaggatttgacaacagcaaggtcgtcttgattgcaggtggtttggaccgtggcaatgagtttgacgaattggtgccagacattactggactcaagaagatggtcatcctgggtcaatctgcagaacgtgtcaaacgggcagcagacaaggctggtgtcgcttatgtggaggcgacagatattgcagatgcgacccgcaaggcctatgagcttgcgactcaaggagatgtggttcttcttagtcctgccaatgctagctgggatatgtatgctaactttgaagtacgtggcgacctctttatcgacacagtagcggagttaaaagaa

SEQ ID NO: 1286 - protein, 450 aa, Streptococcus pneumoniae
  UDP-N-acetylmuramoylalanine--D-glutamate ligase (murD); Cellular location: outside; Similar to strain R6 sequence 15902647 (0.E+01)
MKVIDQFKNKKVLVLGLAKSGESAARLLDKLGAIVTVNDGKPFEDNPAAQSLLEEGIKVITGGHPLELLDEEFALMVKNPGIPYNNPMIEKALAKGIPVLTEVELAYLISEAPIIGITGSNGKTTTTTMIGEVLTAAGQHGLLSGNIGYPASQVAQIASDKDTLVMELSSFQLMGVQEFHPEIAVITNLMPTHIDYHGSFSEYVAAKWNIQNKMTAADFLVLNFNQDLAKDLTSKTEATVVPFSTLEKVDGAYLEDGQLYFRGEVVMAANEIGVPGSHNVENALATIAVAKLRDVDNQTIKETLSAFGGVKHRLQFVDDIKGVKFYNDSKSTNILATQKALSGFDNSKVVLIAGGLDRGNEFDELVPDITGLKKMVILGQSAERVKRAADKAGVAYVEATDIADATRKAYELATQGDVVLLSPANASWDMYANFEVRGDLFIDTVAELKE

SEQ ID NO: 1287 - DNA, 1056 bp, Streptococcus pneumoniae
atgaaaaaaattgtctttacaggtggggggacggttggacacgttaccctcaatcttttgttaatgcccaagttcatcgaagatggttgggaagtccactatatcggggacaagtgtggtatcgaacaccaagaaatccttaagtcaggtttggatgtcaccttccattctattgcgactggaaaattgcgtcgctatttctcttggcaaaatatgctggacgtcttcaaagttggttggggaattgtccaatcgctctttatcatgttgcgactgcgtccacagacccttttttcaaaggggggctttgtctcagtaccgcctgttatcgctgcgcgtgtgtcaggagtgcctgtctttattcacgaatctgacctgtctatgggcttggccaataaaatcgcctataaatttgcgactaagatgtattcaacctttgaacaagcttcgagtttggctaaggttgagcatgtgggagcggtgaccaaggtttcggacaaaaacactccagaaccagatgaattggtggatattcaaacccactttaatcccaaattgccaactgtattgtttgttggcggttctgcaggcgctcgtgtctttaaccaattggtgacagaccataagaaagaactaacagagcgctacaatattatcaatctaactggagattctagtctgaatgagttgaggcaaaatctttttcgtgttgactatgtgaccgatctctatcaacccttgatggaattggctgatattgttgtgacacgaggtggtgccaatacgatttttgagctcttggcgatagcaaaattgcatgtcattgtgccgcttggtcgtgaagctagtcgtggtgaccagattgaaaatgcagcttactttgttaagaaaggctatgcagaagaccttcaagaaagcgatttgaccttggatagtttggaagagaagctttctcacttactaagtcacaaggaagattaccaagctaagatgaaagcttctaaggaattgaaatctctagcagatttttatcaattgttgaaaaaagatttatca

SEQ ID NO: 1288 - protein, 352 aa, Streptococcus pneumoniae
  UDP-N-acetylglucosamine--N-acetylmuramyl-(pentapeptide) pyrophosphoryl-; Cellular location: membrane; Similar to strain R6 sequence 15902648 (0.E+01)
MKKIVFTGGGTVGHVTLNLLLMPKFIEDGWEVHYIGDKCGIEHQEILKSGLDVTFHSIATGKLRRYFSWQNMLDVFKVGWGIVQSLFIMLRLRPQTLFSKGGFVSVPPVIAARVSGVPVFIHESDLSMGLANKIAYKFATKMYSTFEQASSLAKVEHVGAVTKVSDKNTPEPDELVDIQTHFNPKLPTVLFVGGSAGARVFNQLVTDHKKELTERYNIINLTGDSSLNELRQNLFRVDYVTDLYQPLMELADIVVTRGGANTIFELLAIAKLHVIVPLGREASRGDQIENAAYFVKKGYAEDLQESDLTLDSLEEKLSHLLSHKEDYQAKMKASKELKSLADFYQLLKKDLS

SEQ ID NO: 1289 - DNA, 1197 bp, Streptococcus pneumoniae
atgtcaaaagataagaaaaatgaggacaaagaaaccctcgaagaattgaaagagttatcagaatggcagaaacgaaaccaagaatatctaaaaaagaaggctgaagaagaggcggctctagctgaggagaaggaaaaggaaagacaagctcgaatgggagaagaatctgagaagtcagaggataaacaggaccaggagagtgaaacagaccaggaagattcagaatcagctaaggaagagtctgaagaaaaagtagcatcctcagaggctgacaaagagaaagaagagaaagaagaaccagagtctaaagagaaggaggaacaggataaaaagcttgctaaaaaggctacaaaggaaaaaccagccaaagcaaagattcctggtatccatatcttgcgagccttcacgattttatttccaagtctgcttctattgtttgtctctgcctacttgctcagtccttatgcgaccatgaaagatattcgtgttgagggaacggtgcaaactacagctgatgatattcgacaggcttcaggcattcaggattcggattatacgattaaccttctgctagacaaggcaaaatatgaaaagcagattaagtctaactattgggttgaatcagctcaacttgtctatcaatttccaactaagttcactattaaggtcaaggaatatgatattgtggcctactatatttctggtgaaaatcattatcctattctttccagtggtcagcttgagactagttctgtgagtctgaacagtttaccagaaacttatttatcagttctctttaatgatagtgaacaaatcaaagtttttgtctcagaacttgctcaaattagcccagaactcaaggcggctatccaaaaggtggaattagccccaagcaaggtgacatccgatttaattcgattgaccatgaatgattcggacgaagtcttggttcctctatctgaaatgagtaagaaactgccatattacagtaagattaagcctcaattgtcagaaccgagtgtggtcgacatggaagctggaatctacagctacactgtggcggataaattaattatggaagctgaggaaaaagccaaacaagaggccaaggaagctgagaaaaaacaagaagaagaacagaaaaaacaagaggaagagagcaatcgaaaccaaacgacccagcgttcatcgcgtcgc

SEQ ID NO: 1290 - protein, 399 aa, Streptococcus pneumoniae
  cell division protein DivIB (divIB); Cellular location: membrane; Similar to strain R6 sequence 15902649 (0.E+01)
MSKDKKNEDKETLEELKELSEWQKRNQEYLKKKAEEEAALAEEKEKERQARMGEESEKSEDKQDQESETDQEDSESAKEESEEKVASSEADKEKEEKEEPESKEKEEQDKKLAKKATKEKPAKAKIPGIHILRAFTILFPSLLLLFVSAYLLSPYATMKDIRVEGTVQTTADDIRQASGIQDSDYTINLLLDKAKYEKQIKSNYWVESAQLVYQFPTKFTIKVKEYDIVAYYISGENHYPILSSGQLETSSVSLNSLPETYLSVLFNDSEQIKVFVSELAQISPELKAAIQKVELAPSKVTSDLIRLTMNDSDEVLVPLSEMSKKLPYYSKIKPQLSEPSVVDMEAGIYSYTVADKLIMEAEEKAKQEAKEAEKKQEEEQKKQEEESNRNQTTQRSSRR

SEQ ID NO: 1291 - DNA, 144 bp, Streptococcus pneumoniae
ttgatgaagaaggtaacacatatgtcagatgaagtattcttatttgaagaaattgaagaaatcgtagcccctacagatggtgaatttttgggggaagttttacttggaactggggtagttctcttaattggagtagcctgttgt

SEQ ID NO: 1292 - protein, 48 aa, Streptococcus pneumoniae
  hypothetical protein; Cellular location: membrane
MMKKVTHMSDEVFLFEEIEEIVAPTDGEFLGEVLLGTGVVLLIGVACC

SEQ ID NO: 1293 - DNA, 129 bp, Streptococcus pneumoniae
gtgataatcatgcaagataactttttatttgaggaaattgaagaaatttcagtaccagttaatgatttttcagctggacttgcaacaggtatcggatttggtttagcaatccttgctcttgctggttgt

SEQ ID NO: 1294 - protein, 43 aa, Streptococcus pneumoniae
  hypothetical protein; Cellular location: membrane
MIIMQDNFLFEEIEEISVPVNDFSAGLATGIGFGLAILALAGC

SEQ ID NO: 1295 - DNA, 114 bp, Streptococcus pneumoniae
atgagaattgttgataagattaagatattacctactccttatgagggacactatcatttatatataccatccagtaagaaacatgtattagttgggaaacaggaaaaaaatggt

SEQ ID NO: 1296 - protein, 38 aa, Streptococcus pneumoniae
  hypothetical protein; Cellular location: cytoplasm
MRIVDKIKILPTPYEGHYHLYIPSSKKHVLVGKQEKNG

SEQ ID NO: 1297 - DNA, 561 bp, Streptococcus pneumoniae
ttgaaaaaatcctatcttgttgtcattatatttgcaacgatacatgaaattagtcatgcaataattgctaataattatcaaattgagatcccaaattgtggaataatgctacttttgtttaatttggctttttttgtagatttaagtggggtgcaattcctaaaaaataaaaaacaatttttgaaaattatgttagcaggaattgcttcaaattcgattttatcacttacaggtttacttgttttattgttcacatcgtataaattgcttggactcttattttttatcattaacttaggtatgatttttattaattcaattcctttttttcagtatgatagtggtattattttaagatacttgaattctaacaataataacttgaattttcaatatatagttcaacttttaatagcatttgttattatttattttcctttgagtcaactattacagtttttgacacccaatattattgttcgtagtataggaggggtggttgtttctatactgctttctatattatatatgataggaaggacgaaatatgttctacgtaaa

SEQ ID NO: 1298 - protein, 187 aa, Streptococcus pneumoniae
  conserved domain protein; Cellular location: membrane; Similar to strain R6 sequence 15902651 (2.E-96)
MKKSYLVVIIFATIHEISHAIIANNYQIEIPNCGIMLLLFNLAFFVDLSGVQFLKNKKQFLKIMLAGIASNSILSLTGLLVLLFTSYKLLGLLFFIINLGMIFINSIPFFQYDSGIILRYLNSNNNNLNFQYIVQLLIAFVIIYFPLSQLLQFLTPNIIVRSIGGVVVSILLSILYMIGRTKYVLRK

SEQ ID NO: 1299 - DNA, 633 bp, Streptococcus pneumoniae
atgtatggagtgaggaaacttattgtcgctgattacgatataatagaaccatcaaatttaaataggcaaattctttatacagagtcggatgttggtaaggagaagattaatgttctttctgaaaaaatacacaagtataattcagatgttcaggtagtacctatttctattaaagtttcttcagtagaagaattagaaaaaattgttgcggaatatgggagtatagattttatcgttaaagcaattgatacgcccattgatattataaaaattgtcaatcaatttgctgtatcgcataagatatcctacatatcaggagggtttaatggatgctatcttattattgataatatatatatccctaccatcggttcttgctttggttgtcggaatataaacaaagatataaataagtacactttatctgataagacaaagtggccgactacaccagagatgcctgctattttgggagggataatgactaatttaataattaaaatatttctgggatgttataatgaaatcctaatagataacgcttacgtttataatatgagaaatcatgctctaagtcaagaaaaatatgttctggaaaacggagaatgtccaatttgtaaaaaaataataaag

SEQ ID NO: 1300 - protein, 211 aa, Streptococcus pneumoniae
  HesA/MoeB/ThiF family protein; Cellular location: membrane; Similar to strain R6 sequence 15902652 (e-119)
MYGVRKLIVADYDIIEPSNLNRQILYTESDVGKEKINVLSEKIHKYNSDVQVVPISIKVSSVEELEKIVAEYGSIDFIVKAIDTPIDIIKIVNQFAVSHKISYISGGFNGCYLIIDNIYIPTIGSCFGCRNINKDINKYTLSDKTKWPTTPEMPAILGGIMTNLIIKIFLGCYNEILIDNAYVYNMRNHALSQEKYVLENGECPICKKIIK

SEQ ID NO: 1301 - DNA, 378 bp, Streptococcus pneumoniae
gtgaaagataacaatattagagcgaaaacatttattcgttcagtttgtttttgcttattatcaggaggagtagcttttttatctgctattgggcagttcactgttatagaaacacaattaatagtattgttcttgggtattatttttgctatatattatgcttactacaataaaaatattcaaacatcattggaaaatatagtatggcttttttcatcgtttgagattttatttttgcttgttaattttagaacatttattcagttaccagtggatatttttattggtatgataatatttttaatgctgtggatatttattatgttaggtatagtgtgtcttagttattatataactttattatttagcaaggaggct

SEQ ID NO: 1302 - protein, 126 aa, Streptococcus pneumoniae
  hypothetical protein; Cellular location: membrane; Similar to strain R6 sequence 15902652 (2.E-65)
MKDNNIRAKTFIRSVCFCLLSGGVAFLSAIGQFTVIETQLIVLFLGIIFAIYYAYYNKNIQTSLENIVWLFSSFEILFLLVNFRTFIQLPVDIFIGMIIFLMLWIFIMLGIVCLSYYITLLFSKEA

SEQ ID NO: 1303 - DNA, 873 bp, Streptococcus pneumoniae
atgttaagtaaaaatgtagaatataaaggaggtgcaatgagtatgattgaagttagccatttatcaaaaagttttggtgataaaatagctttaaataatataagcttcactgttaaagaaggttagatttttggatttttagaaccatctggttctggaaagaccacaacgattaatattctgactgggcagttccttgccgataaaggacaatctattattttgggacaaaaatctcaaaatttaacaagcggtgaattaaagagaattggattggttagcgatacaagtggattttatgagaaaatgtctctgtataacaatcttcttttttatagtaaattttataatattagtaaatcacgtgttgataatttgttaaagcgagtaggattatatgatagtcgcaagatggtagcaggaaaattatccactggaatgaggcaacgaatgcttttagcacgagctcttatcaacaaccccgctgtactctttctggatgaaccgacctcaggtctagatcccacaacttctcgaacaattcatgagttaattttagaattgaaaacagcagggacaacgatttttctaacgactcatgatatgaatgaagcaactcttttatgtgattatgttgccttattaaataaagggaaattagttgagcaaggagctccttctgaactcattcaaagatataataaagataaaaagattaaggttacagattataatgggaatcagataacttttgattttacatcactagaacaggtatctcagactgatctggaaaatattttttcaattcattcatgtgagcctactttagaagatatttttatcacattaacaggaggaaagctaaatgct

SEQ ID NO: 1304 - skipped

SEQ ID NO: 1305 - DNA, 711 bp, Streptococcus pneumoniae
atgcttaaacggtttctggctttggtatggttgcgttgtcaaatcatcctttccaataagagtattttattgcaagttttagtgccttttgctttcacatatttttataaatatcttatggaaacacaggggaaggtcaacgatcaacaggcattagttcttttgatgatgtgtttacctttttctttttctttggctgttggaagtcctataactattatcttgtctgaagaaaaagaaaagtacaatttacaaactcttctgttgagtggtgttaaaggctccgaatacattttatcaactatgtttcttccttttttgctaacttttgtgattatgggaactactcctcttattttaggagttacaattgtacatacttttaattatattacaatcgttcttctaacctctttatccatcattttattctatttattgataggtttaaccgcgaagagccaagtagtagctcaggttatcagtcttcctgctatgattttagttgctttcttaccgatgctatctggtttggataagacagttgcgaagataacagattatagttttatgggactatttactaagtttttcacaaaatgggaggaattttcatggaataaaactctaattcctaatctaacactacttatttggattgttcttctattaactttaattacgataactattaggaaaaagaaaatttct

SEQ ID NO: 1306 - protein, 237 aa, Streptococcus pneumoniae
  hypothetical protein; Cellular location: membrane; Similar to strain R6 sequence 15902655 (e-127)
MLKRFLALVWLRCQIILSNKSILLQVLVPFAFTYFYKYLMETQGKVNDQQALVLLMMCLPFSFSLAVGSPITIILSEEKEKYNLQTLLLSGVKGSEYILSTMFLPFLLTFVIMGTTPLILGVTIVHTFNYITIVLLTSLSIILFYLLIGLTAKSQVVAQVISLPAMILVAFLPMLSGLDKTVAKITDYSFMGLFTKFFTKWEEFSWNKTLIPNLTLLIWIVLLLTLITITIRKKKIS

SEQ ID NO: 1307 - DNA, 96 bp, Streptococcus pneumoniae
ttgagttattttaatgattataaacacaagtgggaaggaaaaaatgaactgatctttttgacagcaattctacagaatagtcttattgctatattt

SEQ ID NO: 1308 - protein, 32 aa, Streptococcus pneumoniae
  hypothetical protein; Cellular location: membrane
MSYFNDYKHKWEGKNELIFLTAILQNSLIAIF

SEQ ID NO: 1309 - DNA, 141 bp, Streptococcus pneumoniae
atgggaattctgttttattttgcggatgcctattcatcttggcaaaggggaagtaatgagaatgcgaatggacttcttcgtgagtattttcttaaaccgatttggcaacaattaccgaaaaaatccttaatgatgctttgc

SEQ ID NO: 1310 - protein, 47 aa, Streptococcus pneumoniae
  transposase, IS30 family, truncation POINT MUTATION
MGILFYFADAYSSWQRGSNENANGLLREYFLKPIWQQLPKKSLMMLC

SEQ ID NO: 1311 - DNA, 699 bp, Streptococcus pneumoniae
atgcgagaacatcgtccaatcattgctcttgattttcctagttttgaggcggtcaaggaatttttagctcttttcccagcagaagaaagcctttatctcaaggtagggatggagctttattacgcagcggggcctgagattgtgtcctacttaaaaggtttgggtcatagtgtctttttggatctcaaacttcatgacattcctaatacagtcaagtcagccatgaagatcttgtctcagcttggtgtcgatatgactaatgtccatgcggctggtggtgtagagatgatgaaggcggcgcgtgaaggtcttgggagtcaagccaaattgatcgctgtaactcagctcacatcaacgtcagaagctcagatgcaggagtttcaaaatatccaaaccagtctgcaagagtctgtgattcactatgccaagaagacagctgaagctggcttggatggtgttgtttgctcggctcaggaagtacaagtcatcaagcaggctaccaatccagattttatctgtctgacaccagggattcgtccagctggtgttgcagttggagatcaaaaacgagtcatgacacctgctgatgcctatcaaatcggcagtgactatatcgtagtgggacgtcccattacccaagctgaggatcctgttgcagcttatcatgccatcaaggatgaatggacacaggactggaat

SEQ ID NO: 1312 - protein, 233 aa, Streptococcus pneumoniae
  orotidine 5'-phosphate decarboxylase (pyrF); Cellular location: cytoplasm; Similar to strain R6 sequence 15902657 (e-131)
MREHRPIIALDFPSFEAVKEFLALFPAEESLYLKVGMELYYAAGPEIVSYLKGLGHSVFLDLKLHDIPNTVKSAMKILSQLGVDMTNVHAAGGVEMMKAAREGLGSQAKLIAVTQLTSTSEAQMQEFQNIQTSLQESVIHYAKKTAEAGLDGVVCSAQEVQVIKQATNPDFICLTPGIRPAGVAVGDQKRVMTPADAYQIGSDYIVVGRPITQAEDPVAAYHAIKDEWTQDWN

SEQ ID NO: 1313 - DNA, 630 bp, Streptococcus pneumoniae
atgacacttgctaaagatatcgctagccacctcttgaaaatccaagccgtttacctcaaaccagaggaacccttcacttgggcatctggtatcaagtcaccgatttacactgataatcgtgtgacactagcctatccagaaactcgtaccctaattgaaaatggttttgtggaagctatcaaagaagcctttcctgaagtagaagtgattgcaggaactgcaacagcagggattccacacggagccattattgctgataagatggacttgccttttgcctacatccgtagtaaaccaaaagaccacggagctggtaatcaaatcgaaggtcgcgtagctcaaggtcaaaaaatggtagtggttgaagaccttatttcaacgggtggttcagttcttgaagctgtagcagcagccaagcgagaaggagcagatgtacttggagttgtagcgattttcagctaccaattgccaaaagcagataagaactttgcagatgctggtgttaaacttgtgacgctttcaaactatagcgagcttatccatctagcccaagaagaaggttacatcacgccagagggccttgatcttctaaaacgctttaaagaagaccaagaaaattggcaagaaggt

SEQ ID NO: 1314 - protein, 210 aa, Streptococcus pneumoniae
  orotate phosphoribosyltransferase PyrE (pyrE); Cellular location: cytoplasm; Similar to strain R6 sequence 15902658 (e-116)
MTLAKDIASHLLKIQAVYLKPEEPFTWASGIKSPIYTDNRVTLAYPETRTLIENGFVEAIKEAFPEVEVIAGTATAGIPHGAIIADKMDLPFAYIRSKPKDHGAGNQIEGRVAQGQKMVVVEDLISTGGSVLEAVAAAKREGADVLGVVAIFSYQLPKADKNFADAGVKLVTLSNYSELIHLAQEEGYITPEGLDLLKRFKEDQENWQEG

SEQ ID NO: 1315 - DNA, 348 bp, Streptococcus pneumoniae
ttgtttctccctacagttttagctagacagattggagattatgatttaacgtcgccgcgttggggttcggatacaactagtgagcttgagaaagaaaactcctctgctggaattaataataatgacagcactggtggcggtaaaaggttaaatacctctattcgtagcgcctatagtgggtcagatattaccccggtatattcattggggtctggctctaggattgtcatgtactataatggaggtggtgacaattatattggttctggtactagattagctatggcgccacaatttggaaatcatgtaagaattcatacttcaggttcttggaatccagattcttat

SEQ ID NO: 1316 - protein, 116 aa, Streptococcus pneumoniae
  hypothetical protein; Cellular location: cytoplasm; Similar to strain R6 sequence 15902659 (3.E-63)
MFLPTVLARQIGDYDLTSPRWGSDTTSELEKENSSAGINNNDSTGGGKRLNTSIRSAYSGSDITPVYSLGSGSRIVMYYNGGGDNYIGSGTRLAMAPQFGNHVRIHTSGSWNPDSY

SEQ ID NO: 1317 - DNA, 762 bp, Streptococcus pneumoniae
atggaatttttcatttgtaatcttgtacgagtcgttcaatcacctcgattttatatgtctttatttttgacccttctttgcatgagtttaggaaatttccttgctttcaatggtatttataaaattgaaggtttatcgattttttttgccgcttcttctattcgaggattttcaccgattagcctagtagctgcacttatctgtacactgccctattctagtcagataatagaggatgctgagagtcattttctaacagcacaattgtgtcgaatttctaaaaagaagtatctggctattgtgggtagtactgtaattatttcttcttttctagtcttttttctcccctatttattattattaggaattaatcttttagtgactccttatcaggaaatttatattggagattatagtggtgccttaaaagaattatttgattccaatcagtttctctatagtcttgtaacgactctctggtatggagtttggggcgctgtgttctctatttttggactagctagtgctttgctagtgaagaaaaaaataggagctattttcatcccagttgcctatatgatggttggtggtattttttgggctattttagggctatcttacttagaacctgtgacaacgctagctttgggatatcagaaagatatcagtctttccttagttagtgctcatcttgcttttattttatttgttagttgtttggttgtttatggtacattttttctacattcagaggactatgta

SEQ ID NO: 1318 - protein, 254 aa, Streptococcus pneumoniae
  hypothetical protein; Cellular location: membrane; Similar to strain R6 sequence 15902660 (e-140)
MEFFICNLVRVVQSPRFYMSLFLTLLCMSLGNFLAFNGIYKIEGLSIFFAASSIRGFSPISLVAALICTLPYSSQIIEDAESHFLTAQLCRISKKKYLAIVGSTVIISSFLVFFLPYLLLLGINLLVTPYQEIYIGDYSGALKELFDSNQFLYSLVTTLWYGVWGAVFSIFGLASALLVKKKIGAIFIPVAYMMVGGIFWAILGLSYLEPVTTLALGYQKDISLSLVSAHLAFILFVSCLVVYGTFFLHSEDYV

SEQ ID NO: 1319 - DNA, 801 bp, Streptococcus pneumoniae
ttgtttggttgtttatggtacattttttctacattcagaggactatgtataatgaaacaatttgttcaattttataaaaaagatttcttagcagtattggtttattttatattactgctatcctgtgttttatctagtacagtatatttattgcgctgtcgccaatattcaatccatccaaatgtattagaatggatcttagttttacttcaagatatgacgactggagtatattgctttccgttcacatatatattgttctttttttatttgatgaataactattttaataggttggagtgtcgcattcgtctgaaatcaattaagcactttaccagttttagtttcaaattagcagctcttagtacggggatttggacggcgactttatttttattgatttttctaattgcatttagtaatggttttagcttctctttggagataaaggaggttgattttttaagagaattttatggtataagtattgcaaacaatgctagtttctttataggattttttttctcttatatagcatactatttctttttatccttacttactattagcagtttttcttggtttaaaaaatcaaacatgagcttagtatttctgtttacttttttatttgtagaatccttattctggatttatcagttggacaatgggataattggattattgccaatttttcagtatatggtaaattccaatccgtatgcattgatttattggcttacattactatctatcataattccattgactgtattttctgttcatagaaactggaggagagtg

SEQ ID NO: 1320 - protein, 267 aa, Streptococcus pneumoniae
  hypothetical protein; Cellular location: membrane; Similar to strain R6 sequence 15902661 (e-156)
MFGCLWYIFSTFRGLCIMKQFVQFYKKDFLAVLVYFILLLSCVLSSTVYLLRCRQYSIHPNVLEWILVLLQDMTTGVYCFPFTYILFFFYLMNNYFNRLECRIRLKSIKHFTSFSFKLAALSTGIWTATLFLLIFLIAFSNGFSFSLEIKEVDFLREFYGISIANNASFFIGFFFSYIAYYFFLSLLTISSFSWFKKSNMSLVFLFTFLFVESLFWIYQLDNGIIGLLPIFQYMVNSNPYALIYWLTLLSIIIPLTVFSVHRNWRRV

SEQ ID NO: 1321 - DNA, 702 bp, Streptococcus pneumoniae
ttggaaatgggaaagttaagtagtcacatgtggaggttgaatcagataatctataccaagtacttttggggttatgttcttttttggatattgatttgtttaggattatggtattggttagaaggaaatgatagacttgttatagaaattttaaaagggcctaatctgagtcaaaactcttttttagtcttatctatatggttgcttcattggtttattattcatacattttttctagcagttgtatatcgtagaagagcatccgatttctttatggaagtgattcgattttcttctattaagctctggattaggtatcagatttggacctgttttctttatggactcattttaatcatggtaaaagttctagtgattcaatttatgttacagttaccaaactgggatataggagttttgtttatagttgattctttgaatgcttgtgtgttagtcttgttttgctttatgttatacgcactaggagcgaatgtacaaatgaactttgcttgcgttagtttctttttactcatgattgtgtttggtggtctatttgtaggaaatcgaactaattatctattttatattttgaatcgagggaatggagatataggacgagatttatttcttcagttgctatttttagtctttctttttcaaagcattttctatttcactcgtcaaaagaggaggtttatagaa

SEQ ID NO: 1322 - protein, 234 aa, Streptococcus pneumoniae
  hypothetical protein; Cellular location: membrane; Similar to strain R6 sequence 15902662 (e-138)
MEMGKLSSHMWRLNQIIYTKYFWGYVLFWILICLGLWYWLEGNDRLVIEILKGPNLSQNSFLVLSIWLLHWFIIHTFFLAVVYRRRASDFFMEVIRFSSIKLWIRYQIWTCFLYGLILIMVKVLVIQFMLQLPNWDIGVLFIVDSLNACVLVLFCFMLYALGANVQMNFACVSFFLLMIVFGGLFVGNRTNYLFYILNRGNGDIGRDLFLQLLFLVFLFQSIFYFTRQKRRFIE

SEQ ID NO: 1323 - DNA, 645 bp, Streptococcus pneumoniae
atgaatgaaataattacattaaaaaatattgagttgaaattaaaaaagacatgtgtttttcaaaaccttaactttagttgtaaacagggggaaattataggaattactggtgcgaatggctcagggaaaagtgtattgtttaaattaatagctggtttatatagtccgtcttatggagaagtgttaatcaatggggaaaatattgttcctgagagaaaaattccagctaatttgggagctttgattgaagaacctggttttataaattattatagtggctttaagaatttacaatatttggcaagcatacgaggagtagttggtaatcaggaaatcaatgatacactgaaaatagttggtctatatgagcaaaaagaccagaaagttaaaacttattcgctaggtatgaggaaaaagctagggattgctcaagcaattatggagaatccctctattcttttactagatgaacctatgaatgccttggataaatcaagtgtagaaaatatgagaacattgtttagaaagctctctagtgaaaaagggacaacaattttgattgctagtcatagtgaagaggatattcgtatcttatgtgataaagtatatgcaatagaagataaagtatgtacactgtgttcagat

SEQ ID NO: 1324 - protein, 215 aa, Streptococcus pneumoniae
  ABC transporter, ATP-binding protein; Cellular location: cytoplasm; Similar to strain R6 sequence 15902663 (e-119)
MNEIITLKNIELKLKKTCVFQNLNFSCKQGEIIGITGANGSGKSVLFKLIAGLYSPSYGEVLINGENIVPERKIPANLGALIEEPGFINYYSGFKNLQYLASIRGVVGNQEINDTLKIVGLYEQKDQKVKTYSLGMRKKLGIAQAIMENPSILLLDEPMNALDKSSVENMRTLFRKLSSEKGTTILIASHSEEDIRILCDKVYAIEDKVCTLCSD

SEQ ID NO: 1325 - DNA, 869 bp, Streptococcus pneumoniae
atgaaactattcaaaccactcttaactgttttagcacttgcctttgcccttatctttatcactgcttgtagctcaggtggaaacgctggttcatcctctggaaaaacaactgccaaagctcgcactatcgatgaaatcaaaaaaagcggtgaactgcgaatcgccgtgtttggagataaaaaaccgtttggctacgttgacaatgatggttcttaccaaggctacgctacgatattgaactagggaaccaactagctcaagaccttggtgtcaaggttaaatacatttcagtcgatgctgccaaccgtgcggaatacttgatttcaaacaaggtagatattactcttgctaactttacagtaactgacgaacgtaagaaacaagttgattttgcccttccatatatgaaagtttctctgggtgtcgtatcacctaagactggtctcattacagacgtcaaacaacttgaaggtaaaaccttaattgtcacaaaaggaacgactgctgagacttattttgaaaagaatcatccagaaatcaaactccaaaaatacgaccaatacagtgactcttaccaagctcttcttgacggacgtggagatgccttttcaactgacaatacggaagttctagcttgggcgcttgaaaataaaggatttgaagtaggaattacttccctcggtgatcccgataccattgcggcagcagttcaaaaaggcaaccaagaattgctagacttcatcaataaagatattgaaaaattaggcaaggaaaacttcttccacaaggcctatgaaaagacacttcacccaacctacggtgacgctgctaaagcagatgacctggttgttgaaggtggaaaagttgat

SEQ ID NO: 1326 - protein, 184 aa, Streptococcus pneumoniae
  amino acid ABC transporter, amino acid-binding protein FRAMESHIFT
MISNKVDITLANFTVTDERKKQVDFALPYMKVSLGVVSPKTGLITDVKQLEGKTLIVTKGTTAETYFEKNHPEIKLQKYDQYSDSYQALLDGRGDAFSTDNTEVLAWALENKGFEVGITSLGDPDTIAAAVQKGNQELLDFINKDIEKLGKENFFHKAYEKTLHPTYGDAAKADDLVVEGGKVD

SEQ ID NO: 1327 - DNA, 240 bp, Streptococcus pneumoniae
atgaaactattcaaaccactcttaactgttttagcacttgcctttgcccttatctttatcactgcttgtagctcaggtggaaacgctggttcatcctctggaaaaacaactgccaaagctcgcactatcgatgaaatcaaaaaaagcggtgaactgcgaatcgccgtgtttggagataaaaaaccgtttggctacgttgacaatgatggttcttaccaaggctacgctacgatattgaac

SEQ ID NO: 1328 - protein, 80 aa, Streptococcus pneumoniae
  outer membrane protein, FRAMESHIFT
MKLFKPLLTVLALAFALIFITACSSGGNAGSSSGKTTAKARTIDEIKKSGELRIAVFGDKKPFGYVDNDGSYQGYATILN

SEQ ID NO: 1329 - DNA, 756 bp, Streptococcus pneumoniae
atgtctgaaactatcttagaaatcaaggaactaaaaaaatccttcggagacaatcccatcctccaaggactttctctagaaatcaaaaaaggggaagttgttgtcatcctagggccatctggttgtgggaaaagtaccctccttcgttgcctcaacggcttagaaagtattcaaggtggagatattcttctggatggtcagtctatcgttgaaaataaaaaagattttcacctagttcgccaaaagattggcatggtctttcaaagttatgaactctttccccatctggatgtcttacaaaacctcatcctaggccctatcaaagctcaaggaagggacaagaaagaagtaacggaagaagctttgcaattactagagcgtgtcggtttgctggataaacaacatagctttgcccgtcaattatctggtggacagaagcaacgtgttgcaattgtccgtgccctcctaatgcatccagaaatcatcctttttgacgaggtgactgcttcgctggatccagaaatggtgcgtgaggtgctggaacttatcaatgatttggcccaagaaggccgtaccatgattttagtaacccacgaaatgcagtttgcccaagccattactgaccggattatcttcctcgaccaagggaaaatcgctgaagaaggaacagctcaagccttctttaccaatccgcaaaccaaacgagcccaggaatttttaaacgtctttgactttagccaattcggctcatatcta

SEQ ID NO: 1330 - protein, 252 aa, Streptococcus pneumoniae
  amino acid ABC transporter, ATP-binding protein; Cellular location: cytoplasm; Similar to strain R6 sequence 15902666 (e-139)
MSETILEIKELKKSFGDNPILQGLSLEIKKGEVVVILGPSGCGKSTLLRCLNGLESIQGGDILLDGQSIVENKKDFHLVRQKIGMVFQSYELFPHLDVLQNLILGPIKAQGRDKKEVTEEALQLLERVGLLDKQHSFARQLSGGQKQRVAIVRALLMHPEIILFDEVTASLDPEMVREVLELINDLAQEGRTMILVTHEMQFAQAITDRIIFLDQGKIAEEGTAQAFFTNPQTKRAQEFLNVFDFSQFGSYL

SEQ ID NO: 1331 - DNA, 675 bp, Streptococcus pneumoniae
atgcaggattcgggaatccaagtactctttcaaggaaataatctcctgagaatcttacagggattgggcgttacgattgggatatccatcctgtctgtcctcttatccatgatgttcagaacagtcatgggaatcatcatgacctcccattctagaatcatacgatttttaacacgattgtatctggaatttatccgtatcatgccccagctggtgctactcttcatcgtttactttggcttggctcgaaactttaatatcaatatctcaggtgagacttcagctattatcgtttttaccctctggggaacagctgaaatgggagacttggtacgtggagctatcacttctctccctaaacatcagtttgaaagtggacaggcactcggcttgactaatgttcaactttactaccacatcatcatcccacaagtcttaagaagactgctaccgcaggctatcaatcttgtcactcggatgattaaaaccacttcattagttgttttgattggggttgtggaagtgaccaaagttggacaacaaatcatcgatagcaatcgcctgaccatcccaactgcttcattttggatttatggaaccattctaatcttatatttcgcagtttgctaccctatttccaaactatccactcacttagaaaaacattggagaaac

SEQ ID NO: 1332 - protein, 225 aa, Streptococcus pneumoniae
  amino acid ABC transporter, permease protein; Cellular location: membrane; Similar to strain R6 sequence 15902667 (e-123)
MQDSGIQVLFQGNNLLRILQGLGVTIGISILSVLLSMMFRTVMGIIMTSHSRIIRFLTRLYLEFIRIMPQLVLLFIVYFGLARNFNINISGETSAIIVFTLWGTAEMGDLVRGAITSLPKHQFESGQALGLTNVQLYYHIIIPQVLRRLLPQAINLVTRMIKTTSLVVLIGVVEVTKVGQQIIDSNRLTIPTASFWIYGTILILYFAVCYPISKLSTHLEKHWRN

SEQ ID NO: 1333 - DNA, 618 bp, Streptococcus pneumoniae
ttgcatattgcagtttggggaattttgggatcctttctgctcggtttaatcgttagtatcatccgacattatcgaatccttgttttggcgcaagtagcgacagcctacattgaattgtcacgtaatacgccccttttgattcaactcttctttctctacttcggtcttccccgaatcgggattgtcctatcttcagaagtctgtgcaacgcttgggcttgtctttttaggaggctcctatatggcagaatctttccgaagtgggctggaagccatcagtcaaacccagcaggagattggcctcgctattggtctgacacctctacaggtcttttactatgtggttcttccgcaagcaacagcggtggcactcccctcctttagtgccaatgtcattttccttatcaaggaaacctctgttttctcagcagtggctttggccgacctcatgtacgtcgccaaggatttgattggtctctactatgagacagacattgcgctagctatgttggtagttgcttatctaatcatgctgctacccatctcactggtctttagctggatagaaaggaggctccgccatgcaggattcgggaatccaagtactctttcaaggaaa

SEQ ID NO: 1334 - protein, 206 aa, Streptococcus pneumoniae
  amino acid ABC transporter, permease protein; Cellular location: membrane; Similar to strain R6 sequence 15902668 (e-109)
MHIAVWGILGSFLLGLIVSIIRHYRILVLAQVATAYIELSRNTPLLIQLFFLYFGLPRIGIVLSSEVCATLGLVFLGGSYMAESFRSGLEAISQTQQEIGLAIGLTPLQVFYYVVLPQATAVALPSFSANVIFLIKETSVFSAVALADLMYVAKDLIGLYYETDIALAMLVVAYLIMLLPISLVFSWIERRLRHAGFGNPSTLSRK

SEQ ID NO: 1335 - DNA, 144 bp, Streptococcus pneumoniae
atgtcatacaaaacaagcaatgcagaaggtcatgtagatttcatcaatacctatgatttggagccaatggcgcaacaagttattcctaaagcagcatttggctatatcgctagtggggcgggagatactttcacttctttccag

SEQ ID NO: 1336 - protein, 48 aa, Streptococcus pneumoniae
  lactate oxidase, truncation (lctO); Cellular location: cytoplasm; Similar to strain R6 sequence 15902669 (5.E-23)
MSYKTSNAEGHVDFINTYDLEPMAQQVIPKAAFGYIASGAGDTFTSFQ

SEQ ID NO: 1337 - DNA, 1473 bp, Streptococcus pneumoniae
atggaagaactaaatgaccagcagatcgttcgccgtgaaaaaatggctgcgctccgcgaacaaggaatcgatcctttcggaaaacgttttgaacgtactgcaaattcacaagaattaaaagataaatatgccaacctcgataaagaacaattacacgataaaaacgaaacagctactatcgcaggacgcttgataaccaaacgtggtaaaggaaaagttggttttgcccaccttcaagaccgcgaaggccagattcagatctacgttcgtaaggatgctgtcggtgaagaaaactacgaaatcttcaaaaaagcagaccttggtgacttccttggtgtcgaaggtgaagtgatgcgtacggatatgggagaactctctatcaaggcaacccacatcacacacttgtctaaggctcttcgtcctcttcctgagaaattccatggtttgacagacgttgaaacaatttaccgtaaacgttaccttgacttgatttctaatcgtgaaagctttgaacgctttgtcactcgttcaaaaatcatctctgaaatccgtcgttaccttgaccaaaaaggattccttgaagtggaaacacctgttcttcataatgaagccggtggtgctgctgcccgtccatttatcacccaccacaatgcccaaaacattgacatggtgcttcgtatcgcgactgagcttcacttaaaacgccttatcgtgggtggtatggaacgtgtctatgaaattggccgtatcttccgtaacgaaggaatggacgctactcataaccctgagttcacttctatcgaagtttaccaagcttatgcagacttccaagacatcatggacttgactgaaggcattatccaacacgctgctaaatcagtcaaaggtgatggcccagtcaactaccaaggtactgaaatcaagattaacgaaccatttaagcgtgttcatatggtggatgctatcagagaaattactggtgtcgatttctggcaagacatgactttggaagaagctaaagctatcgctgctgagaagaaagttccagttgagaaacactacactgaggttggtcacatcatcaatgccttctttgaagagtttgttgaagaaactttaatccaaccaacctttgtctatggacatccagtagctgtatctccactcgctaagaaaaatcctgaagaccaacgctttactgaccgtttcgagctctttatcatgactaaggagtacggtaatgcctttactgagttgaacgacccaatcgaccaacttagccgttttgaagcccaagctaaagccaaagaacttggtgatgatgaagcgacaggaatcgactatgactacattgaagctcttgaatacggtatgccaccaacaggtggtttgggaatcggtatcgaccgtctctgcatgctcctcactgatacaacaactatccgtgatgtattgctcttcccaacaatgaaa

SEQ ID NO: 1338 - protein, 491 aa, Streptococcus pneumoniae
  lysyl-tRNA synthetase (lysS); Cellular location: cytoplasm; Similar to strain R6 sequence 15902670 (0.E+01)
MEELNDQQIVRREKMAALREQGIDPFGKRFERTANSQELKDKYANLDKEQLHDKNETATIAGRLITKRGKGKVGFAHLQDREGQIQIYVRKDAVGEENYEIFKKADLGDFLGVEGEVMRTDMGELSIKATHITHLSKALRPLPEKFHGLTDVETIYRKRYLDLISNRESFERFVTRSKIISEIRRYLDQKGFLEVETPVLHNEAGGAAARPFITHHNAQNIDMVLRIATELHLKRLIVGGMERVYEIGRIFRNEGMDATHNPEFTSIEVYQAYADFQDIMDLTEGIIQHAAKSVKGDGPVNYQGTEIKINEPFKRVHMVDAIREITGVDFWQDMTLEEAKAIAAEKKVPVEKHYTEVGHIINAFFEEFVEETLIQPTFVYGHPVAVSPLAKKNPEDQRFTDRFELFIMTKEYGNAFTELNDPIDQLSRFEAQAKAKELGDDEATGIDYDYIEALEYGMPPTGGLGIGIDRLCMLLTDTTTIRDVLLFPTMK

SEQ ID NO: 1339 - DNA, 1344 bp, Streptococcus pneumoniae; identical to SEQ ID NO: 517

SEQ ID NO: 1340 - protein, 448 aa, Streptococcus pneumoniae; identical to SEQ ID NO: 486
  IS1380-Spn1, transposase; Cellular location: cytoplasm; Similar to strain R6 sequence 15904024 (e-149)

SEQ ID NO: 1341 - DNA, 1134 bp, Streptococcus pneumoniae
atgtcatacaaaacaagcaatgcagaaggtcatgtagacttcatcaatacctatgatttggagccaatggcgcaacaagttattcctaaagcagcatttggctatatcgctagtggggcggaagatactttcactttaagagagaatatccgtgcctttaaccacaagctcatcgttcctcatacactttgcaatgtagaaaatccaagtacagagattgaatttgcaggtgaaaaactatcttctccaatcattatggcacctgttgcggctcataaattggcaaatgaacagggggaagtggcgactgcgcgtggtgtgcatgagtttggttctctttatacaaccagttcttactctactgttgaccttccagagatttctgaagccctccaagggacacctcattggtttcaattttactttagtaaggatgacggtatcaaccgccacatcatggaccgtgtgaaggctgaaggttataaagcgattgtcttgacggcagatgctactgtaggggggaatcgtgaagtggataagcgtaatggttttgtcttcccagttggcatgccgattgttgaagaatacctgccagaaggtgctggtaaatcaatggactttgtttacaaatcagctaaacaacgcttgtctccacgcgatgtagaatttatcgctgaatactctggtcttcctgtgtatgtcaagggaccacaatgccgtgaggacgttgaacgttcgcttgctgcaggagcttctggtatctgggtaaccaaccacggtggtcgtcaaatcgacggtggaccagctgcctttgactcgcttcaagaagtggcagaagcagttgatagacgtgtgccgattgtctttgactctggtgttcgtcgtggtcaacacgtctttaaagccttggcatcaggagcagacttggttgctattggacgccctgtcatctatggcttggctctcggtggtagtgtcggtgtgcgtcaagtctttgaacacttgaatgcggaattgaagacagttatgcaattgtctggaactcagaccattgaagatgtcaaacacttcaagctccgtcacaatccatacaacccaaccttcccagttgaccctcgtgacttaaaattgtat

SEQ ID NO: 1342 - protein, 378 aa, Streptococcus pneumoniae
  lactate oxidase (lctO); Cellular location: cytoplasm; Similar to strain R6 sequence 15902671 (0.E+01)
MSYKTSNAEGHVDFINTYDLEPMAQQVIPKAAFGYIASGAEDTFTLRENIRAFNHKLIVPHTLCNVENPSTEIEFAGEKLSSPIIMAPVAAHKLANEQGEVATARGVHEFGSLYTTSSYSTVDLPEISEALQGTPHWFQFYFSKDDGINRHIMDRVKAEGYKAIVLTADATVGGNREVDKRNGFVFPVGMPIVEEYLPEGAGKSMDFVYKSAKQRLSPRDVEFIAEYSGLPVYVKGPQCREDVERSLAAGASGIWVTNHGGRQIDGGPAAFDSLQEVAEAVDRRVPIVFDSGVRRGQHVFKALASGADLVAIGRPVIYGLALGGSVGVRQVFEHLNAELKTVMQLSGTQTIEDVKHFKLRHNPYNPTFPVDPRDLKLY

SEQ ID NO: 1343 - DNA, 666 bp, Streptococcus pneumoniae
atggaaacacaagactatgcatttcagccaggtttgactgttggagaattattaaaaagcagtcagaaggattggcaggctgcaatcaatcatcgttttgttaaggaactttttgcggggacaattgagaataaggtcttaaaggactatctgattcaagattatcacttctttgatgccttcttatccatgctgggtgcctgcgtagctcacgcagataaacttgaatccaagcttcgttttgccaagcaactaggctttcttgaagcagatgaagatggttatttccaaaaggcttttaaagagttaaaagtagcagagaatgactatctagaagtgactttgcaccctgtaacaaaagcctttcaggatctaatgtattcggcggtggcttcatcagactatgcccatcttttggtcatgctggtcattgcagaaggtctctatttagactggggttctaaagatttggctttacctgaagtctatattcattcggaatggatcaatctccacagaggtcctttctttgcagagtgggttcaatttctggttgacgaactcaatcgtgtcggtaaaaatcgagaagatttgacagaacttcagcaacgctggaatcaagcagtcgctttagaattagctttttttgatattggttacgatgtc

SEQ ID NO: 1344 - protein, 222 aa, Streptococcus pneumoniae
  transcriptional regulator, putative; Cellular location: membrane; Similar to strain R6 sequence 15902672 (e-128)
METQDYAFQPGLTVGELLKSSQKDWQAAINHRFVKELFAGTIENKVLKDYLIQDYHFFDAFLSMLGACVAHADKLESKLRFAKQLGFLEADEDGYFQKAFKELKVAENDYLEVTLHPVTKAFQDLMYSAVASSDYAHLLVMLVIAEGLYLDWGSKDLALPEVYIHSEWINLHRGPFFAEWVQFLVDELNRVGKNREDLTELQQRWNQAVALELAFFDIGYDV

SEQ ID NO: 1345 - DNA, 801 bp, Streptococcus pneumoniae
gtgaaaaggaaggatttcaatatgacaagtttaaaattattaaaagaaaaagcaccattggtcatttgtataaccaatgatgtagtaaaaaatttcacagcaaatggattagtagcactgggcgcctcaccagccatgagtgagtttccagcagatttagaggatttgttaaagtatgctggtggtttattaataaacataggaacattgacagatgaaaattggaaattataccaagctgctctgaaaattgcagagaaatataatgtcccagcagttttagatcctgtagcctgtggagcaggagaatatagaaaaaaagtagcagatgatctaatcaacaattataaactagcagcgattagaggaaatgctggcgagattgcctctttagtaggaatagatgtggcatctaaaggagtagatagtgcgggcgtagataatattgacgaaattgctctagcagcaaatgagaagttcaatattccaatagtagtaacaggtgaagtggatgccattgctgttaatggagaagtggtaatgattcataatggtagtgctatgatgccgaaagtcattgggacaggatgcttattaggagctgtagtagcaagctttatcggactagaaaaaggtcaagaattgaaatcattaaaaacagcagtgttggtttacaatatcgctggagaaatagcagaaaaacgtccaaatggacatcttcctgggacatttaaagttgaatttataaatgccttatacgagattacagatgaagatgtaaaggaattcaaaagagtgaag

SEQ ID NO: 1346 - protein, 267 aa, Streptococcus pneumoniae
  hydroxyethylthiazole kinase (thiM); Cellular location: membrane; Similar to strain R6 sequence 15902673 (e-143)
MKRKDFNMTSLKLLKEKAPLVICITNDVVKNFTANGLVALGASPAMSEFPADLEDLLKYAGGLLINIGTLTDENWKLYQAALKIAEKYNVPAVLDPVACGAGEYRKKVADDLINNYKLAAIRGNAGEIASLVGIDVASKGVDSAGVDNIDEIALAANEKFNIPIVVTGEVDAIAVNGEVVMIHNGSAMMPKVIGTGCLLGAVVASFIGLEKGQELKSLKTAVLVYNIAGEIAEKRPNGHLPGTFKVEFINALYEITDEDVKEFKRVK

SEQ ID NO: 1347 - DNA, 627 bp, Streptococcus pneumoniae
atgtttcataaagaattactaaaactatattttatttgtggaacgactacttgccaaggaaaaaatctatatacagtcgttgaggaagccttaaaaggtggtataaccttatttcaatttcgagaaaaaggtgagggtgctttagaaggcttagaaaaacttgagctagctatccaaattaaagaactttgtaaaaaatacaatgttccatttatcgttaatgacgatatagatttagcaatggaaattgacgccgatggcgtacatgtaggtcaagatgatattggtgttgatgaaattagaaaattgatgccagataaaataattggtctttctataagaaacgaagaagaatttcaacaatcaaaagttgaatatgtagattatgtaggtgttgggcctgtatttggtacccagtcaaaggatgatgctggtggtactataggttatgaaggtcttgaattgatgagaaaactattgccacaaatgcctttagttgcaattggtgggatacagacgaaacatattaaagacattataaagaccaatatggatggcgtttcaatcatttcggcaatatcgtatgcaaaaaatatagaaaaaactgttcgggaaatgagtgaacaa

SEQ ID NO: 1348 - protein, 209 aa, Streptococcus pneumoniae
  thiamine-phosphate pyrophosphorylase (thiE); Cellular location: cytoplasm; Similar to strain R6 sequence 15902674 (e-115)
MFHKELLKLYFICGTTTCQGKNLYTVVEEALKGGITLFQFREKGEGALEGLEKLELAIQIKELCKKYNVPFIVNDDIDLAMEIDADGVHVGQDDIGVDEIRKLMPDKIIGLSIRNEEEFQQSKVEYVDYVGVGPVFGTQSKDDAGGTIGYEGLELMRKLLPQMPLVAIGGIQTKHIKDIIKTNMDGVSIISAISYAKNIEKTVREMSEQ

SEQ ID NO: 1349 - DNA, 558 bp, Streptococcus pneumoniae
atgttgaaaaaatggcagttaaaagatgttatcttgcttgctttcttgtctatcttttttggtggggttttcgttggttcaggatatgtgtataatattctcagtctactcttaacacctcttggtttgcaggcctttgccaatgaaatcctcttcggtctctggtgtatggctgcgcccattgctgccatctttgttccgagagtcggaagtgcaacgattggagaagtgctagctgcgcttgctgaagtcctttatggtagccaatttggtctaggagctcttttgtctggctttgttcaaggtttgggaagtgaatttggttttatcgtaactaagaatcgctatgaaagttggctctctctaactgctaatagtattgggattacgcttgttagctttgtctatgaatacattaagttaggttactacgccttttcccttccgtttgtcctttccttgcttgtggtacgttttatttctgtttatttcttctgtaccatcttggttcgtgccattgtcaaactctatcatcagtttgcaactggaggaaaagca

SEQ ID NO: 1350 - protein, 186 aa, Streptococcus pneumoniae
  conserved hypothetical protein; Cellular location: membrane; Similar to strain R6 sequence 15902675 (e-101)
MLKKWQLKDVILLAFLSIFFGGVFVGSGYVYNILSLLLTPLGLQAFANEILFGLWCMAAPIAAIFVPRVGSATIGEVLAALAEVLYGSQFGLGALLSGFVQGLGSEFGFIVTKNRYESWLSLTANSIGITLVSFVYEYIKLGYYAFSLPFVLSLLVVRFISVYFFCTILVRAIVKLYHQFATGGKA

SEQ ID NO: 1351 - DNA, 1383 bp, Streptococcus pneumoniae
atgggtctggaactacgagcgattcagtccccaatcttctctgagccgtttgattttacttttcatgcgcaagcctttaccttgttagttgggagtagtgggtctggaaaatccagcctctttcaaatgattgcccaagttagttctcttccctatagcggtcaagtcctgatagatgggagcgaggtcagtcagctttctatcgtcgaacgtgtccagacggttggtattctcttgcaaaatcctaatcatcaatttaccatggagagcttgtttgaggagttggtttttaccatggaaaatatcggctatcaccttcaggaaattgattctaaaatagcagaggttgtccagcaatgtcgttgcaaggacatcttgcaccgtctcatccatcacttatcaggtggggaaaagcaaaaagcagcgctggctgtcctctttgccatgaatcctagggtctatctcttggatgagcccttcgcttccattgaccgcaagagcagaatcgagatattggagattctaaaagagttggtctatgatgggaagacagttattttgtgcgaccatgatttatctgactataaagcctatatcgaccatatggtggagctaagagacggaaaactaagggaagtgtttcaaatcccttcctatgagatgacacaggttgcttcaaaggaagttgcttctagcccggaactattccatatgaaccgtgtgactggtgagcttggtaatcgccccctcttttcaattgctgatttcacattctatcaagggatttcctgtatcctgggtgacaatggtgtcgggaaatcaaccctctttcggtctattcttcaatttcaaaagtataaggggagcattacttggaagggttcggtcctgaaaaagaaaaagagtttgtatcgtgatctgactggtgttgttcaggaagctgagaagcagtttatccgagtcagtctgcgagaggagcttcaattagatggacctgattctgaaagaaatcagcggatttttcaagctttacgatattttgatttggagcaggcagtcgataagagtccctatcaattaagtggtggtcagcaaaaaattcttcagctcctgaccatcttgaccagtaaggcttccgtgatcttgctagatgaaccttttgcaggtttggatgatagagcctgccattatttttgcaagtggattgtggaggagaggaatcaaggaagaagttttctgctcattagtcatcgtttagaccctttgatttctgtggttgattattggattgagatgactagtcagggtcttcggcatgtgaaagaagtgaccattaccaaaccacttacatctcagagtagcaatacccaaggggaggtgaga

SEQ ID NO: 1352 - protein, 461 aa, Streptococcus pneumoniae
  ABC transporter, ATP-binding protein; Cellular location: membrane; Similar to strain R6 sequence 15902676 (0.E+01)
MGLELRAIQSPIFSEPFDFTFHAQAFTLLVGSSGSGKSSLFQMIAQVSSLPYSGQVLIDGSEVSQLSIVERVQTVGILLQNPNHQFTMESLFEELVFTMENIGYHLQEIDSKIAEVVQQCRCKDILHRLIHHLSGGEKQKAALAVLFAMNPRVYLLDEPFASIDRKSRIEILEILKELVYDGKTVILCDHDLSDYKAYIDHMVELRDGKLREVFQIPSYEMTQVASKEVASSPELFHMNRVTGELGNRPLFSIADFTFYQGISCILGDNGVGKSTLFRSILQFQKYKGSITWKGSVLKKKKSLYRDLTGVVQEAEKQFIRVSLREELQLDGPDSERNQRIFQALRYFDLEQAVDKSPYQLSGGQQKILQLLTILTSKASVILLDEPFAGLDDRACHYFCKWIVEERNQGRSFLLISHRLDPLISVVDYWIEMTSQGLRHVKEVTITKPLTSQSSNTQGEVR

SEQ ID NO: 1353 - DNA, 648 bp, Streptococcus pneumoniae
atggtcaaagtagcaacccagacaccgattatcagtctcttcttgctgattttatccttggaaacatctttcattccttcgattgctctgactctttcggtagtcgcattttgtattctctttatgctctattaccgtcgatttaaaatgttagcttggatgatcatacttgccattttaccatcttttgccaactactgggcagttcagttacacggagatgcttcacaggcagtcatgcttggaacgagggcctttgtgacagtttgtatcggccttgtctttgtttcctctgtttcactaaaagagcttctcttgtacttggctcaaaaggggctatcacgctcttggtcctatgccttgattgtggtattcaattcttttcctctcattcagcaagaaatcaagtccctcaaagaagcttgcctattacgtggtcaagaactacatttttggtcgcccttgatttacagtaaggttctgatgacagtctttaggtggcgccatctttacctgagagctctatctgctcacggatatgacgaacatgcacagttgaagaatagctatcggactttttatattcctaaaaaaacaaaattaatctacctgcttttctttttattgcttcaaaccagtctattttta

SEQ ID NO: 1354 - protein, 216 aa, Streptococcus pneumoniae
  conserved hypothetical protein; Cellular location: membrane; Similar to strain R6 sequence 15902677 (e-120)
MVKVATQTPIISLFLLILSLETSFIPSIALTLSVVAFCILFMLYYRRFKMLAWMIILAILPSFANYWAVQLHGDASQAVMLGTRAFVTVCIGLVFVSSVSLKELLLYLAQKGLSRSWSYALIVVFNSFPLIQQEIKSLKEACLLRGQELHFWSPLIYSKVLMTVFRWRHLYLRALSAHGYDEHAQLKNSYRTFYIPKKTKLIYLLFFLLLQTSLFL

SEQ ID NO: 1355 - DNA, 690 bp, Streptococcus pneumoniae
atggaatttacagatattgcgatggaattatccaagaaagcttggcaggcttcctttcatcatccctttattttacaattacaagaggggaatttagaacctgccattttccgctattacctgattcaggatgcctactatctgaaggctttctcagaaatctatcatcttttggctgataagacttcaaaccaagagatgaaaagactcttgaaacaaaatgctcagggtttagtggagggtgagttatttattcgccaacaatttttcaaggaattggaaatcagcgaccaggaaatggagcaacatccaatcgctccaacctgttatcattacatttctcatatttataggcaatttgcagaaccgaacttagccatcgcttttgcaagcttgcttccttgtccttggttataccatgatataggcaaatcacttaatcttaaaccatcaccaaatcctctctatcaacaatggattgaaacttatattacggatgagttagagcaacagatcagagaggagggagcactggtcaatcagctctatcgagaaagtgacgagacagacaagcaaaaaatgctagatgccttccacatcagtgttcatatggaagccaagttttgggaaatggcctaccaacaccagacatggaagagcgatttacagtctttagaaaaaggagaagaa

SEQ ID NO: 1356 - protein, 230 aa, Streptococcus pneumoniae
  transcriptional activator TenA (tenA); Cellular location: cytoplasm; Similar to strain R6 sequence 15902678 (e-135)
MEFTDIAMELSKKAWQASFHHPFILQLQEGNLEPAIFRYYLIQDAYYLKAFSEIYHLLADKTSNQEMKRLLKQNAQGLVEGELFIRQQFFKELEISDQEMEQHPIAPTCYHYISHIYRQFAEPNLAIAFASLLPCPWLYHDIGKSLNLKPSPNPLYQQWIETYITDELEQQIREEGALVNQLYRESDETDKQKMLDAFHISVHMEAKFWEMAYQHQTWKSDLQSLEKGEE

SEQ ID NO: 1357 - DNA, 522 bp, Streptococcus pneumoniae
atgagaaagcaccaattacaagttcacaaattaaccattttatctatgatgattgcccttgatgtagtccttacacctatctttcgaattgagggaatggcaccgatgtccagtgtagtcaatattctagcaggaatcatgatgggacctgtttatgccttggctatggctacagtcacagcctttatccgtatgacgactcaagggattccgcctttagctctcacaggagcgacttttggagcccttctagcaggtctcttttataagtacggtcgaaaatttcactattctgctctaggagagattttgggaacaggtattattggttccattgtttcctatcctgttatggtactctttacaggatcagctgctaagcttagctggtttatctacacgcctcgatttttcggagcaaccttgattggtacagcgatttcctttattgcctttcgatttttaatcaagcaggaattctttaaaaaagtgcagggatatttctttagtgaaaggatagac

SEQ ID NO: 1358 - protein, 174 aa, Streptococcus pneumoniae
  conserved domain protein; Cellular location: membrane; Similar to strain R6 sequence 15902679 (1.E-95)
MRKHQLQVHKLTILSMMIALDVVLTPIFRIEGMAPMSSVVNILAGIMMGPVYALAMATVTAFIRMTTQGIPPLALTGATFGALLAGLFYKYGRKFHYSALGEILGTGIIGSIVSYPVMVLFTGSAAKLSWFIYTPRFFGATLIGTAISFIAFRFLIKQEFFKKVQGYFFSERID

SEQ ID NO: 1359 - DNA, 801 bp, Streptococcus pneumoniae
atgcaggaatttacaaatccctttcctataggctctagttccctcattcactgcattaccaatgagatttcttgtgagatgctggcaaatgggattttggctctgggatgcaaacctgtcatggcagatgattcccgtgaagttcttgattttactaagcaaagtcaggctctcttcatcaatttggggcatttgtcagctgagaaggaaaaagcaatccgcatggcagcttcgtatgcaaaccaatcttctctcccgatggtagtagatgcggttggcgtaacgacttcatccattcgtaagagcttagttaaagaccttttagactatagacctacggtccttaaaggaaacatgtcagaaattcgaagtcttgttggattaaagcaccacggcgttggggtcgatgcgagtgctaaagatcaagaaacggaggatttgcttcaagtcttgaaagactggtgtcagacctatcctggtatgtctttcttagtcacaggtcccaaggacctcgtcgtttcgaaaaatcaggtcgctgtactgggaaatggctgtactgaattagactggataacagggacaggagacttggttggagccttaacagctgtttttctcagccaaggaaagactggttttgaagcttcttgcttagcagtctcttatctcaatatcgctgctgagaaaatagttgttcaaggaatgggattggaagaatttcgttaccaagtactcaatcagctttcgctcctaagaagagatgaaaattggctagataccatcaaaggagaggtttatgaa

SEQ ID NO: 1360 - protein, 267 aa, Streptococcus pneumoniae
  hydroxyethylthiazole kinase, putative; Cellular location: cytoplasm; Similar to strain R6 sequence 15902680 (e-151)
MQEFTNPFPIGSSSLIHCITNEISCEMLANGILALGCKPVMADDSREVLDFTKQSQALFINLGHLSAEKEKAIRMAASYANQSSLPMVVDAVGVTTSSIRKSLVKDLLDYRPTVLKGNMSEIRSLVGLKHHGVGVDASAKDQETEDLLQVLKDWCQTYPGMSFLVTGPKDLVVSKNQVAVLGNGCTELDWITGTGDLVGALTAVFLSQGKTGFEASCLAVSYLNIAAEKIVVQGMGLEEFRYQVLNQLSLLRRDENWLDTIKGEVYE

SEQ ID NO: 1361 - DNA, 630 bp, Streptococcus pneumoniae
atgaatagagaagcacttagactatatctggtaaccaatcgctatcaagattccgtggaaagctttcttgcaaaagttgagacggcctgccgttcaggggttaccatagtccaattgcgagaaaaaaatctcacaaccaatcaatattatcaactggcaaaacaagtcaaggaaataacagatgcttatcaggtacccttgataatcgatgatcggttggatgtttgtcttgcggttgatgcagcaggtctgcatatcggagatgatgaattaccagtttcggtagctcgcaaagtcttgggtcctgaaaaaatcctcggtgtcaccgctaaaacggttaaaagagctctggaagcggagaaatcaggtgcagattacttgggtacaggagccattttcccaaccaccaccaaggaaaatgcgcccattactctgatatcgaccttgaaaacaatttgccaaacggttgccattccagtagttgctattggaggcttgacttcggagaatattgatcagcttatgggcactggcatagctggtgtagctgttgtacgtgatttgatgcaagcagaagatattgaggcaaaaacgcaagcctttttaaaaaagttgcataacattctttcc

SEQ ID NO: 1362 - protein, 210 aa, Streptococcus pneumoniae
  thiamine-phosphate pyrophosphorylase (thiE); Cellular location: membrane; Similar to strain R6 sequence 15902681 (e-114)
MNREALRLYLVTNRYQDSVESFLAKVETACRSGVTIVQLREKNLTTNQYYQLAKQVKEITDAYQVPLIIDDRLDVCLAVDAAGLHIGDDELPVSVARKVLGPEKILGVTAKTVKRALEAEKSGADYLGTGAIFPTTTKENAPITLISTLKTICQTVAIPVVAIGGLTSENIDQLMGTGIAGVAVVRDLMQAEDIEAKTQAFLKKLHNILS

SEQ ID NO: 1363 - DNA, 789 bp, Streptococcus pneumoniae
atgacttatttacccgttgctttgaccattgcagggactgaccctagtggtggtgctggcattatggcagatttaaagtcattccaagcgagagatgtctatggaatggctgttgtaaccagtcttgtcgctcaaaataccagaggtgttcagctaatcgagcacgtttctcctcaaatgttgaaagcccaattggagagtgtcttttctgatattccacctcaggctgtaaaaactggaatgttggctactactgaaatcatggaaatcatccaaccctatcttaaaaaactggattgtccctatgtccttgatcctgttatggttgctacaagtggagatgccttgattgactcaaatgctagagactatctcaaaacaaacttactacctctagcaactattattacgccaaatcttcctgaagcagaagagattgttggtttttcaatccatgaccccgaagacatgcagcgtgctggtcgcctgattttaaaagaatttggtcctcagtctgtggttatcaaaggcggacatctcaaaggtggtgctaaagatttcctctttaccaagaatgaacaatttgtctgggaaagcccacgaattcaaacctgtcacacccatggtactggatgtacctttgctgcagtgattactgctgaactagccaagggcaagagtctttaccaggcagttgataaggccaaggcctttatcacaaaagctattcaagatgcccctcaactcggtcatggttctggtccagtcaaccatacaacttttaaagat

SEQ ID NO: 1364 - protein, 263 aa, Streptococcus pneumoniae
  phosphomethylpyrimidine kinase (thiD); Cellular location: outside; Similar to strain R6 sequence 15902682 (e-150)
MTYLPVALTIAGTDPSGGAGIMADLKSFQARDVYGMAVVTSLVAQNTRGVQLIEHVSPQMLKAQLESVFSDIPPQAVKTGMLATTEIMEIIQPYLKKLDCPYVLDPVMVATSGDALIDSNARDYLKTNLLPLATIITPNLPEAEEIVGFSIHDPEDMQRAGRLILKEFGPQSVVIKGGHLKGGAKDFLFTKNEQFVWESPRIQTCHTHGTGCTFAAVITAELAKGKSLYQAVDKAKAFITKAIQDAPQLGHGSGPVNHTTFKD

SEQ ID NO: 1365 - DNA, 423 bp, Streptococcus pneumoniae
ttgacaaatgtagattttggaggtatggtaatgcagatttcagatgcagaatggcaggtcatgaagattatttggatgcagggggagcagaccagtacagatttgattagggttttggcagagcggtttgactggtccaagtccacggttcagacacttttggctcgtctggttgataaagagtgtttgactcggaaaaaagaaggcaagtcctttgtttattcagcccttttaactctagaccaaagtcgggatttacttgtccaagatatcaaagacaaggtttgttcccgtaggattaggaatttgttggctgacttgattgtagaatgtgaatttactcagactgacttggaagacttggaagctgtgatttcagagaagaaatcaagtgctgtaacagaagtaagatgtaattgtatg

SEQ ID NO: 1366 - protein, 141 aa, Streptococcus pneumoniae
  transcriptional repressor, putative; Cellular location: cytoplasm; Similar to strain R6 sequence 15902683 (3.E-71)
MTNVDFGGMVMQISDAEWQVMKIIWMQGEQTSTDLIRVLAERFDWSKSTVQTLLARLVDKECLTRKKEGKSFVYSALLTLDQSRDLLVQDIKDKVCSRRIRNLLADLIVECEFTQTDLEDLEAVISEKKSSAVTEVRCNCM

SEQ ID NO: 1367 - DNA, 369 bp, Streptococcus pneumoniae
atgttaaatagtattgtaaccattatttgtattgcccttatcgcgtttatcttgttttggtttttcaaaaagcctgaaaaatctggacaaaaagcccagcaaaaaaacggataccaagagattcgagtggaagtcatgggaggctatactcctgagttgattgtcctcaagaaatcagtgccagcacgcattgtctttgaccgcaaggatccttcaccatgtctggatcaaattgtttttccagattttggtgtacatgcgaacctgccaatgggggaagagtatgtagtggaaatcacgcctgaacaggctggagagtttggctttgcttgtggtatgaacatgatgcacggcaagatgattgtagag

SEQ ID NO: 1368 - protein, 123 aa, Streptococcus pneumoniae
  hypothetical protein; Cellular location: outside; Similar to strain R6 sequence 15902684 (9.E-69)
MLNSIVTIICIALIAFILFWFFKKPEKSGQKAQQKNGYQEIRVEVMGGYTPELIVLKKSVPARIVFDRKDPSPCLDQIVFPDFGVHANLPMGEEYVVEITPEQAGEFGFACGMNMMHGKMIVE

SEQ ID NO: 1369 - DNA, 2250 bp, Streptococcus pneumoniae
gtggagactatgacagaaattgtgaaagcaagcttagaaaatggcattcaaaaaatccgtatccgagctgaaaaaggctatcatccagcccatatccagcttcaaaagggaattccagctgagattacctttcatcgtgctactccttcaaactgttataaggaaattctgtttgaagaagaaggtatcttggaaccaatcggcgtagatgaggagaaagtcattcgttttacgcctcaagaattagggcgacatgaattttcttgtggcatgaagatgcaaaagggaagctatacagtcgttgagaagactcgaaaatctctatctctcctgcaacgtttttggattactagtatctttactgtgcctcttgtgattctcatgattgggatgttgacaggtagcattagtcatcaagtcatgcattggggaacctttctagcaacaacgcctattatgttagttgcaggtaagccatatatccagagtgcttgggccagttttaaaaagcacaatgccaacatggataccttggttgcgctgggaactctagtggcttatttctatagcctagttgctctctttgctggtctccctgtttacttcgaaagtgctggatttatcctctttttcgttcttttgggagcagtttttgaggaaaaaatgagaaaaaatacgtcccaagctgtggagaaattactggacttgcaagctaaaaccgcagaagtcttgagtgatgatagttatgtccaagttcctttggaacaagtcaaggtaggcgacctgattcgagtgcgtcccggtgaaaagattgctgttgatggtgtcgtagtagaaggtgtctctagtattgacgaatccatggtgacaggtgagagtctgcctgtggacaagacagttggagatactgtcattggctcaaccatcaatcatagtggaacgcttgtctttagagcagaaaaagttggctcagagactgttttggctcagattgtggattttgtgaagaaagctcagacaagtcgtgcgccgattcaggacttgacggataagatttcagggatttttgtcccagtagttgtcattttaggaatcatgaccttttgggtttggttcgtcttgctcagggatagtgtggttgtgcttggagctagctttgtgtcctctcttctctacggagtggcggttttgattatcgcctgtccttgtgccttgggacttgcaacaccgacagcccttatggtggggacaggacgtagtgccaagatgggggttctcctcaaaaatggaactgtcttacaggaaatccagaaagttcaaacccttgtctttgataagaccgggactttgacggaagggaaacctgtggtaacagatgtcatcggcgacgaagtagaagtgtttgggttggcagcctccttggaagatgcttctcaacacccactggctgaggctatcgttaagcgagcgagtgaagctggacttgagtttcaaactgttgaaaattttcagtccttgcacgggaaaggtgtttcagggcgaatcaatggaaaacaagttttacttggaaatgctaaaatgctggatggcatggatatttctaatacttatcaagataaactagaagaactagaaaaagaagctaagacagttgtgttcttagctgttgacaatgaaatcaaaggcttgcttgctttgcaagatattcctaaggaaaatgctaagctagccatcagtcagctaaaaaaacgtggtctccgaacagtcatgctgacaggagacaatgctggtgtggcgcgtgctattgcagatcaaatcggaattgaagaggtcattgcaggcgtcttgccagaagaaaaagcccatgaaatccataaactgcaacagtcagggaaagtagcctttgttggggacggtatcaatgacgctcctgcccttagtgtagcagatgtggggattgctatgggagctggaacagatatcgccatcgagtcagcagatttggtgttgacaaccaataatcttttaggagtggttcgtgcctttgatatgagtaagaaaacctttcatcgaattctactcaatcttttctgggcttttatctacaatgttgtcggaattccgattgcagcaggagtcttttcaggtgttggactggctctcaacccagaattggcaggtctagccatggcctttagttctgtatctgttctgaccagttcccttctgttaaattttagtaaaatagac

SEQ ID NO: 1370 - protein, 750 aa, Streptococcus pneumoniae
  cation-transporting ATPase, E1-E2 family; Cellular location: membrane; Similar to strain R6 sequence 15902685 (0.E+01)
METMTEIVKASLENGIQKIRIRAEKGYHPAHIQLQKGIPAEITFHRATPSNCYKEILFEEEGILEPIGVDEEKVIRFTPQELGRHEFSCGMKMQKGSYTVVEKTRKSLSLLQRFWITSIFTVPLVILMIGMLTGSISHQVMHWGTFLATTPIMLVAGKPYIQSAWASFKKHNANMDTLVALGTLVAYFYSLVALFAGLPVYFESAGFILFFVLLGAVFEEKMRKNTSQAVEKLLDLQAKTAEVLSDDSYVQVPLEQVKVGDLIRVRPGEKIAVDGVVVEGVSSIDESMVTGESLPVDKTVGDTVIGSTINHSGTLVFRAEKVGSETVLAQIVDFVKKAQTSRAPIQDLTDKISGIFVPVVVILGIMTFWVWFVLLRDSVVVLGASFVSSLLYGVAVLIIACPCALGLATPTALMVGTGRSAKMGVLLKNGTVLQEIQKVQTLVFDKTGTLTEGKPVVTDVIGDEVEVFGLAASLEDASQHPLAEAIVKRASEAGLEFQTVENFQSLHGKGVSGRINGKQVLLGNAKMLDGMDISNTYQDKLEELEKEAKTVVFLAVDNEIKGLLALQDIPKENAKLAISQLKKRGLRTVMLTGDNAGVARAIADQIGIEEVIAGVLPEEKAHEIHKLQQSGKVAFVGDGINDAPALSVADVGIAMGAGTDIAIESADLVLTTNNLLGVVRAFDMSKKTFHRILLNLFWAFIYNVVGIPIAAGVFSGVGLALNPELAGLAMAFSSVSVLTSSLLLNFSKID

SEQ ID NO: 1371 - DNA, 1773 bp, Streptococcus pneumoniae
atgactcaagggaaaattactgcatctgcagcaatgcttaacgtattgaaaacatggggcgtagatacaatctacggtatcccatcaggaacactcagctcattgatggacgctttggctgaagacaaagatatccgtttcttacaagttcgccacgaagagacaggtgctcttgcagcggttatgcaagctaaattcggcggctcaatcggggttgcagttggttcaggtggtccaggtgcgactcacttgattaacggtgtttacgatgcagctatggataacactccattcctagcgatccttggatcacgtccagttaacgaattgaacatggatgctttccaagagcttaaccaaaacccaatgtacaacggtatcgctgtttacaacaaacgtgtagcttacgctgagcaattgccaaaagtaattgacgaagcctgccgtgctgcagtttctaaaaaaggtccagctgttgttgaaattccagtaaacttcggtttccaagaaatcgatgaaaactcatactacggttcaggttcatacgaacgctcattcatcgctcctgctttgaacgaagttgaaatcgacaaagctgttgaaatcttgaacaatgctgaacgcccagttatctatgctggatttggtggtgttaaagctggtgaagtgattactgaattgtcacgtaaaatcaaagcaccaatcatcacaactggtaaaaactttgaagctttcgaatggaactatgaaggtttgacaggttctgcttaccgtgttggttggaaaccagccaacgaagtggtctttgaagcagacacagttcttttccttggttcaaacttcccatttgctgaagtttacgaagcattcaagaacactgaaaaattcatccaagtcgatatcgacccttacaaacttggtaaacgtcatgcccttgacgcttcaatccttggtgatgctggtcaagcagctaaagctatccttgacaaagtaaacccagttgaatcaactccatggtggcgtgcaaacgttaagaacaaccaaaactggcgtgattacatgaacaaactcgaaggtaaaactgagggtgaattgcaattgtatcaagtttacaatgcaatcaacaaacatgctgatcaagacgctatctactcaatcgacgtaggtaacactactcaaacatctactcgtcaccttcacatgacacctaagaacatgtggcgtacatctccactctttgcgacaatgggtattgcccttcctggtggtatcgctgctaagaaagacaatccagatcgccaagtatggaacatcatgggtgacggagcattcaacatgtgctacccagacgttatcacaaacgttcaatacgaccttccagttatcaaccttgtcttctcaaatgctgagtacggcttcatcaagaacaaatacgaagatacaaacaaacacttgtttggtgtagacttcacaaacgctgactacgctaaaattgcggaagctcaaggagctgttggattcacagttgaccgtatcgaagacatcgatgcagttgttgcagaagctgttaaattgaacaaagaaggtaaaactgttgtcatcgatgctcgcatcactcaacaccgtccacttccagtagaagtacttgaattggatccaaaacttcactcagaagaagctatcaaagccttcaaggaaaaatacgaagcagaagaactcgtaccattccgtctcttcttggaagaagaaggattgcaatcacgcgcaattaaa

SEQ ID NO: 1372 - protein, 591 aa, Streptococcus pneumoniae
  pyruvate oxidase (spxB); Cellular location: cytoplasm; Similar to strain R6 sequence 15902686 (0.E+01)
MTQGKITASAAMLNVLKTWGVDTIYGIPSGTLSSLMDALAEDKDIRFLQVRHEETGALAAVMQAKFGGSIGVAVGSGGPGATHLINGVYDAAMDNTPFLAILGSRPVNELNMDAFQELNQNPMYNGIAVYNKRVAYAEQLPKVIDEACRAAVSKKGPAVVEIPVNFGFQEIDENSYYGSGSYERSFIAPALNEVEIDKAVEILNNAERPVIYAGFGGVKAGEVITELSRKIKAPIITTGKNFEAFEWNYEGLTGSAYRVGWKPANEVVFEADTVLFLGSNFPFAEVYEAFKNTEKFIQVDIDPYKLGKRHALDASILGDAGQAAKAILDKVNPVESTPWWRANVKNNQNWRDYMNKLEGKTEGELQLYQVYNAINKHADQDAIYSIDVGNTTQTSTRHLHMTPKNMWRTSPLFATMGIALPGGIAAKKDNPDRQVWNIMGDGAFNMCYPDVITNVQYDLPVINLVFSNAEYGFIKNKYEDTNKHLFGVDFTNADYAKIAEAQGAVGFTVDRIEDIDAVVAEAVKLNKEGKTVVIDARITQHRPLPVEVLELDPKLHSEEAIKAFKEKYEAEELVPFRLFLEEEGLQSRAIK

SEQ ID NO: 1373 - DNA, 345 bp, Streptococcus pneumoniae
atgaatttaaatcaattagatattatcgtttcaaatgttccccaagtctgtgctgacttggagcatatcttggataaaaaggcagattatgctaatgatggttttgctcagtttacgattggtagtcactgccttatgttgtcacaaaatcatttggttcctttggaaaactttcagtcaggaatcattattcatatcgaggttgaggatgtagaccagaactacaaacggttgaacgagcttggtataaaggttttacacggaccaactgtaaccgattggggaacagagtccttattagttcaaggacctgctggtctagtgcttgatttttatcgtatgaaa

SEQ ID NO: 1374 - protein, 115 aa, Streptococcus pneumoniae
  conserved domain protein; Cellular location: cytoplasm; Similar to strain R6 sequence 15902687 (8.E-64)
MNLNQLDIIVSNVPQVCADLEHILDKKADYANDGFAQFTIGSHCLMLSQNHLVPLENFQSGIIIHIEVEDVDQNYKRLNELGIKVLHGPTVTDWGTESLLVQGPAGLVLDFYRMK

SEQ ID NO: 1375 - DNA, 499 bp, Streptococcus pneumoniae
ttgatgtaccaagctgaagctggtttcggtagaatcagtaaactgggatcttgttgggctccaataggagtaggtccacatatccatagtcactatatacgagaatttcgctattgttatggagctgttgatgcctatacaggcgaatcatttttcttaatagctggtagatgtaatactgagtggatgaacgcctttttagaagagctttcacaagcttatccttttactcgttatggacaatgctatatggcataaatcaagtaccttaaagattccgactaatattggttttgcatttattcctccatacacaccagagatgaaccccattgaacaagtgtggaaagagattcgtaaacgtggatttaagaataaagcctttcgaattttggaagatgtcatgaatcaactccaagatgtcatacaaggattggagaaggaggtgataaagtccatcgttaatcggagatggactagaatgctttttgaaagcaga

SEQ ID NO: 1376 - skipped

SEQ ID NO: 1377 - DNA, 264 bp, Streptococcus pneumoniae
atgacagttgaggaagagaaagcctttcttgcccgccatttgaaggctacagaggcaggagaatttgttacaattgatgccttatttcaggcttataaaaaggagttaggtcgttcctacacacgtgatgccttctatcaactgttgaagcgccatggttggcgaaatattacgccacgtccagaacatcctaagaaagcagacgctcaaaccattgttgcgtctaaaaataaaatctcaatccaagaaggcaagaaagcgttt

SEQ ID NO: 1378 - protein, 88 aa, Streptococcus pneumoniae
  hypothetical protein (Degenerate transposase); Cellular location: cytoplasm; Similar to strain R6 sequence 15903223 (2.E-45)
MTVEEEKAFLARHLKATEAGEFVTIDALFQAYKKELGRSYTRDAFYQLLKRHGWRNITPRPEHPKKADAQTIVASKNKISIQEGKKAF

SEQ ID NO: 1379 - DNA, 93 bp, Streptococcus pneumoniae
atgaaatcaactaaagaagaaatccaaaccatcaaaacacttttaaaagactctcgtacagctaaatatcataaacgccttcaaatcgttcta

SEQ ID NO: 1380 - protein, 31 aa, Streptococcus pneumoniae
  hypothetical protein
MKSTKEEIQTIKTLLKDSRTAKYHKRLQIVL

SEQ ID NO: 1381 - DNA, 294 bp, Streptococcus pneumoniae
atggatacaccggatgagaatggttatgtagcagatgactatcggattacttacttagaggcccacatcaaggccatgcgagatgccatttaccaagacggggttgacttgcttggttatacgacttggggctgtatcgatccggtttcagctggcacaggggaaatgaataagcgctatggctttatctatgtagatcgagataatgtaggaaacggagctctcaaacgtagcaagaagaagtccttctattggtacaaggatgtcatttatagcaatggtgcaagcatcggg

SEQ ID NO: 1382 - protein, 98 aa, Streptococcus pneumoniae
  6-phospho-beta-glucosidase, truncation; Cellular location: cytoplasm; Similar to strain R6 sequence 15902690 (1.E-52)
MDTPDENGYVADDYRITYLEAHIKAMRDAIYQDGVDLLGYTTWGCIDPVSAGTGEMNKRYGFIYVDRDNVGNGALKRSKKKSFYWYKDVIYSNGASIG

SEQ ID NO: 1383 - DNA, 942 bp, Streptococcus pneumoniae
atgtcagaaccattatttttacaatcagttatgcaagaaaaaatctggggtggagccaagctacgtgatgagtttggctacgacatcccaagtgaaaaaatcggagaatattgggccatctcagcccatccaaatggagtctctaaagttgccaatggtcgttacgagggaacagatcttgctactttgtatgcggaacaccgtgaattatttggcaatcgtccagaacctgtatttccacttttgaccaagatcctcgatgccaacgactggctcagtgtccaagttcacccagacgatgcttatggactcgagcatgaaggcgaactcggaaaaacagaatgctggtacattatcgcagcggatgaaggttcagagattatctacggtcacaatgccaagtcaaaagaagaactccgccagcaaatcgaggacaagaactgggatgacttgttgaccaaagtccctgttaaggctggagatttcttctatgtaccaagcgggactatgcacgctatcggggcgggtatcttaatccttgaaacccagcagtctagcgataccacctatcgcgtctatgactttgaccgcaaggatgacaaaggcaacttgcgtgaacttcatcttgaaaaatccatcgatgtcttgaacattggtgagccagcaaatagccgtcctgtaactgttaaagcagatgatttgcgttccactctccttgtatctaatgatttcttcgcagtttacaagtgggaaattactggaaaagttgactttgaaaagacagctgactacagcttattgagtgtcttggctggtcaaggtcagctaactgttgacgggaaaaattatccaattcaaaaaggcagccactttatcctaccaagtgatgttgaagcttggactctggaagggcaaggtttggaattgattgttagccatcca

SEQ ID NO: 1384 - protein, 314 aa, Streptococcus pneumoniae
  mannose-6-phosphate isomerase (manA); Cellular location: cytoplasm; Similar to strain R6 sequence 15902691 (0.E+01)
MSEPLFLQSVMQEKIWGGAKLRDEFGYDIPSEKIGEYWAISAHPNGVSKVANGRYEGTDLATLYAEHRELFGNRPEPVFPLLTKILDANDWLSVQVHPDDAYGLEHEGELGKTECWYIIAADEGSEIIYGHNAKSKEELRQQIEDKNWDDLLTKVPVKAGDFFYVPSGTMHAIGAGILILETQQSSDTTYRVYDFDRKDDKGNLRELHLEKSIDVLNIGEPANSRPVTVKADDLRSTLLVSNDFFAVYKWEITGKVDFEKTADYSLLSVLAGQGQLTVDGKNYPIQKGSHFILPSDVEAWTLEGQGLELIVSHP

SEQ ID NO: 1385 - DNA, 99 bp, Streptococcus pneumoniae
atggaaacaaggactgttccaagtctggctcttccttcttcgtttcttcgtttcgtcattccaatcatcatcattgtggtcttcattgcccaatttatg

SEQ ID NO: 1386 - protein, 33 aa, Streptococcus pneumoniae
  hypothetical protein
METRTVPSLALPSSFLRFVIPIIIIVVFIAQFM

SEQ ID NO: 1387 - DNA, 201 bp, Streptococcus pneumoniae
ttgttagccatccataaaaagaaagggcctgagttcactactcaagtcctttttgattacataaattgggcaatgaagaccacaatgatgatgattggaatgacgaaacgaagaaacgaagaaggaagagccagacttggaacagtccttgtttccatgctctttcatcgagatggagttcctccattgcaagagcctttt

SEQ ID NO: 1388 - protein, 67 aa, Streptococcus pneumoniae
  hypothetical protein
MLAIHKKKGPEFTTQVLFDYINWAMKTTMMMIGMTKRRNEEGRARLGTVLVSMLFHRDGVPPLQEPF

SEQ ID NO: 1389 - DNA, 1269 bp, Streptococcus pneumoniae
atgactgctgctaatggcggtggaggctttttactaatctttctcatttccactattttaatcggtttccctctcctgctggctgagtttgcccttggccgtagtgctggcgtttccgctatcaaaacctttggaaaactgggcaagaataacaagtacaactttatcggttggattggcgcctttgccctctttatcctcttatctttttacagtgttatcggaggatggattctagtctatctaggtattgagtttgggaaattgttccaacttggtggaacgggtgattatgctcagttatttacttcaatcatttcaaatccagccattgccctaggagctcaagcggcctttatcctattgaatatcttcattgtatcacgtggggttcaaaaagggattgaaagagcttcgaaagtcatgatgcccctgctctttatcgtctttgtttttatcatcggtcgctctctcagtttgccaaatgccatggaaggggttctttacttcctcaaaccagacttttcaaaactgactagcactggtctcctctatgctctgggacaatctttctttgccctctcactaggggttacagtcatgttgacctatgcttcttacttagacaagaaaaccaatctagtccagtcaggaatctccatcgtagccatgaatatctcgatatccatcatggcaggtctagccattttccaagctcgatcccccttcaatatccagtctgaagggggacccagcctgctctttatcgtcttgcctcaactctttgacaagatgccttttggaaccattttctacgtcctcttcctcttgctcttcctttttgcgacagtcactttttctgtcgtgatgctggaaatcaatgtagacaatatcaccaaccaggataacagcaaacgtgccaaatggagtgttattttaggaattttgacctttgtctttggcattccttcagccctatcttacggtgtcatggcggatgttcacatttttggtaagaccttctttgacgctatggacttcttggtttccaatctcctcatgccatttggagctctctacctttcactttttacaggctatatctttaaaaaggctcttgcaatggaggaactccatctcgatgaaagagcatggaaacaaggactgttccaagtctggctcttccttcttcgtttcttcgtttcgtcattccaatcatcatcattgtggtcttcattgcccaatttatgtaatcaaaaaggacttgag

SEQ ID NO: 1390 - protein, 423 aa, Streptococcus pneumoniae
  sodium-dependent transporter, FRAMESHIFT; Cellular location: membrane; Similar to strain R6 sequence 15902692 (0.E+01)
MTAANGGGGFLLIFLISTILIGFPLLLAEFALGRSAGVSAIKTFGKLGKNNKYNFIGWIGAFALFILLSFYSVIGGWILVYLGIEFGKLFQLGGTGDYAQLFTSIISNPAIALGAQAAFILLNIFIVSRGVQKGIERASKVMMPLLFIVFVFIIGRSLSLPNAMEGVLYFLKPDFSKLTSTGLLYALGQSFFALSLGVTVMLTYASYLDKKTNLVQSGISIVAMNISISIMAGLAIFQARSPFNIQSEGGPSLLFIVLPQLFDKMPFGTIFYVLFLLLFLFATVTFSVVMLEINVDNITNQDNSKRAKWSVILGILTFVFGIPSALSYGVMADVHIFGKTFFDAMDFLVSNLLMPFGALYLSLFTGYIFKKALAMEELHLDERAWKQGLFQVWLFLLRFFVSSFQSSSLWSSLPNLCNQKGLE

SEQ ID NO: 1391 - DNA, 225 bp, Streptococcus pneumoniae
ttgaaaatgattttcttgacagaccttagaaaacatgataggatagtcaagtctatcaatcaaacagaaggctatttgacaactcaagtagctttttcttattttgaaaaaggagatcagagtttaactatgtcagaaaaatcacaatgggggtcgaaacttggttttattctagcatctgctggctggccatcgggcttggttccgtttggaagtttccctaca

SEQ ID NO: 1392 - protein, 75 aa, Streptococcus pneumoniae
  conserved domain protein (Sodium-dependent); Cellular location: cytoplasm; Similar to strain R6 sequence 15902692 (2.E-31)
MKMIFLTDLRKHDRIVKSINQTEGYLTTQVAFSYFEKGDQSLTMSEKSQWGSKLGFILASAGWPSGLVPFGSFPT

SEQ ID NO: 1393 - DNA, 738 bp, Streptococcus pneumoniae
atgtaccatataaaagaagctgcgcagctttcaggtgtctctgtcaagaccctgcatcactatgacaagataggactcttggtccccttaaagtcggaaaacggctatcgaacctacagtcaagaggatttggaacgccttcaggtcattctttactacaaatatctaggcttttctttagagaaaatagcagagctgttaaaggaagaaaggacagatttattgccccatttgactaggcagttggactatctaactcgcgaaaggcaacatctggataccttgatttccaccttgcaaaaaactattcaagaacaaaaaggagaaagaaaaatgaccattgaggaaaaattcacgggatttagctatcaagacaatcaaaaataccaccaagaagcggtagagaaatatggtcaagaagtcatgggacaagcgctcgaacgccaaaaaggtcacgaagacgaggctacggccgcctttaaccaagtctttcaaactttggcacaaaatcttcaagttggtttacctgcaacagcaaccgaaaaccaggagcaagcagccaagctcttgcaagccattcgcacttatggatttgactgctctattgaggtattcggtcatatcggtaaaggttacgtctacaacccagagtttaaggaaaacattgacaagtttggttctgaaacagcccagtacacgtcagatgccattgcggtttacgttcagacaaatgcagaa

SEQ ID NO: 1394 - protein, 246 aa, Streptococcus pneumoniae
  transcriptional regulator, MerR family; Cellular location: cytoplasm; Similar to strain R6 sequence 15902693 (e-124)
MYHIKEAAQLSGVSVKTLHHYDKIGLLVPLKSENGYRTYSQEDLERLQVILYYKYLGFSLEKIAELLKEERTDLLPHLTRQLDYLTRERQHLDTLISTLQKTIQEQKGERKMTIEEKFTGFSYQDNQKYHQEAVEKYGQEVMGQALERQKGHEDEATAAFNQVFQTLAQNLQVGLPATATENQEQAAKLLQAIRTYGFDCSIEVFGHIGKGYVYNPEFKENIDKFGSETAQYTSDAIAVYVQTNAE

SEQ ID NO: 1395 - DNA, 453 bp, Streptococcus pneumoniae
atgaacagaagagaggcagtcgaatttgttaacatgtgtatgattaaaaacggagataaggtcctggtccaagaccgagttaatcccgactggtctggcattacttttcctggtggtcatgttgaacgtggcgaatcctttgtcgatgctgtcattcgtgaagtgaaagaagaaactggtctgatcatttccaaaccccaactctgtggtatcaaaaactggtatgacgacaaggattatcgttatgtcgtccttttttacaagacagaacactttactggtgaactccagtcttcagacgaagggaaagtttggtgggaggactttgaaaatctttctcatctaaaacttgcaaccgatgatatgtctgatatgcttcgtgtgtttctagaagaagatctcagtgaattcttttactacaaaaacggtgacgactggctttatgatttgaag

SEQ ID NO: 1396 - protein, 151 aa, Streptococcus pneumoniae
  MutT/nudix family protein; Cellular location: cytoplasm; Similar to strain R6 sequence 15902694 (3.E-88)
MNRREAVEFVNMCMIKNGDKVLVQDRVNPDWSGITFPGGHVERGESFVDAVIREVKEETGLIISKPQLCGIKNWYDDKDYRYVVLFYKTEHFTGELQSSDEGKVWWEDFENLSHLKLATDDMSDMLRVFLEEDLSEFFYYKNGDDWLYDLK

SEQ ID NO: 1397 - DNA, 1173 bp, Streptococcus pneumoniae
atgaaacattttgatactattgtcatcggtgggggacctgctggtatgatggctacgatttccagtagcttttatggacagaaaaccctcctcatcgaaaaaaatcggaaacttggaaaaaaattagctgggactggtgggggacgttgcaatgtgaccaacaatggtagcttagacaacctgctagctggaattcctggaaacggacgctttctttacagtgttttctcccagttcgataatcatgacatcatcaacttttttacagaaaatggtgttaaacttaaggtcgaagaccacggacgcgtctttccagccagtgacaagtctcggactattatcgaagctttggaaaagaaaatcaccgaactaggtggtcaagttgctactcaaatagaaatcgtttctgttaaaaaagtagatgaccagtttgtccttaagtcagcggatcaaaccttcacttgtgagaaactcattgtcacaacaggtggtaagtcttatccttcgactggttcgactggttttggtcacgagattgctcgccattttaagcataccatcaccgatcttgaggctgctgaaagtcctttattaacagattttccacataaagccttacaaggtatttctctggacgatgtgaccctaagttatggtaagcatgtcatcactcatgatttactctttacccactttggtttgtcaggtcctgctgccctacgcatgtctagctttgtcaaaggtggggaggttctctcactcgatgttttgcctcaactttctgagaaggacttggttacatttctagaagaaaatcgggaaaaatccttgaaaaacgctttaaaaaccttgttaccagaacgcttggccgaattttttgtacaaggatatcctgaaaaagtcaaacaactgactgaaaaggaacgagaacaacttgtccagtccattaaagaacttaaaattcctgtaactggaaaaatgtcccttgcaaagtcctttgttaccaagggtggagtcagtctcaaggaaatcaatcctaaaacccttgaaagtaagctggtacctggcctccactttgcaggcgaagttatggatatcaatgcccacacgggtggctttaacatcacttctgccctctgtaccggctgggtggcgggaagtctgcattatgat

SEQ ID NO: 1398 - protein, 391 aa, Streptococcus pneumoniae
  conserved hypothetical protein; Cellular location: outside; Similar to strain R6 sequence 15902695 (0.E+01)
MKHFDTIVIGGGPAGMMATISSSFYGQKTLLIEKNRKLGKKLAGTGGGRCNVTNNGSLDNLLAGIPGNGRFLYSVFSQFDNHDIINFFTENGVKLKVEDHGRVFPASDKSRTIIEALEKKITELGGQVATQIEIVSVKKVDDQFVLKSADQTFTCEKLIVTTGGKSYPSTGSTGFGHEIARHFKHTITDLEAAESPLLTDFPHKALQGISLDDVTLSYGKHVITHDLLFTHFGLSGPAALRMSSFVKGGEVLSLDVLPQLSEKDLVTFLEENREKSLKNALKTLLPERLAEFFVQGYPEKVKQLTEKEREQLVQSIKELKIPVTGKMSLAKSFVTKGGVSLKEINPKTLESKLVPGLHFAGEVMDINAHTGGFNITSALCTGWVAGSLHYD

SEQ ID NO: 1399 - DNA, 843 bp, Streptococcus pneumoniae
atgacttggaagattattgctgactctggttgtgattatcgtcaactgccaacaccagctattaacacaacctttgtaagtgtccccttaaccattcaagtagctgatcaggtctttgttgatgacgccagtctcgatattgaccaaatgatggaaaccatgtatgcaactgcagaagcttcaaaatcggcttgtccaagcccagatgactatttgcgagcatttgaaggtgccaaaaacattttcctagtaaccatcacaggtaccctttctggcagtcacaatagtgctcaactagcaaagaatatttatctggaagaccatcctgacactaagattcatgtgattgatagtttatctgctggtggtgaagttgacctactcgtagaaaaattgaatgacttgattgaccagggcttgtcttttgaagaagtggttgaagctatcaccgcctatcaagaaaaaactaagttgctctttgtcctagccaaagtcgataacttggtgaagaacggccgtttgagcaagcttatcggtacggtcgttggccttctcaacattcgtatggtcggaaaagctagtgaaactgggactctcgaattgctacaaaaagcaaggggatcaaagaaatcagttcaagctgcctatgatgagttagtaaaagctggatatgctggtggccgtattgtcatggcccaacgcaataacgaaaaatgttgtcaacagctctcagagcgaatccgtgaaaccttcccacaagcggatattaaaattctaccaacctctggtctctgcagtttctatgcagaagagggcggtttgctgatgggctatgaaattgat

SEQ ID NO: 1400 - protein, 281 aa, Streptococcus pneumoniae
  conserved hypothetical protein; Cellular location: cytoplasm; Similar to strain R6 sequence 15902696 (e-158)
MTWKIIADSGCDYRQLPTPAINTTFVSVPLTIQVADQVFVDDASLDIDQMMETMYATAEASKSACPSPDDYLRAFEGAKNIFLVTITGTLSGSHNSAQLAKNIYLEDHPDTKIHVIDSLSAGGEVDLLVEKLNDLIDQGLSFEEVVEAITAYQEKTKLLFVLAKVDNLVKNGRLSKLIGTVVGLLNIRMVGKASETGTLELLQKARGSKKSVQAAYDELVKAGYAGGRIVMAQRNNEKCCQQLSERIRETFPQADIKILPTSGLCSFYAEEGGLLMGYEID

SEQ ID NO: 1401 - DNA, 555 bp, Streptococcus pneumoniae
atgtctgaacgtagaatctctgaaaagtctcttgaaaatctcagaaaatcaaaccaagaatccaatttattaaccagagaagccattgaaacagccctcttgcaactcttggaaaaaaaggaactgaccaagattagtatttctgaattggtcaaacgtgcaggtgtttcgcgtgcggccttttatcgcaattatgactccaaagaggaaattttagagagcgtctttaaacgaactgtccacaatattatggaacagctgcatcattacgatttaaagacagacctttatttggtttgggttcaccttttccgggaggccagaaaggaagctagagtaattcaattggccttggattaccatctggaaaaaatctttgtccaagccatgcaggaatttctagaaaaataccatgggaaatcaaaaggtgtcagctcttatcttcattccttctggagctcagccatcgtctctgtccttctaaaatggatcaaggatggcatgaaggtaccagctgaaaagattgcagatttaggtttaccattttttaaaaaa

SEQ ID NO: 1402 - protein, 185 aa, Streptococcus pneumoniae
  transcriptional regulator, TetR family; Cellular location: cytoplasm; Similar to strain R6 sequence 15902697 (e-102)
MSERRISEKSLENLRKSNQESNLLTREAIETALLQLLEKKELTKISISELVKRAGVSRAAFYRNYDSKEEILESVFKRTVHNIMEQLHHYDLKTDLYLVWVHLFREARKEARVIQLALDYHLEKIFVQAMQEFLEKYHGKSKGVSSYLHSFWSSAIVSVLLKWIKDGMKVPAEKIADLGLPFFKK

SEQ ID NO: 1403 - DNA, 465 bp, Streptococcus pneumoniae
atgactgaaaaaagactggcctgggatgagtattttgcagcccaagctctactaattgcgaatcgttccacttgtaaacgtgctaaagtgggcgcgattctggtaaaagataataaggttatttccactggttacaatggttcggtgtcagggactgagcattgtattgatcacgaatgtttggtcattgaaggccactgcgttcgcacccttcacgctgaggtcaatgctatccttcaaggtgctgagcgtggtgttcccaaaggctttacagcctatgtaacccattttccttgtctcaactgtacaaaacaattgcttcaggtcggctgcaagcgcgtggtttatatcaaccagtaccgaatggacgactacgcccaatacctttatcaagaaaaagggacagaattgacccatttaccacttgagacagtacagacagctcttaaagaggctgatctaatg

SEQ ID NO: 1404 - protein, 155 aa, Streptococcus pneumoniae
  cytidine and deoxycytidylate deaminase family protein; Cellular location: cytoplasm; Similar to strain R6 sequence 15902698 (2.E-89)
MTEKRLAWDEYFAAQALLIANRSTCKRAKVGAILVKDNKVISTGYNGSVSGTEHCIDHECLVIEGHCVRTLHAEVNAILQGAERGVPKGFTAYVTHFPCLNCTKQLLQVGCKRVVYINQYRMDDYAQYLYQEKGTELTHLPLETVQTALKEADLM

SEQ ID NO: 1405 - DNA, 648 bp, Streptococcus pneumoniae
ttgaaagaaggaattccaaaaatgggaaaaattgaagttattaatcacccactgattcaacacaaattgtcaatcttgcgtcgtacagatacttctacaaaagcttttcgtgagctagtagatgagattgcaatgttgatggggtatgaagtacttcgtgatcttccactagaagatgtggaaatcgaaacaccaattacaaaaacagttcaaaaacaattggcaggtaagaaattggccatcgtcccaatcttgcgtgcaggtatcgggatggttgatggtctcttgaacttggttccagctgctaaagttggccacatcggtatgtaccgtgatgaagaaacacttcaaccagttgaatacttggtgaaattgcctgaggacattgaccaacgtcaaatttttgtagtagacccaatgttggcaacaggtggctcagcaatcttggctgttgattctcttaaaaaacgtggcgcatcaaatatcaaatttgtctgccttgtatctgctccagagggtgtaaaagcccttcaagaagctcatccagatgtagaaatctttacagcagccttggatgaacgtttgaacgaacacggttatatcgttccaggtcttggagatgctggagaccgcttgttcggtacaaaa

SEQ ID NO: 1406 - protein, 216 aa, Streptococcus pneumoniae
  uracil phosphoribosyltransferase (upp); Cellular location: membrane; Similar to strain R6 sequence 15902699 (e-115)
MKEGIPKMGKIEVINHPLIQHKLSILRRTDTSTKAFRELVDEIAMLMGYEVLRDLPLEDVEIETPITKTVQKQLAGKKLAIVPILRAGIGMVDGLLNLVPAAKVGHIGMYRDEETLQPVEYLVKLPEDIDQRQIFVVDPMLATGGSAILAVDSLKKRGASNIKFVCLVSAPEGVKALQEAHPDVEIFTAALDERLNEHGYIVPGLGDAGDRLFGTK

SEQ ID NO: 1407 - DNA, 588 bp, Streptococcus pneumoniae
atgattcctgtagttattgaacaaacaagccgtggagaacgttcttacgatatttactcacgtcttctcaaagaccgcatcattatgctgacaggtccggttgaagacaatatggctaactctgttattgcccaattgcttttcttggatgcccaagatagtacaaaagatatttacctttatgtcaatacaccaggtggttctgtttcagctggtttggcaatcgtagataccatgaactttatcaaggcagatgtccaaaccattgttatgggaatggctgcatctatggggactgtcatcgcatcaagtggagcaaaaggcaaacgtttcatgcttccaaatgctgaatacatgattcaccaaccaatgggtggtacaggtggtggtacccaacaaactgatatggctatcgctgcagaacacttgctcaaaactcgtaataccttggaaaaaatcttggctgaaaattcaggtcagtcaatggaaaaagtccatgcagatgcagaacgtgataactggatgagcgcccaggaaacacttgaatatggctttattgatgaaattatggccaacaattcattgaac

SEQ ID NO: 1408 - protein, 196 aa, Streptococcus pneumoniae
  ATP-dependent Clp protease, proteolytic subunit (clpP); Cellular location: cytoplasm; Similar to strain R6 sequence 15902700 (e-108)
MIPVVIEQTSRGERSYDIYSRLLKDRIIMLTGPVEDNMANSVIAQLLFLDAQDSTKDIYLYVNTPGGSVSAGLAIVDTMNFIKADVQTIVMGMAASMGTVIASSGAKGKRFMLPNAEYMIHQPMGGTGGGTQQTDMAIAAEHLLKTRNTLEKILAENSGQSMEKVHADAERDNWMSAQETLEYGFIDEIMANNSLN

SEQ ID NO: 1409 - DNA, 96 bp, Streptococcus pneumoniae
ttgactttttcaaacatgataaatcctctttctaagaaatctctccctattataccaaaaaaagcaaacccagtcgagtttgccttctatcatcat

SEQ ID NO: 1410 - protein, 32 aa, Streptococcus pneumoniae
  hypothetical protein; Cellular location: cytoplasm
MTFSNMINPLSKKSLPIIPKKANPVEFAFYHH

SEQ ID NO: 1411 - DNA, 246 bp, Streptococcus pneumoniae
atgtttgaaaaagtcaatcgctctggcttgattatctatctttactataatcgtgatgccaaaaaactgcaggattatggagatattacctatcattccaagaaacatcgttacttacaactctatgttccaactcaagaagtggagcaattggtcggacgcttgagcaaggaaaaatttattaaaaaagttagggtttgtcatatccaagagttggaaacaccctttgtgggcaatctttatcga

SEQ ID NO: 1412 - protein, 82 aa, Streptococcus pneumoniae
  conserved hypothetical protein; Cellular location: cytoplasm; Similar to strain R6 sequence 15902701 (1.E-44)
MFEKVNRSGLIIYLYYNRDAKKLQDYGDITYHSKKHRYLQLYVPTQEVEQLVGRLSKEKFIKKVRVCHIQELETPFVGNLYR

SEQ ID NO: 1413 - DNA, 1157 bp, Streptococcus pneumoniae
atgaagaaaaaatttgccctatcgtttgtggcgcttgcaagtgtagcacttcttgcagcctgtggagaagtgaagtctggagcagtcaacactgctggtaactcagtagaggaaaagacaattaaaatcgggtttaactttgaagaatcaggttctttagctgcatacggaacagctgaacaaaaaggtgcccaattggctgttgatgaaatcaatgccgcagtggtatcgatggaaaacaaatcgaagtagtcgataaagataataagtctgaaacagctgaggctgcttcagttacaactaaccttgtaacccaatctaaagtatcagcagtcgtaggacctgcgacatctggtgcgactgcagctgcggtagcgaacgctacaaaagcaggtgttccattgatctcaccaagtgcgactcaagatggattgactaaaggtcaagattacctctttattggaactttccaagatagcttccaaggaaaaattatctcaaactatgtttctgaaaaattaaatgctaagaaagttgttctttacactgacaatgccagtgactatgctaaagggattgcaaaatctttccgcgagtcatacaagggtgaaatcgttgcagatgaaactttcgtagcaggtgacacagacttccaagcagcccttacaaaaatgaaagggaaagactttgatgctatcgttgttcctggttactataatgaggctggtaaaattgtaaaccaagcgcgtggcatgggaattgacaaaccaatcgttggtggtgatggattcaacggtgaggagtttgtacaacaagcaactgctgaaaaagcatcaaacatctactttatctcaggcttctcaactactgtagaagtttcagctaaagctaaagccttccttgacgcttaccgtgctaagtacaatgaagagccttcaacatttgcagccttggcttatgattcagttcaccttgtagcaaacgcagcaaaaggtgctaaaaattcaggtgaaatcaagaataaccttgctaaaacaaaagattttgaaggtgtaactggtcaaacaagcttcgatgcagaccacaacacagtcaaaactgcttacatgatgaccatgaacaatggtaaagttgaagcagcagaagttgtaaaacca

SEQ ID NO: 1414 - protein, 83 aa, Streptococcus pneumoniae
  branched-chain amino acid ABC transporter, amino acid-binding protein (
MKKKFALSFVALASVALLAACGEVKSGAVNTAGNSVEEKTIKIGFNFEESGSLAAYGTAEQKGAQLAVDEINAAVVSMENKSK

SEQ ID NO: 1415 - DNA, 228 bp, Streptococcus pneumoniae
ttgtctccttatttcttaaatagtctgttaagaatataccgaattatcagaaaattgtcaatgttttccttgaactttttcgatgataacgttttcctatcgataaagattgcccacaaagggtgtttccaactcttggatatgacaaaccctaacttttttaataaatttttccttgctcaagcgtccgaccaattgctccacttcttgagttggaacatagagttg

SEQ ID NO: 1416 - protein, 76 aa, Streptococcus pneumoniae
  hypothetical protein
MSPYFLNSLLRIYRIIRKLSMFSLNFFDDNVFLSIKIAHKGCFQLLDMTNPNFFNKFFLAQASDQLLHFLSWNIEL

SEQ ID NO: 1417 - DNA, 756 bp, Streptococcus pneumoniae
ttgatctcaccaagtgcgactcaagatggattgactaaaggtcaagattacctctttattggaactttccaagatagcttccaaggaaaaattatctcaaactatgtttctgaaaaattaaatgctaagaaagttgttctttacactgacaatgccagtgactatgctaaagggattgcaaaatctttccgcgagtcatacaagggtgaaatcgttgcagatgaaactttcgtagcaggtgacacagacttccaagcagcccttacaaaaatgaaagggaaagactttgatgctatcgttgttcctggttactataatgaggctggtaaaattgtaaaccaagcgcgtggcatgggaattgacaaaccaatcgttggtggtgatggattcaacggtgaggagtttgtacaacaagcaactgctgaaaaagcatcaaacatctactttatctcaggcttctcaactactgtagaagtttcagctaaagctaaagccttccttgacgcttaccgtgctaagtacaatgaagagccttcaacatttgcagccttggcttatgattcagttcaccttgtagcaaacgcagcaaaaggtgctaaaaattcaggtgaaatcaagaataaccttgctaaaacaaaagattttgaaggtgtaactggtcaaacaagcttcgatgcagaccacaacacagtcaaaactgcttacatgatgaccatgaacaatggtaaagttgaagcagcagaagttgtaaaacca

SEQ ID NO: 1418 - protein, 252 aa, Streptococcus pneumoniae
  branched chain amino acid ABC transporter, periplasmic amino acid-bindi
MISPSATQDGLTKGQDYLFIGTFQDSFQGKIISNYVSEKLNAKKVVLYTDNASDYAKGIAKSFRESYKGEIVADETFVAGDTDFQAALTKMKGKDFDAIVVPGYYNEAGKIVNQARGMGIDKPIVGGDGFNGEEFVQQATAEKASNIYFISGFSTTVEVSAKAKAFLDAYRAKYNEEPSTFAALAYDSVHLVANAAKGAKNSGEIKNNLAKTKDFEGVTGQTSFDADHNTVKTAYMMTMNNGKVEAAEVVKP

SEQ ID NO: 1419 - DNA, 867 bp, Streptococcus pneumoniae
atgctccaacaactcgtaaatggtttgattctaggtagtgtttacgcgctgttagccctaggatataccatggtttacggaattatcaagctcatcaacttcgcccatggtgatatttatatgatgggagcctttatcggttatttcttgatcaattctttccaaatgaatttctttgtagcgcttattgtagctatgctagcgacagctattcttggtgtcgtgattgagtttcttgcttaccgacctttgcgccactctactcgtattgctgttttgattacggctattggggtttctttcctattggagtatggaatggtctatctggttggtgccaatacccgtgccttccctcaagcgattcaaacagttcgatatgatttgggaccaattagcttaacaaatgtgcagttaatgattttggccatttccttgattttgatgattttgttacaagtcattgtccaaaagactaagatggggaaagccatgcgtgcagtatcagtagatagcgacgcggcgcaattgatggggatcaatgtaaaccgtacgattagctttaccttcgctttgggttctgctcttgcgggtgcggctggtgttctgattgctctttattataactctcttgagcctttgatgggggttactccaggtcttaaatctttcgttgccgcagtacttggtggtatcggaattattcctggtgcggctcttggtggctttgtgattggtctattggaaacctttgcgactgcctttgggatgtcagatttccgtgatgccattgtttatggaatcttgttgttgatcttgattgtccgcccagctggtatccttggtaagaatgtgaaagagaaggtg

SEQ ID NO: 1420 - protein, 289 aa, Streptococcus pneumoniae
  branched-chain amino acid ABC transporter, permease protein (livH); Cellular location: membrane; Similar to strain R6 sequence 15902704 (e-156)
MLQQLVNGLILGSVYALLALGYTMVYGIIKLINFAHGDIYMMGAFIGYFLINSFQMNFFVALIVAMLATAILGVVIEFLAYRPLRHSTRIAVLITAIGVSFLLEYGMVYLVGANTRAFPQAIQTVRYDLGPISLTNVQLMILAISLILMILLQVIVQKTKMGKAMRAVSVDSDAAQLMGINVNRTISFTFALGSALAGAAGVLIALYYNSLEPLMGVTPGLKSFVAAVLGGIGIIPGAALGGFVIGLLETFATAFGMSDFRDAIVYGILLLILIVRPAGILGKNVKEKV

SEQ ID NO: 1421 - DNA, 954 bp, Streptococcus pneumoniae
atgaaggaaaatttaaaagttaatattctatggttactccttttgttagctggctatagcttgattagtgtactggtttcagtcggagtacttaatctattctatgtacagattttacaacaaattggaattaatattattttggctgttggtctcaacttaatcgttggtttttcaggacaattttcacttggtcatgctggtttcatggcgattggtgcctatgcagcagctattattggttctaaatcaccaacctacggtgccttctttggagctatgcttgtaggggctttgctttcaggagcagttgccttacttgtcggcattccaaccttgcgcttgaagggggactatcttgcggtagcaactctgggtgtttctgaaattatccgtatctttatcatcaatggtggaagccttacaaatggtgcggcaggtatcttagggattcctaactttacaacttggcaaatggtttacttctttgtcgtgattacaaccattgcaaccttgaacttcttgcgtagcccaattggtcgttcaaccctctctgttcgtgaagatgaaatcgctgctgagtcagttggggttaatacgactaaaattaaaatcatcgcttttgtctttggtgccattactgcaagtattgctgggtcacttcaggcaggatttatcgggtctgttgtaccgaaagattacaccttcatcaactcaatcaacgttttgattattgttgtatttggtggactcggttccattacaggtgcgattgtttcggctattgttctgggaattttgaatatgcttctccaagatgttgctagtgtgcgtatgattatttacgctttggccttggtattggtaatgattttcagaccaggtggactccttggaacatgggaactgagcctatcacgtttctttaaaaaatctaagaaggaggaacaaaac

SEQ ID NO: 1422 - protein, 318 aa, Streptococcus pneumoniae
  branched-chain amino acid ABC transporter, permease protein (livM); Cellular location: membrane; Similar to strain R6 sequence 15902705 (e-173)
MKENLKVNILWLLLLLAGYSLISVLVSVGVLNLFYVQILQQIGINIILAVGLNLIVGFSGQFSLGHAGFMAIGAYAAAIIGSKSPTYGAFFGAMLVGALLSGAVALLVGIPTLRLKGDYLAVATLGVSEIIRIFIINGGSLTNGAAGILGIPNFTTWQMVYFFVVITTIATLNFLRSPIGRSTLSVREDEIAAESVGVNTTKIKIIAFVFGAITASIAGSLQAGFIGSVVPKDYTFINSINVLIIVVFGGLGSITGAIVSAIVLGILNMLLQDVASVRMIIYALALVLVMIFRPGGLLGTWELSLSRFFKKSKKEEQN

SEQ ID NO: 1423 - DNA, 762 bp, Streptococcus pneumoniae
atggcattacttgaagtaaaacagttaaccaaacattttggtggtctaacagctgttggagatgtgactcttgaattgaacgaaggggaactggttggattaatcggtccaaacggagctgggaaaaccacccttttcaaccttttgaccggtgtttatgaaccaagcgagggaacagtaaccctagatggtcaccttttgaatgggaaatcaccttataagattgcctctttgggacttggacgtactttccaaaatatccgtctctttaaagatttaacagttttagataatgttttgattgcttttggaaaccatcacaaacagcatgtttttactagtttcttacgcttaccagctttttacaagagtgaaaaagaattaaaggctaaagctttggaattgttgaaaatctttgatttagatggtgatgcagagactcttgctaaaaatctttcctacggacaacaacgtcgtttggaaattgttcgtgcccttgctacggaacctaaaattctcttcttagatgaaccagcagcaggtatgaacccacaggaaacagccgaattgactgagttaattcgtcgtatcaaagatgagtttaagattacaatcatgttgattgaacacgatatgaatctggtcatggaagtaacagaacgtatctacgtacttgaatatggccgtttaatcgctcaaggaactccagacgaaattaagaccaataaacgcgttatcgaagcttatctaggaggtgaagcc

SEQ ID NO: 1424 - protein, 254 aa, Streptococcus pneumoniae
  branched-chain amino acid ABC transporter, ATP-binding protein (livG); Cellular location: cytoplasm; Similar to strain R6 sequence 15902706 (e-142)
MALLEVKQLTKHFGGLTAVGDVTLELNEGELVGLIGPNGAGKTTLFNLLTGVYEPSEGTVTLDGHLLNGKSPYKIASLGLGRTFQNIRLFKDLTVLDNVLIAFGNHHKQHVFTSFLRLPAFYKSEKELKAKALELLKIFDLDGDAETLAKNLSYGQQRRLEIVRALATEPKILFLDEPAAGMNPQETAELTELIRRIKDEFKITIMLIEHDMNLVMEVTERIYVLEYGRLIAQGTPDEIKTNKRVIEAYLGGEA

SEQ ID NO: 1425 - DNA, 708 bp, Streptococcus pneumoniae
atgtctatgttaaaagttgaaaatctttctgtgcattacggtatgatccaagcagttcgtgatgtaagctttgaagttaatgaaggagaagttgtttcccttatcggtgccaacggtgcaggtaagacaactattcttcgcaccttgtcaggtttggttcgaccaagttcaggaaagattgaatttttaggtcaagaaatccaaaaaatgccagctcagaaaatcgtggcaagtggtctttcacaagttccagaaggacgccacgtctttcctggcttgactgttatggaaaatcttgaaatgggagctttcttaaagaaaaatcgtgaagaaaatcaagctaacttgaagaaggttttctcacgctttcctcgtcttgaagaacggaagaaccaagatgcagccactctttcagggggggaacaacaaatgcttgccatgggacgcgccctcatgtcaacaccaaaacttcttcttttagatgaaccatcaatgggacttgccccaatctttatccaagaaatttttgatatcattcaagatattcagaagcaaggaacaacggtcctcttgattgaacaaaatgccaataaagcacttgcaatctctgaccgaggatatgtactggaaacagggagaatcgtcctatcaggaacaggaaaagaactcgcttcatcagaagaagtcagaaaagcatatctaggtggc

SEQ ID NO: 1426 - protein, 236 aa, Streptococcus pneumoniae
  branched-chain amino acid ABC transporter, ATP-binding protein (livF); Cellular location: cytoplasm; Similar to strain R6 sequence 15902707 (e-127)
MSMLKVENLSVHYGMIQAVRDVSFEVNEGEVVSLIGANGAGKTTILRTLSGLVRPSSGKIEFLGQEIQKMPAQKIVASGLSQVPEGRHVFPGLTVMENLEMGAFLKKNREENQANLKKVFSRFPRLEERKNQDAATLSGGEQQMLAMGRALMSTPKLLLLDEPSMGLAPIFIQEIFDIIQDIQKQGTTVLLIEQNANKALAISDRGYVLETGRIVLSGTGKELASSEEVRKAYLGG

SEQ ID NO: 1427 - DNA, 654 bp, Streptococcus pneumoniae
atggcagttaaagattttatgacccgcaaggtagtttatattagtccagatataacagtatctcatgcagcagatttgatgagagagcaaggtttgcaccgtctgcctgttatcgaaaatgatcaattagttggtttggtgactgagggaaccattgcacaagcaagtccatctaaagcaacaagtctttctatctatgagatgaattatcttctgaataagacaaaagtaaaagatgtcatgattcgcgatgttgtcactgtctcaggctatgctagtctagaagatgcaacttatctgatgttgaaaaataagattagtattctccctgtcgtagataaccatcaagtatacggagttattactgaccgtgacgttttccaagcctttcttgaaattgcaggttatggcgaagaagggattcgtgtacgctttgttacagaagatgaagttggtgttcttggaaaaattgtttctttgattgtagaagaaaatttgaatatctcccatacagtcaatattccgcgtaaggatggtaaggtgattatcgaagtgcaaatcgatggatcaattgatttaccagccttgaaagaaaaatttgaagcaaatggtattcaagtggaagaaatcgctcgcacttcagcaaaagtcttg

SEQ ID NO: 1428 - protein, 218 aa, Streptococcus pneumoniae
  acetoin utilization protein AcuB, putative; Cellular location: cytoplasm; Similar to strain R6 sequence 15902708 (e-116)
MAVKDFMTRKVVYISPDITVSHAADLMREQGLHRLPVIENDQLVGLVTEGTIAQASPSKATSLSIYEMNYLLNKTKVKDVMIRDVVTVSGYASLEDATYLMLKNKISILPVVDNHQVYGVITDRDVFQAFLEIAGYGEEGIRVRFVTEDEVGVLGKIVSLIVEENLNISHTVNIPRKDGKVIIEVQIDGSIDLPALKEKFEANGIQVEEIARTSAKVL

SEQ ID NO: 1429 - DNA, 987 bp, Streptococcus pneumoniae
ttggaaaacaagatgacagaacctgatttttggaacgataatattgcggcccaaaaaacgtcgcaagaattaaatgaattaaaaaacacttacaataccttccataagatggaagagttgcaggatgaagtcgaaattttattggattttttggctgaagacgagtcagtgcatgatgaactggtagcgcagttagccgaacttgataagataatgaccagctacgagatgactctactcttgtcagaaccttatgaccacaacaatgccatcttggaaatccatccaggttctggtggtactgaggcgcaggactggggtgatatgttgcttcgtatgtatactcgttatggtaatgctaaaggctttaaagtggaagtgttggattaccaagcaggtgatgaggctggtattaagtcggtaactttatcatttgaagggcctaatgcctatggtctcctcaagtcagaaatgggtgttcaccgcttagtgcgaatctcaccatttgactctgccaaacgtcgccatacctctttcacatctgtagaagtgatgccagaattggatgatactattgaagtggaaatccgtgaagatgatatcaagatggataccttccgttcaggtggtgccggtggacaaaacgtcaataaggtttcaacaggtgtacgtttaacccacattccaactggaattgttgtccaatcaacagtagatcgtacccagtatggaaatagagatcgtgccatgaagatgttgcaggctaagctctatcaaatggagcaagataagaaggctgcggaggtagattctctcaaaggtgagaaaaaggagatcacttggggaagccaaatccgttcttatgtcttcacgccttatactatggtaaaagatcaccgaactagctttgaggttgctcaggtagataaggttatggatggggacctagatggttttatcgatgcttatctcaagtggcgaattagc

SEQ ID NO: 1430 - protein, 329 aa, Streptococcus pneumoniae
  peptide chain release factor 2, FRAMESHIFT (prfB); Cellular location: cytoplasm; Similar to strain R6 sequence 15902709 (0.E+01)
MENKMTEPDFWNDNIAAQKTSQELNELKNTYNTFHKMEELQDEVEILLDFLAEDESVHDELVAQLAELDKIMTSYEMTLLLSEPYDHNNAILEIHPGSGGTEAQDWGDMLLRMYTRYGNAKGFKVEVLDYQAGDEAGIKSVTLSFEGPNAYGLLKSEMGVHRLVRISPFDSAKRRHTSFTSVEVMPELDDTIEVEIREDDIKMDTFRSGGAGGQNVNKVSTGVRLTHIPTGIVVQSTVDRTQYGNRDRAMKMLQAKLYQMEQDKKAAEVDSLKGEKKEITWGSQIRSYVFTPYTMVKDHRTSFEVAQVDKVMDGDLDGFIDAYLKWRIS

SEQ ID NO: 1431 - DNA, 690 bp, Streptococcus pneumoniae
atgtcaattattgaaatgagagatgtcgttaaaaaatacgacaacggaacaactgctctacgcggtgtttcggttagcgttcaaccgggggaatttgcttacatcgtaggaccttcaggagcagggaagtcaacttttattcgttctctgtatcgtgaagtaaaaatcgataaaggaagcctatcagttgctggttttaatctggttaagatcaaaaagaaagatgtcccgcttctacgtcgtagtgttggggttgtcttccaggattataaattgttaccaaagaaaactgtctatgaaaatattgcttacgctatggaagtaatcggggaaaatcgccgtaatatcaaaagacgagtgatggaagttttggacttggttggattgaagcataaggttcgttctttcccaaatgaactctcaggtggggagcaacagcggattgcgattgcgcgtgcaattgtaaataatcccaaagtattgatagctgatgagccaacaggaaatctggatccggataattcatgggaaattatgaatctcttggaacggattaacctacaaggaacaactattttgatggcgactcataatagccagattgtaaataccttgcgccaccgtgtcattgccattgaaaatggccgtgtcgttcgtgacgaatcaaaaggagagtatggatacgatgat

SEQ ID NO: 1432 - protein, 230 aa, Streptococcus pneumoniae
  cell division ABC transporter, ATP-binding protein FtsE (ftsE); Cellular location: cytoplasm; Similar to strain R6 sequence 15902710 (e-128)
MSIIEMRDVVKKYDNGTTALRGVSVSVQPGEFAYIVGPSGAGKSTFIRSLYREVKIDKGSLSVAGFNLVKIKKKDVPLLRRSVGVVFQDYKLLPKKTVYENIAYAMEVIGENRRNIKRRVMEVLDLVGLKHKVRSFPNELSGGEQQRIAIARAIVNNPKVLIADEPTGNLDPDNSWEIMNLLERINLQGTTILMATHNSQIVNTLRHRVIAIENGRVVRDESKGEYGYDD

SEQ ID NO: 1433 - DNA, 987 bp, Streptococcus pneumoniae
gtgtcattgccattgaaaatggccgtgtcgttcgtgacgaatcaaaaggagagtatggatacgatgattagtagattttttcgccatttatttgaagccttaaaaagtttgaaacgaaatggttggatgacagtagctgctgtcagttcagtcatgattactttgaccttggtggcaatatttgcatctgttattttcaatacagcgaaactagctacagatattgaaaataatgtccgtgtagtagtttatatccgaaaggatgtggaagataatagtcagacaattgaaaaagaaggtcaaactgttacaaataatgactaccacaaggtatatgattctttgaagaacatgtctacggttaaaagtgttaccttttcaagtaaagaagaacaatatgaaaaattaaccgagataatgggagataactggaaaatctttgaaggagatgccaatcctctctatgatgcctatattgtagaggcaaacactccaaatgatgtaaaaactatagccgaagatgctaaaaaaattgaaggtgtctctgaggttcaagatggcggtgccaatacagaaagactcttcaagttagcttcatttatccgtgtttggggactagggattgctgctttgttaatttttatcgcagttttcttgatttcaaataccattcgtattaccattatttcccgcagtcgcgaaattcaaatcatgcgcttggtcggagctaaaaacagttatatccgtggaccgttcttgttagaaggagcctttatcggtttattgggagctatcgcaccatctgttttggtctttattgtttatcaaattgtttaccaatctgtcaacaaatcgttggtagggcaaaatctatccatgattagtccagatttatttagtccgttgatgattgccctactatttgtgattggggttttcattggttcattgggatcaggaatatccatgcgccgattcttgaagatt

SEQ ID NO: 1434 - protein, 329 aa, Streptococcus pneumoniae
  cell division ABC transporter, permease protein FtsX (ftsX); Cellular location: membrane; Similar to strain R6 sequence 15902711 (e-169)
MSLPLKMAVSFVTNQKESMDTMISRFFRHLFEALKSLKRNGWMTVAAVSSVMITLTLVAIFASVIFNTAKLATDIENNVRVVVYIRKDVEDNSQTIEKEGQTVTNNDYHKVYDSLKNMSTVKSVTFSSKEEQYEKLTEIMGDNWKIFEGDANPLYDAYIVEANTPNDVKTIAEDAKKIEGVSEVQDGGANTERLFKLASFIRVWGLGIAALLIFIAVFLISNTIRITIISRSREIQIMRLVGAKNSYIRGPFLLEGAFIGLLGAIAPSVLVFIVYQIVYQSVNKSLVGQNLSMISPDLFSPLMIALLFVIGVFIGSLGSGISMRRFLKI

SEQ ID NO: 1435 - DNA, 2178 bp, Streptococcus pneumoniae
atgatgaaagatacattcaaaaatgtcttgtctttcgaattttggcaaaaattcggtaaggctttgatggtagttatcgcggttatgccggctgctggtttgatgatttcaatcggtaagtctatcgtgatgattaacccaacctttgcaccacttgtcatcacaggtggaattcttgagcaaatcggttggggggttatcggtaaccttcacattttgtttgccctagccattggaggaagctgggctaaagaacgtgctggtggtgctttcgccgctggtcttgccttcatcttgattaaccgtatcactggtacaatctttggtgtatcaggcgatatgttgaaaaatccagatgctatggtaactactttctttggtggttcaatcaaagttgctgattactttatcagtgttcttgaagctccagccttgaacatgggggtattcgtagggattatctcaggttttgtaggggcaactgcttacaacaaatactacaacttccgtaaacttcctgatgcactttcattcttcaacgggaaacgtttcgtaccatttgtagttattcttcgttcagcaatcgctgcaattctacttgctgctttctggccagtagttcaaacaggtatcaataacttcggtatctggattgccaactcacaagaaactgctccaattcttgcaccattcttgtatggtactttggaacgtttgctcttgccatttggtcttcaccacatgttgactatcccaatgaactacacagctcttggtggtacttatgacattttaactggtgcagctaaaggtactcaagtattcggtcaagacccactatggcttgcatgggtaacagaccttgtaaaccttaaaggtactgatgctagtcaatatcaacacttgttagatacagtacatccagctcgtttcaaagttggacaaatgatcggttcattcggtatcttgatgggtgtgattgttgctatctaccgtaatgttgatgctgacaagaaacataaatacaaaggtatgatgattgcaacagctcttgcaacattcttgacaggggttactgaaccaatcgaatacatgttcatgttcatcgcaacacctatgtatcttgtttactcacttgttcaaggtgctgccttcgctatggctgacgtcgtaaacctacgtatgcactcattcggttcaatcgagttcttgactcgtacacctattgcaatcagtgctggtattggtatggatatcgttaacttcgtttgggtaactgttctctttgctgtaatcatgtactttatcgcaaacttcatgattcaaaaattcaactacgcaactccagggcgcaacggaaactacgaaactgctgaaggttcagaagaaaccagcagcgaagtgaaagttgcagcaggctctcaagctgtaaacattatcaaccttcttggtggacgtgtaaacatcgttgatgttgatgcatgtatgactcgtcttcgtgtaactgttaaagatgcagataaagtaggaaatgcagagcaatggaaagcagaaggagctatgggtcttgtcatgaaaggacaaggggttcaagctatctacggtccaaaagctgacattttgaaatctgatatccaagatatccttgattcaggtgaaatcattcctgaaactcttccaagccaaatgactgaagcacaacaaaacactgttcacttcaaagatcttactgaggaagtttactcagtagcagacggtcaagttgttgctttggaacaagtaaaggatccagtatttgctcaaaaaatgatgggtgatggatttgcagtagaacctgcaaatggaaacattgtatctccagtttcaggtactgtgtcaagcatcttcccaacaaaacatgcttttggtattgtgacggaagcaggtcttgaagtattggttcacattggtttggacacagtaagtcttgaaggtaaaccatttacagttcatgttgctgaaggacaaaaagttgcagcaggagatctccttgtcacagctgacttggatgctatccgtgcagcaggacgtgaaacttcaacagtagttgtcttcacaaatggtgatgcaattaaatcagttaagttagaaaaaacaggttctcttgcagctaaaacagcagttgctaaagtagaattg

SEQ ID NO: 1436 - protein, 726 aa, Streptococcus pneumoniae
  PTS system, IIABC components; Cellular location: membrane; Similar to strain R6 sequence 15902712 (0.E+01)
MMKDTFKNVLSFEFWQKFGKALMVVIAVMPAAGLMISIGKSIVMINPTFAPLVITGGILEQIGWGVIGNLHILFALAIGGSWAKERAGGAFAAGLAFILINRITGTIFGVSGDMLKNPDAMVTTFFGGSIKVADYFISVLEAPALNMGVFVGIISGFVGATAYNKYYNFRKLPDALSFFNGKRFVPFVVILRSAIAAILLAAFWPVVQTGINNFGIWIANSQETAPILAPFLYGTLERLLLPFGLHHMLTIPMNYTALGGTYDILTGAAKGTQVFGQDPLWLAWVTDLVNLKGTDASQYQHLLDTVHPARFKVGQMIGSFGILMGVIVAIYRNVDADKKHKYKGMMIATALATFLTGVTEPIEYMFMFIATPMYLVYSLVQGAAFAMADVVNLRMHSFGSIEFLTRTPIAISAGIGMDIVNFVWVTVLFAVIMYFIANFMIQKFNYATPGRNGNYETAEGSEETSSEVKVAAGSQAVNIINLLGGRVNIVDVDACMTRLRVTVKDADKVGNAEQWKAEGAMGLVMKGQGVQAIYGPKADILKSDIQDILDSGEIIPETLPSQMTEAQQNTVHFKDLTEEVYSVADGQVVALEQVKDPVFAQKMMGDGFAVEPANGNIVSPVSGTVSSIFPTKHAFGIVTEAGLEVLVHIGLDTVSLEGKPFTVHVAEGQKVAAGDLLVTADLDAIRAAGRETSTVVVFTNGDAIKSVKLEKTGSLAAKTAVAKVEL

SEQ ID NO: 1437 - DNA, 117 bp, Streptococcus pneumoniae
ttgaggttggaagctgtattccaacctcttattttgggagaaaagaatgaaatttttaacactcaatactcacagttggatggagaaagaagcagaggaaaaattccagattttgct

SEQ ID NO: 1438 - protein, 39 aa, Streptococcus pneumoniae
  hypothetical protein; Cellular location: cytoplasm
MRLEAVFQPLILGEKNEIFNTQYSQLDGERSRGKIPDFA

SEQ ID NO: 1439 - DNA, 684 bp, Streptococcus pneumoniae
atgacctcgtcagaggtggaggttaatgacctttatcaagctttgccagcagctgagcctattcaccaagaccattatgttagactcttggttgaaaagttgtctgagcaagggaaaaattactactggacctgggcctataaccatatcggctataaccgctaccacgaaggtgtggctatcttgtctaaaacacctattgaagccagagaaattttggtttcagatgtggatgatccaacagactatcatactcgccgtgttgccctagctgaaactgtagtcgatggcaaggagctagcagttgccagtgttcatctctcttggtgggataaaggtttccaagaagaatgggcacgatttgaggctgtcttgaaaaaattgaacaagccacttttactagctggagatttcaacaatccggctggacaggaaggttaccaagctattttagctagtccattaggcttacaagacgcatttgaagttgctcaagagaaaagtggtagctatactgttccgcctgaaattgatggctggaaagggaacactgaaccccttcgaatcgattatgtctttactaccaaagagttagcggtggaaaatttacatgtcgtatttgatggtaacaagagtccacaagtgagtgatcactatggcttgaatgctatattaaactggaaa

SEQ ID NO: 1440 - protein, 228 aa, Streptococcus pneumoniae
  hypothetical protein; Cellular location: cytoplasm; Similar to strain R6 sequence 15902713 (e-133)
MTSSEVEVNDLYQALPAAEPIHQDHYVRLLVEKLSEQGKNYYWTWAYNHIGYNRYHEGVAILSKTPIEAREILVSDVDDPTDYHTRRVALAETVVDGKELAVASVHLSWWDKGFQEEWARFEAVLKKLNKPLLLAGDFNNPAGQEGYQAILASPLGLQDAFEVAQEKSGSYTVPPEIDGWKGNTEPLRIDYVFTTKELAVENLHVVFDGNKSPQVSDHYGLNAILNWK

SEQ ID NO: 1441 - DNA, 1341 bp, Streptococcus pneumoniae
atgtcatttacgaaatttcaatttaaaaactatattagagaagccttgaaggagttaaaatttacaactccaacagaggtgcaagacaagttgattcctattgttttggcaggtcgtgacctagtaggagaatcaaaaacaggttcaggtaagactcatactttcttgttaccgattttccagcaattagatgaagctagcgatagtgtacaagcagtgattactgcaccgagtcgtgagttggctactcaaatttaccaagtagcgcgtcagatttcagctcactcagatgtcgaagttcgtgtggttaattatgtgggtggtacggataaggctcgccagattgagaaattggcaagcaatcagcctcatattgttattggaacaccaggccgtatctacgacttggttaaatctggtgatttagctattcataaagccaagacatttgttgttgatgaagcagatatgaccttggatatgggattcttggaaactgttgataagattgctggcagtcttccaaaagacttgcaattcatggtcttctcagcgactatcccacaaaaactgcaaccattcttgaaaaaatacttatcaaatcctgttatggagaaaattaagaccaaaacggttatttctgacaccattgataattggttgatttcgaccaagggacatgataagaatgctcaaatttaccagttgactcagttgatgcagccgtatttggcaatgatttttgttaacactaaaacgcgtgctgatgaattgcattcatatctgactgctcaaggcttgaaggttgcaaaaatccatggcgatattgcccctcgtgaacgcaagcgaatcatgaatcaggtgcaaaatctggattttgagtatattgtcgcaacagatttggcagcgcgtgggattgacattgaaggtgtcagccatgtcatcaatgatgccattccgcaagacttatctttttttgttcatcgtgttggtcgtactggacgaaatggcctaccaggtacagctattaccctttatcagccaagtgatgactcggatatccgtgagttggagaaattgggaatcaagtttagtcctaagatggtcaaagacggggaatttcaagatacctatgaccgtgatcgtcgtgccaaccgtgagaaaaaacaagataaacttgatatcgaaatgattggtttggttaaaaagaaaaagaaaaaagtcaaaccgggttataagaagaaaattcaatgggcggttgatgaaaagcgccgtaaaaccaagcgtgctgaaaatcgcgctcgcggtcgtgcagagcgtaaagctaaacgccaaacattt

SEQ ID NO: 1442 - protein, 447 aa, Streptococcus pneumoniae
  ATP-dependent RNA helicase, DEAD/DEAH box family; Cellular location: cytoplasm; Similar to strain R6 sequence 15902714 (0.E+01)
MSFTKFQFKNYIREALKELKFTTPTEVQDKLIPIVLAGRDLVGESKTGSGKTHTFLLPIFQQLDEASDSVQAVITAPSRELATQIYQVARQISAHSDVEVRVVNYVGGTDKARQIEKLASNQPHIVIGTPGRIYDLVKSGDLAIHKAKTFVVDEADMTLDMGFLETVDKIAGSLPKDLQFMVFSATIPQKLQPFLKKYLSNPVMEKIKTKTVISDTIDNWLISTKGHDKNAQIYQLTQLMQPYLAMIFVNTKTRADELHSYLTAQGLKVAKIHGDIAPRERKRIMNQVQNLDFEYIVATDLAARGIDIEGVSHVINDAIPQDLSFFVHRVGRTGRNGLPGTAITLYQPSDDSDIRELEKLGIKFSPKMVKDGEFQDTYDRDRRANREKKQDKLDIEMIGLVKKKKKKVKPGYKKKIQWAVDEKRRKTKRAENRARGRAERKAKRQTF

SEQ ID NO: 1443 - DNA, 1188 bp, Streptococcus pneumoniae
atgtcagagcgtaaattattcacgtctgaatctgtatctgaggggcatccggataagattgcagaccaaatttcagatgcgattttggatgctattttagcaaaggatccagaggcgcacgttgctgctgaaacagctgtatatactggttctgtccacgtttttggtgaaatttctacaaatgcctatgtggatattaaccgtgtggttcgtgataccattgcagagattggttataccaatacagaatatggattttctgctgagacggtgggagtacacccatctttggtggaacaatctcctgacatcgctcaaggtgttaacgaagccttggaggttcgtggaaatgctgatcaagatccactggacttgattggagcaggtgaccaagggctcatgtttggatttgcagtagatgaaacagaagagcttatgccattgccaattgcactcagtcataaattggttcgtcgtctggcagaacttcgtaagtctggagaaattagctatctccgtccagatgcaaaatcacaagttacagttgagtacgatgaaaatgaccgtccggtacgtgtagatacagtcgttatttctactcagcatgatccagaggccactaatgaacaaatccatcaagatgtgattgacaaggtcatcaaagaagttattccatcttcttatcttgatgataagacaaaattctttatcaatccgacaggtcgttttgtaatcggtggtcctcaaggggactcaggtttgactggtcgtaagattattgtagatacttatggtggctactctcgtcatggtggtggtgccttctctggtaaagatgcgactaaggtggatcgttcagcctcttatgcggctcgctatattgccaagaatatcgttgcagcagaccttgctaagaaggcagaagtgcagttggcctatgctatcggtgttgcgcaacctgtttctgttcgtatcgatactttcggtacaggaacagtagctgaaagtcaacttgaaaaagcggctcgtcaaatctttgaccttcgccctgcagggattatccaaatgctggacctcaagcgtccaatttaccgtcaaacatcggcttacggtcacatgggacgtacagatattgatcttccatgggaacgtttggataaggtagatgctttgaaagaagcagtaaaa

SEQ ID NO: 1444 - protein, 396 aa, Streptococcus pneumoniae
  S-adenosylmethionine synthetase (metK); Cellular location: cytoplasm; Similar to strain R6 sequence 15902715 (0.E+01)
MSERKLFTSESVSEGHPDKIADQISDAILDAILAKDPEAHVAAETAVYTGSVHVFGEISTNAYVDINRVVRDTIAEIGYTNTEYGFSAETVGVHPSLVEQSPDIAQGVNEALEVRGNADQDPLDLIGAGDQGLMFGFAVDETEELMPLPIALSHKLVRRLAELRKSGEISYLRPDAKSQVTVEYDENDRPVRVDTVVISTQHDPEATNEQIHQDVIDKVIKEVIPSSYLDDKTKFFINPTGRFVIGGPQGDSGLTGRKIIVDTYGGYSRHGGGAFSGKDATKVDRSASYAARYIAKNIVAADLAKKAEVQLAYAIGVAQPVSVRIDTFGTGTVAESQLEKAARQIFDLRPAGIIQMLDLKRPIYRQTSAYGHMGRTDIDLPWERLDKVDALKEAVK

SEQ ID NO: 1445 - DNA, 126 bp, Streptococcus pneumoniae
ttgactattgcaaggttttctagagcaacagagtcatggaatggactcatggttgagatttctccttgttgcttggacttcattcaaaagtctgttacccaagccttgttcaaacttctaatacac

SEQ ID NO: 1446 - protein, 42 aa, Streptococcus pneumoniae
  hypothetical protein; Cellular location: cytoplasm
MTIARFSRATESWNGLMVEISPCCLDFIQKSVTQALFKLLIH

SEQ ID NO: 1447 - DNA, 933 bp, Streptococcus pneumoniae
atggtatcaacgaaaacacaaattgctggttttgagtttgacaattgcttgatgaatgcagcaggtgtggcttgtatgacgatagaggagttagaagaggtcaaaaactcagcggcaggaacctttgttactaagacagcgaccttggacttccgtcaggggaatcctgagccacgctaccaagatgttccacttggttccatcaactctatgggcttgccaaataatggcttagactattatttggattatcttttagatttgcaggaaaaagagtcgaaccgaactttcttcttatctctggtcggcatgtctccagaggaaacccatactattttgaaaaaagtccaagagagtgattttcgtggtctgactgagctaaatctttcctgtccaaatgttccaggtaaacctcagattgcctatgattttgagacaacagaccggattttggcagaagtgtttgcttacttcaccaaacctcttggaattaaattgccaccttattttgatattgttcactttgaccaagcggcagctattttcaacaaatatccgctcaagtttgtcaactgcgttaactctatcggaaacggcctctatatagaagacgaatctgtcgttattcggcctaagaatggttttggtggaattggtggagaatacatcaaaccgactgctttagccaatgttcacgccttttatcaacgtttaaatcctcaaatccaaattatcggaacaggtggcgttctgactggtcgagatgcctttgaacacatcctctgtggagcaagtatggtgcaggtgggaacgacccttcacaaagaaggcgtcagtgcttttgaccgcattaccaatgaactgaaagcaatcatggtggaaaaaggctacgagagcttagaagatttccgtgggaaattgcgctatattgac

SEQ ID NO: 1448 - protein, 311 aa, Streptococcus pneumoniae
  dihydroorotate dehydrogenase A (pyrDa); Cellular location: cytoplasm; Similar to strain R6 sequence 15902716 (0.E+01)
MVSTKTQIAGFEFDNCLMNAAGVACMTIEELEEVKNSAAGTFVTKTATLDFRQGNPEPRYQDVPLGSINSMGLPNNGLDYYLDYLLDLQEKESNRTFFLSLVGMSPEETHTILKKVQESDFRGLTELNLSCPNVPGKPQIAYDFETTDRILAEVFAYFTKPLGIKLPPYFDIVHFDQAAAIFNKYPLKFVNCVNSIGNGLYIEDESVVIRPKNGFGGIGGEYIKPTALANVHAFYQRLNPQIQIIGTGGVLTGRDAFEHILCGASMVQVGTTLHKEGVSAFDRITNELKAIMVEKGYESLEDFRGKLRYID

SEQ ID NO: 1449 - DNA, 1035 bp, Streptococcus pneumoniae
atgctagccattgaagaaagtcagaagttgactttatcaaatttaccgagcctgagcctatttacagggacagatcagggtcagtttgaagtgatgaagagtcaaatgttgaaacagattgggtatgattctgctgacctcaactttgcctactttgatatgaaagaagtagtttacaaggatgtggaactggagttggtcagccttcctttctttgcggatgagaaaatcgtgatattagattattttatggatatcacgactgctaagaaacgctttttgacagatgatgagcttaagtcatttgaggaataccttgacaatccttctccaacaaccaagttgataatctttgcagaaggaaagctggatagcaaaagacggttagtcaaattacttaagcgtgatgccaaggccttcgatgcagtagaagtaaaagaacaagaattgcgccagtacttccaaaagtggagtcagaaacaaggtctgcagtttaccaatcattcttttgaaaatctcctcatcaagtcggggtttcaatttagcgaaatccagaaaaatcttctctttttacagtcctataaggcgaattctgttattgaggaagaggatattgttaacgcaattcccaagaccttgcaggacaatatttttgatttaactcagtttattctgactaaaaagatggatcaggcgcgcgatttggtgagagacttgaccttgcaaggggaagatgaaatcaaactgattgcagtcatgctgggacaatttcggacttttactcaggtgaagattttggcggagtctggccaaacagaatcgcagattgcaagtagtttaggtagttatctgggacgtaacccaaatccttatcaaatcaagtttgcattaagagattcgagaggactttctttgagctttttgaagcaagctatttcctatttgattgagacagactatcagattaagacaggtctttatgaaaaaggtttcctttttgaaaaggcactcttacagattgctagtcaggtcaat

SEQ ID NO: 1450 - protein, 345 aa, Streptococcus pneumoniae
  conserved hypothetical protein (DNA polymerase III, delta); Cellular location: cytoplasm; Similar to strain R6 sequence 15902717 (0.E+01)
MLAIEESQKLTLSNLPSLSLFTGTDQGQFEVMKSQMLKQIGYDSADLNFAYFDMKEVVYKDVELELVSLPFFADEKIVILDYFMDITTAKKRFLTDDELKSFEEYLDNPSPTTKLIIFAEGKLDSKRRLVKLLKRDAKAFDAVEVKEQELRQYFQKWSQKQGLQFTNHSFENLLIKSGFQFSEIQKNLLFLQSYKANSVIEEEDIVNAIPKTLQDNIFDLTQFILTKKMDQARDLVRDLTLQGEDEIKLIAVMLGQFRTFTQVKILAESGQTESQIASSLGSYLGRNPNPYQIKFALRDSRGLSLSFLKQAISYLIETDYQIKTGLYEKGFLFEKALLQIASQVN

SEQ ID NO: 1451 - DNA, 603 bp, Streptococcus pneumoniae
atggctattatcttaccagaacttccatatgcatacgacgctttggaaccatacatcgatgcggaaacaatgcatttgcaccatgacaaacaccatcaaacttatgtcaacaatgccaatgcagctttagaaaaacaccctgaaatcggtgaagaccttgaagccttgcttgctgatgtagaatctatcccagctgatatccgtcaagcacttatcaacaatggtggcggacacttgaaccacgctcttttctgggaattgatgactcccgagaaaacagctccttcagcagaactggcagcagcaatcgatgcaacatttggttcatttgaagaattccaagcagccttcactgcagcagcaacaactcgttttggttcaggttgggcatggttggttgtcaacaaagaagggaaacttgaagtgacttcaacagcaaaccaagacacaccaatctcagaaggtaaaaaaccaatcttgggcttggacgtttgggaacatgcttactacgtgaaataccgcaacgtgcgtcctgactacatcaaagctttcttttcagtaatcaactggaataaagtagatgaattgtacgcagctgctaaa

SEQ ID NO: 1452 - protein, 201 aa, Streptococcus pneumoniae
  superoxide dismutase, manganese-dependent (sodA); Cellular location: cytoplasm; Similar to strain R6 sequence 15902718 (e-117)
MAIILPELPYAYDALEPYIDAETMHLHHDKHHQTYVNNANAALEKHPEIGEDLEALLADVESIPADIRQALINNGGGHLNHALFWELMTPEKTAPSAELAAAIDATFGSFEEFQAAFTAAATTRFGSGWAWLVVNKEGKLEVTSTANQDTPISEGKKPILGLDVWEHAYYVKYRNVRPDYIKAFFSVINWNKVDELYAAAK

SEQ ID NO: 1453 - DNA, 510 bp, Streptococcus pneumoniae
atgcgaaaagaaattgcacctgaattatacaactataacaagtttcctggtccggagttccatttacacggggacaaggtcgaaacggaagggatagctttttccttggttgaaaatatcaaggatgcctttgatgtgacgacttttaatcagcgtttttcagaagtattaaccaagtttgattatatcgtgggggactggagcaacgaacagcttcgcctacgaggtttttacaaggatgaccgaacagaagaaaaacttgaaaaaatcagtcgtttacaagactaccttttagagtattgtagttatggttgtgcctattttgtcttagaaaatgaagcccctaagcgagcatcatttgacaagaaaatgcgtaagacggaagaagaaacaccttctagaaaaggaaagaaaccgactcaaactaaacgaaagtcgaatgcagataagaaaaatagacgtcgtcagaaagacgacaagggacaacgtcattttgtcattcgtcagaag

SEQ ID NO: 1454 - protein, 170 aa, Streptococcus pneumoniae
  conserved hypothetical protein; Cellular location: cytoplasm; Similar to strain R6 sequence 15902719 (7.E-96)
MRKEIAPELYNYNKFPGPEFHLHGDKVETEGIAFSLVENIKDAFDVTTFNQRFSEVLTKFDYIVGDWSNEQLRLRGFYKDDRTEEKLEKISRLQDYLLEYCSYGCAYFVLENEAPKRASFDKKMRKTEEETPSRKGKKPTQTKRKSNADKKNRRRQKDDKGQRHFVIRQK

SEQ ID NO: 1455 - DNA, 1083 bp, Streptococcus pneumoniae
atgaaaccctcaattcatagtttggtacatcaaaccatgcaggaatgggtattggagcagggagaaaagaaattccgtgcagatcaaatctgggaatggctctaccgtaaacgtgtgcagtcatttgaagaaatgaccaacctttccaaggatttgattgctaagctcaatgaccagtttgtggtcaatcccttgaaacaacgtattgtgcaagagtctgctgatggtacagtcaaatatctctttgaattgcccgacggtatgttaattgagactgtactcatgcgtcaacactatggtttatctgtctgtgtgaccactcaggtcggctgtaatatcggttgtaccttctgtgcctctggtttgattaagaagcaacgtgacctcaataacggtgaaatcgtagcgcaaatcatgctggttcagaaatactttgatgagcgtggtcaggatgaacgcatcagccatatcgttgtcatgggaatcggtgagccctttgataattacaacaatgtcttgaatttctttcgtactatcaatgatgataaaggaatggctatcggtgctcgtcacatcacggtttcaacctcaggtttggctcataaaattcgtgactttgctgatgaaggggttcaggtcaatcttgccgtgtctcttcacgcacctaacaatgaacttcgttcaagtatcatgaagattaaccgtgcctttccgattgaaaaactctttgctgctattgaatactacattgagacaacaaaccgtcgtgtaacctttgaatatatcatgcttaatgaagtcaacgacggtgtagaacaagccttggaattgactgaattgctcaagaacatcaagaaattgtcttatgtaaacttgattccttataacccagttagtgagcatgaccaatatagccgtagtcccaaagagtgcgtgttggctttctatgatacgcttaagaaaaaaggggtcaactgtgtggttcgtcaagagcatggtacagatattgacgcagcttgtggacaattgcgctctaacacaatgaaacgtgaccgccagaaggcagtcgcagcggtaaatcct

SEQ ID NO: 1456 - protein, 361 aa, Streptococcus pneumoniae
  conserved hypothetical protein; Cellular location: cytoplasm; Similar to strain R6 sequence 15902720 (0.E+01)
MKPSIHSLVHQTMQEWVLEQGEKKFRADQIWEWLYRKRVQSFEEMTNLSKDLIAKLNDQFVVNPLKQRIVQESADGTVKYLFELPDGMLIETVLMRQHYGLSVCVTTQVGCNIGCTFCASGLIKKQRDLNNGEIVAQIMLVQKYFDERGQDERISHIVVMGIGEPFDNYNNVLNFFRTINDDKGMAIGARHITVSTSGLAHKIRDFADEGVQVNLAVSLHAPNNELRSSIMKINRAFPIEKLFAAIEYYIETTNRRVTFEYIMLNEVNDGVEQALELTELLKNIKKLSYVNLIPYNPVSEHDQYSRSPKECVLAFYDTLKKKGVNCVVRQEHGTDIDAACGQLRSNTMKRDRQKAVAAVNP

SEQ ID NO: 1457 - DNA, 477 bp, Streptococcus pneumoniae
atgaagaagacttataatcatattttggtctggggagtcattttctatagcatttgcattgtctgtttttgctttactcctcaagaacaatctaccgtgggagtgggaactccaggtattcagcatcttggacgcctggtttttcttttgactcctttcaattctctctggaaactgggcgaagtgagtgacattggacaattatgttggatttttttacaaaatatcctcaatgtcttcttgttttttcctctgattttccaactcctttatctatttccaaatttgcggaaaacaaaaaaggtccttctttttagttttcttgtgagtcttggaatcgagtgtacgcaattaatcttggactttttctttgatttcaatcgcgtctttgagattgatgatttgtggaccaacactttgggtggctatctggcttggctcctttataaacgattacataaaaacaaggtaaggaat

SEQ ID NO: 1458 - protein, 159 aa, Streptococcus pneumoniae
  VanZF-related protein; Cellular location: membrane; Similar to strain R6 sequence 15902721 (4.E-80)
MKKTYNHILVWGVIFYSICIVCFCFTPQEQSTVGVGTPGIQHLGRLVFLLTPFNSLWKLGEVSDIGQLCWIFLQNILNVFLFFPLIFQLLYLFPNLRKTKKVLLFSFLVSLGIECTQLILDFFFDFNRVFEIDDLWTNTLGGYLAWLLYKRLHKNKVRN

SEQ ID NO: 1459 - DNA, 1539 bp, Streptococcus pneumoniae
atgagtattttagaagttaaaaatctgagtcacggttttggtgaccgtgcaatttttgaagatgtgtccttccgtctcctcaagggagaacatatcggcctggtcggtgccaatggtgaaggaaaatcaacctttatgagtatcgtgactggtaaaatgctgccagatgaaggaaaggttgagtggtccaaatatgtgacggctggttacttggatcagcactctgtccttgctgaaagacagtcggtgcgtgatgttctccgtacggcttttgatgagcttttcaaagctgaagctcgtatcaatgacctctatatgaaaatggctgaagacggcgcggatgttgatgctctcatggaagaagtaggagaacttcaagaccgtctggagagtcgtgatttctataccttggatgctaagattgacgaagtagcgcgtgctcttggtgttatggactttggcatggatacggatgtaacttctttgtcaggtgggcaaagaaccaaggtgcttttggcaaaacttctccttgaaaagcctgatatcttgctgttggacgagccgaccaactacttggatgctgagcatattgattggctcaagcgctatctccaaaactatgagaatgcctttgttctcatttcgcacgatattccattcctcaatgacgttattaatattgtctatcatgtggaaaatcaacagctgacgcgttactctggtgactactaccagttccaagaagtttatgctatgaagaaatctcagctagaggcagcctacgaacgccagcagaaagagattgcagacctcaaggactttgtggctcgtaataaagcccgtgttgcaactcgtaatatggctatgtctcgtcaaaagaaattggataagatggatattatcgaactccaaagtgagaaaccaaaaccatcctttgatttcaaaccagctcgtacaccagggcgctttatcttccaagccaagaacttgcaaattggttacgaccgtcctcttactaagcctttaaatcttaccttcgaacgcaatcaaaaggttgcgattattggtgctaatggtattggaaaaacaactctcttgaagagtctcttgggcattatctcgccaatcgctggggaagtggagcgtggagattatttagaacttggttattttgagcaggaagtagaaggcggtaatcgccaaactcctcttgaagctgtctggaatgcctttcctgcccttaatcaagcagaagtccgtgcagcccttgcccgttgtggtttgacaaccaaacatattgaaagccagattcaagtattatcagggggagagcaagccaaggttcgtttctgtctcttgatgaatcgtgaaaacaacgttttagtgctggacgagccgaccaaccatttggatgtggatgcaaaggatgagctcaaacgcgctctcaaagaatataggggatctatccttatggtctgccacgagccagacttttatgaaggctggatagaccaaatatgggattttaataatttaact

SEQ ID NO: 1460 - protein, 513 aa, Streptococcus pneumoniae
  ABC transporter, ATP-binding protein; Cellular location: cytoplasm; Similar to strain R6 sequence 15902722 (0.E+01)
MSILEVKNLSHGFGDRAIFEDVSFRLLKGEHIGLVGANGEGKSTFMSIVTGKMLPDEGKVEWSKYVTAGYLDQHSVLAERQSVRDVLRTAFDELFKAEARINDLYMKMAEDGADVDALMEEVGELQDRLESRDFYTLDAKIDEVARALGVMDFGMDTDVTSLSGGQRTKVLLAKLLLEKPDILLLDEPTNYLDAEHIDWLKRYLQNYENAFVLISHDIPFLNDVINIVYHVENQQLTRYSGDYYQFQEVYAMKKSQLEAAYERQQKEIADLKDFVARNKARVATRNMAMSRQKKLDKMDIIELQSEKPKPSFDFKPARTPGRFIFQAKNLQIGYDRPLTKPLNLTFERNQKVAIIGANGIGKTTLLKSLLGIISPIAGEVERGDYLELGYFEQEVEGGNRQTPLEAVWNAFPALNQAEVRAALARCGLTTKHIESQIQVLSGGEQAKVRFCLLMNRENNVLVLDEPTNHLDVDAKDELKRALKEYRGSILMVCHEPDFYEGWIDQIWDFNNLT

SEQ ID NO: 1461 - DNA, 801 bp, Streptococcus pneumoniae
atgaaaaaactagcaacccttcttttactgtctactgtagccctagctgggtgtagcagcgtccaacgcagtctgcgtggtgatgattatgttgattccagtcttgctgctgaagaaagttccaaagtagctgcccaatctgccaaggagttaaacgatgctttaacaaacgaaaacgccaatttcccacaactatctaaggaagttgctgaagatgaagccgaagtgattttccacacaagccaaggtgatattcgcattaaactcttccctaaactcgctcctctagcggttgaaaatttcctcactcacgccaaagaaggctactataacggtattaccttccaccgtgtcatcgatggctttatggtccaaactggagatccaaaaggggacggtacaggtggtcagtccatctggcatgacaaggataagactaaagacaaaggaactggtttcaagaacgagattactccttatttgtataacatccgtggtgctcttgctatggctaatactggtcaaccaaacaccaatggcagccagttcttcatcaaccaaaactctacagatacctcttctaaactccctacaagcaagtatccacagaaaattattgaagcctacaaagaaggtggaaaccctagtctagatggcaaacacccagtctttggtcaagtgattgacggtatggatgttgtggataagattgctaaggccgaaaaagatgaaaaagacaagccaactactgctatcacaatcgacagcatcgaagtggtgaaagactacgattttaaatct

SEQ ID NO: 1462 - protein, 267 aa, Streptococcus pneumoniae
  peptidyl-prolyl cis-trans isomerase, cyclophilin-type; Cellular location: lipoprotein; Similar to strain R6 sequence 15902723 (e-152)
MKKLATLLLLSTVALAGCSSVQRSLRGDDYVDSSLAAEESSKVAAQSAKELNDALTNENANFPQLSKEVAEDEAEVIFHTSQGDIRIKLFPKLAPLAVENFLTHAKEGYYNGITFHRVIDGFMVQTGDPKGDGTGGQSIWHDKDKTKDKGTGFKNEITPYLYNIRGALAMANTGQPNTNGSQFFINQNSTDTSSKLPTSKYPQKIIEAYKEGGNPSLDGKHPVFGQVIDGMDVVDKIAKAEKDEKDKPTTAITIDSIEVVKDYDFKS

SEQ ID NO: 1463 - DNA, 201 bp, Streptococcus pneumoniae
atggactttttttacaatggcattgctatcacacccaatacctatctaagcgcctggttcgtaaactttattgcagctcttcctctaaatttcctaattgttgaaccaattgcccgttttatactaagttcttttcagaaaccatttactggggaagaagttgaagattttcaagatgatgatgaaatcccaactattatc

SEQ ID NO: 1464 - protein, 67 aa, Streptococcus pneumoniae
  hypothetical protein; Cellular location: membrane; Similar to strain R6 sequence 15902724 (8.E-32)
MDFFYNGIAITPNTYLSAWFVNFIAALPLNFLIVEPIARFILSSFQKPFTGEEVEDFQDDDEIPTII

SEQ ID NO: 1465 - DNA, 96 bp, Streptococcus pneumoniae
atgaaaatttattttttgaaaaagtgggaaaacattgattctaagcgaattttgaatcatattcgaatgggagtttttaaaatcatgtttcagtgg

SEQ ID NO: 1466 - protein, 32 aa, Streptococcus pneumoniae
  hypothetical protein; Cellular location: cytoplasm
MKIYFLKKWENIDSKRILNHIRMGVFKIMFQW

SEQ ID NO: 1467 - DNA, 207 bp, Streptococcus pneumoniae
atgctatccgtgaatactattttagaaaaattttataaagaacaccaagtcaaacccttcatatcgcctgaacgagagttggatacttggcttctaagtcccaagcccgttcccaagcgaaatatggacttattagtagatgattcactagcaggagatatcattttactatggagaatccagtttggtacttttaccactgaaaca

SEQ ID NO: 1468 - protein, 69 aa, Streptococcus pneumoniae
  hypothetical protein; Cellular location: cytoplasm
MLSVNTILEKFYKEHQVKPFISPERELDTWLLSPKPVPKRNMDLLVDDSLAGDIILLWRIQFGTFTTET

SEQ ID NO: 1469 - DNA, 270 bp, Streptococcus pneumoniae
atggcagttaaaatccgtttgactcgtatgggttctaagaaaaaacctttctaccgtatcaacgtagcagattcacgttcaccacgtgacggacgtttcatcgaaacagttggaacttacaacccacttgttgctgaaaaccaagtaactttgaaagaagaccgcgttcttgcatggttggctaatggagctcaaccttcagacacagtacgtaacatcctttcaaaagaaggcgtattgaaaaaattccacgattctaaattttcaaaa

SEQ ID NO: 1470 - protein, 90 aa, Streptococcus pneumoniae
  ribosomal protein S16 (rpsP); Cellular location: cytoplasm; Similar to strain R6 sequence 15902726 (8.E-48)
MAVKIRLTRMGSKKKPFYRINVADSRSPRDGRFIETVGTYNPLVAENQVTLKEDRVLAWLANGAQPSDTVRNILSKEGVLKKFHDSKFSK

SEQ ID NO: 1471 - DNA, 237 bp, Streptococcus pneumoniae
atggatacgattgaaaatctcattattgcgattgtgaaacccttaatttcacaaccagatgccttaactatcaagattgaggatacaccagaatttttggaatatcatttgaatcttgatcaaagcgatgtgggtcgtgtaatcggtcgtaagggtcgcactatttctgcgataagaacgattgtctactctgtcccaactgaatacaaaaaagtaagaatcgttattgacgaaaaa

SEQ ID NO: 1472 - protein, 79 aa, Streptococcus pneumoniae
  KH domain protein; Cellular location: cytoplasm; Similar to strain R6 sequence 15902727 (4.E-40)
MDTIENLIIAIVKPLISQPDALTIKIEDTPEFLEYHLNLDQSDVGRVIGRKGRTISAIRTIVYSVPTEYKKVRIVIDEK

SEQ ID NO: 1473 - DNA, 798 bp, Streptococcus pneumoniae
gtggatttctttatgaagaggtttgaagtatctacagaaattggtagcctctctgttacttatcaaaagcaaaagaaagtgctagtttgtttaaacggagcaggtttgctaccaagttatgaaaatttttcacttatacttgaaaaacctcctcctacaattggttatttgacaattgattttccgaacacaggtaggagtccgattcatgaccaagctggaaaaaatctagataatcttgcagatgcggtttatgaagtacttgaagaattaggaatttctgaatatatactttgtgcacatagttggagtggaattttagcttgcaaattactcgagaaaccaattaagcgtcagactttagtagcaattgaaccgacaactaaaaaagtcatgtttgctgatttttcagaaaatccttatccagaaatggaagagcagatgaggctgattgacgagtgtggtcctgaactttattttaagaacttaactcaagcaacatttagtcctgaaacgaataaaaaaatctgggaattaatgcaagaaaaaggcttagagttggaaaatcaagatccagaatttcagatatctggagagattactgaggaagattttgaggatgtatctatagaagctcatattcctgtatttgttttttgtcagccttatagagaaaaagagtacagagaatcagaatattggacttccaatactaaactcattttaggagggaatcaccattatttacaatggtcagaatcggaaaaaattgcggctattattcgagaattgttagaa

SEQ ID NO: 1474 - protein, 266 aa, Streptococcus pneumoniae
  hypothetical protein; Cellular location: cytoplasm; Similar to strain R6 sequence 15902728 (2.E-81)
MDFFMKRFEVSTEIGSLSVTYQKQKKVLVCLNGAGLLPSYENFSLILEKPPPTIGYLTIDFPNTGRSPIHDQAGKNLDNLADAVYEVLEELGISEYILCAHSWSGILACKLLEKPIKRQTLVAIEPTTKKVMFADFSENPYPEMEEQMRLIDECGPELYFKNLTQATFSPETNKKIWELMQEKGLELENQDPEFQISGEITEEDFEDVSIEAHIPVFVFCQPYREKEYRESEYWTSNTKLILGGNHHYLQWSESEKIAAIIRELLE

SEQ ID NO: 1475 - DNA, 516 bp, Streptococcus pneumoniae
atgaactactttaatgttgggaaaatcgttaatacgcagggattacagggggagatgcgagtcttgtctgtgacggattttgcagaagaacggtttaaaaaaggagctgagctggttttgtttgatgaaaaagatcagtttgtccaaacagtgaccatcgctagccaccgtaaacagaagaactttgacattattaaattcaaagatatgtaccatatcaatactatcgaaaagtacaagggatacagtctcaaggtcgctgaggaagatttgaatgacctagacgatggtgaattttactatcacgagattatcggtttggaagtctatgagggtgatagcttggttggaaccatcaaggaaatcctgcaaccaggtgctaatgatgtctgggtggtcaaacgaaaaggcaaacgtgatttgcttttaccttatatcccaccagtggttctcaatgttgatattccaagtaaacgggtcgatgtggaaatcttagaagggttagacgatgaagat

SEQ ID NO: 1476 - protein, 172 aa, Streptococcus pneumoniae
  16S rRNA processing protein RimM (rimM); Cellular location: cytoplasm; Similar to strain R6 sequence 15902730 (1.E-96)
MNYFNVGKIVNTQGLQGEMRVLSVTDFAEERFKKGAELVLFDEKDQFVQTVTIASHRKQKNFDIIKFKDMYHINTIEKYKGYSLKVAEEDLNDLDDGEFYYHEIIGLEVYEGDSLVGTIKEILQPGANDVWVVKRKGKRDLLLPYIPPVVLNVDIPSKRVDVEILEGLDDED

SEQ ID NO: 1477 - DNA, 717 bp, Streptococcus pneumoniae
atgaagattgatattttaaccctctttccagagatgttttctccactggagcactcaatcgttggaaaggctcgagaaaaagggctcttggatatccagtatcataattttcgagaaaatgctgaaaaggcccgtcatgtagatgatgagccctacggaggcggtcagggcatgttgctcagagcacaacctattttcgattcctttgatgctattgaaaagaaaaatccgcgcgttattctccttgatcctgctggaaagcagtttgatcaggcttatgctgaagatttggctcaagaggaagagctaatctttatctgtgggcactatgagggttatgatgagcgcattaagaccttggtaacagatgagatttccctaggtgactatgtcctcactggtggagaattggcagctatgaccatgattgatgctacagttcgcctgattccagaagtgattggcaaggagtctagccaccaagatgatagtttttcttcaggtcttttagaatatcctcagtacacacgtccctatgattatcgaggcatggtcgtgccagatgtattgatgagtggccaccatgaaaagattcgtcagtggcgattgtacgagagtttaaagaaaacctacgagcgcagaccggatttacttgaacattatcaactgacagtagaagaagaaaaaatgctggcagaaatcaaagaaaacaaagaa

SEQ ID NO: 1478 - protein, 239 aa, Streptococcus pneumoniae
  tRNA (guanine-N1)-methyltransferase (trmD); Cellular location: cytoplasm; Similar to strain R6 sequence 15902731 (e-138)
MKIDILTLFPEMFSPLEHSIVGKAREKGLLDIQYHNFRENAEKARHVDDEPYGGGQGMLLRAQPIFDSFDAIEKKNPRVILLDPAGKQFDQAYAEDLAQEEELIFICGHYEGYDERIKTLVTDEISLGDYVLTGGELAAMTMIDATVRLIPEVIGKESSHQDDSFSSGLLEYPQYTRPYDYRGMVVPDVLMSGHHEKIRQWRLYESLKKTYERRPDLLEHYQLTVEEEKMLAEIKENKE

SEQ ID NO: 1479 - DNA, 336 bp, Streptococcus pneumoniae
atgcaagtaatcaaacgtaatggcgaaattgctgaatttaatccagataagatttaccaagccatcttgaaggcagcccaaactgtttatgttttgacagatgatttgcgtcaaaatcttgctcaagtcactaagaaggtagttttggatttacaagaagccaaggtggaacgtgcgactatcagtatgattcaatctatggttgaacatcgtttattgggcgcaggttacattaccattgcagaacactacatttcctatcgtttacaacgtgacttggaaagaagtggttatggagatcatatcgcagttcatttacattttgaacaaattcgc

SEQ ID NO: 1480 - protein, 112 aa, Streptococcus pneumoniae
  ribonucleoside-diphosphate reductase, alpha subunit, truncation; Cellular location: cytoplasm; Similar to strain R6 sequence 15902732 (2.E-59)
MQVIKRNGEIAEFNPDKIYQAILKAAQTVYVLTDDLRQNLAQVTKKVVLDLQEAKVERATISMIQSMVEHRLLGAGYITIAEHYISYRLQRDLERSGYGDHIAVHLHFEQIR

SEQ ID NO: 1481 - DNA, 318 bp, Streptococcus pneumoniae
atgagacataaattccagcaagttctaaataaaatacatgattttttaaatggatatgaccaacctgaccagactgaaaccaactcccttacagccactattgaagaggctatccagaaacaaaccgctgttcaccttatcttgtctgagacaagctttacaggtgacatcatcaaatatgatcagcaaggccagcaaattatcgtgaaaaatttttccaaaaatgtgagccggattatccgtataagcgatattcaacgcctgcgatttgtcccctcaactgtccaaacagcccaaaaaaatagatttaagaaagag

SEQ ID NO: 1482 - protein, 106 aa, Streptococcus pneumoniae
  hypothetical protein; Cellular location: cytoplasm; Similar to strain R6 sequence 15902733 (7.E-55)
MRHKFQQVLNKIHDFLNGYDQPDQTETNSLTATIEEAIQKQTAVHLILSETSFTGDIIKYDQQGQQIIVKNFSKNVSRIIRISDIQRLRFVPSTVQTAQKNRFKKE

SEQ ID NO: 1483 - DNA, 237 bp, Streptococcus pneumoniae
atgaaactaaaaaaggagaagaaaatggcagaatttacatttgaaatcgaagagcacttgttgactctttctgaaaacgaaaaaggttggaccaaggaaattaaccgtgtgagctttaatggtgcccctgcaaagtttgatattcgtgcttggagtccagaccatactaaaatgggcaaagggattactctctcaaatgaagaatttcaaacgatggtggatgcctttaaaggcaac

SEQ ID NO: 1484 - protein, 79 aa, Streptococcus pneumoniae
  conserved hypothetical protein; Cellular location: cytoplasm; Similar to strain R6 sequence 15902734 (5.E-43)
MKLKKEKKMAEFTFEIEEHLLTLSENEKGWTKEINRVSFNGAPAKFDIRAWSPDHTKMGKGITLSNEEFQTMVDAFKGN

SEQ ID NO: 1485 - DNA, 144 bp, Streptococcus pneumoniae
atgaaaatcaaagagcaaactaggaagctagccgcaggctgctcaaaacactgttttgaggttgtggatgaaactgacgaagtcagtaaccatacatacggcaaggcaaagctgacgcggtttgaagagattttcgaagagtat

SEQ ID NO: 1486 - protein, 48 aa, Streptococcus pneumoniae
  box element
MKIKEQTRKLAAGCSKHCFEVVDETDEVSNHTYGKAKLTRFEEIFEEY

SEQ ID NO: 1487 - DNA, 534 bp, Streptococcus pneumoniae
ttgaaaaaagctcacgtttatgctatccctgctattggggctgctctcattgctgctttggcacaaatcagtcttccaattggacctgttcccttcactctgcaaaactttgcaatcggcttgattgctactgtctttagaccgagagaggctgtactttctgctggactctatcttcttctaggtgctatcggtcttcctgtctttgcaggaggtggagctggttttcaggctttagttggccctactgcaggctatctttggttttatctcgtttactctggacttacttcctctctaaccaacagcaagagtggtgttgttaagatttttcttgcaaacctcttgggtgatgcccttgtctttgtcggcgggattctcagcttgcatttcctagctggaatggcatttgaaaaagctcttgctgtgggggttcttccctttatcattccagaccttggcaaacttctagctattagttttattagccgtcccctacttcaacgccttaaaaatcaggcttactttactaac

SEQ ID NO: 1488 - protein, 178 aa, Streptococcus pneumoniae
  conserved hypothetical protein (Biotin synthase); Cellular location: membrane; Similar to strain R6 sequence 15902735 (2.E-95)
MKKAHVYAIPAIGAALIAALAQISLPIGPVPFTLQNFAIGLIATVFRPREAVLSAGLYLLLGAIGLPVFAGGGAGFQALVGPTAGYLWFYLVYSGLTSSLTNSKSGVVKIFLANLLGDALVFVGGILSLHFLAGMAFEKALAVGVLPFIIPDLGKLLAISFISRPLLQRLKNQAYFTN

SEQ ID NO: 1489 - DNA, 1344 bp, Streptococcus pneumoniae
atgagagaatatgatatcattgctatcggtggaggtagcggaggaatcgctaccatgaaccgtgctggtgaacatggagccaaagcagccgttattgaggaaaagaaattaggtggaacctgtgtcaacgtcggttgtgttcctaaaaaaatcatgtggtacggggcgcaaatcgctgagactttccatcaatttggagaagactacggctttaagactactgatcttaactttgactttgcaaccctacgtcgcaatcgtgaagcctacattgatcgcgctcgttcttcttatgatggtagttttaaacgcaacggtgtagacttgattgaaggtcatgctgaatttgtagattctcatactgtaagcgtaaatggtgaactgattcgtgctaaacatatcgtgattgctacaggtgcccatccaagtattcctaatattcctggtgctgagctaggtggctcttctgatgatgtatttgcctgggaagaacttccagagtcaattgccattctaggcgctggttatatcgccgttgaattagctggcgtactccacacttttggtgtcaagacagatctctttgttcgccgcgatcgtcctttacgtggttttgattcctacatcgttgaaggtttggtcaaggaaatggaaagaacaaacttaccacttcacactcacaaagtccctgtcaagttagaaaaaactactgacggcattaccattcatttcgaagatggtactagtcacacagctagccaagttatctgggctacaggtcgccgtccaaacgttaagggcttgcaacttgaaaaagctggagtgactctgaacgaacgtggctttatccaagtggatgaataccaaaatactgttgttgagggaatctatgctctaggtgatgtaacgggcgagaaagaactgactccagttgcaatcaaggccggacgtaccctatctgaacgtctctttaacggaaaaactactgcaaaaatggattactcaactattccaactgttgtcttttcacaccctgctatcggaactgttggtttgacagaagagcaagctattaaagaatacggtcaagaccaaatcaaggtttataaatcaagctttgcatctatgtactctgcttgcacttgcaaccgtcaagaatcccgtttcaaactcataacagctggttcagaagaaaaagttgtcggacttcatggaattggctacggcgttgatgaaatgattcagggatttgccgttgctatcaaaatgggagcaaccaaggctgactttgatgcaactgtggcaattcacccaactgcatctgaagaatttgtaaccatgcgt

SEQ ID NO: 1490 - protein, 448 aa, Streptococcus pneumoniae
  glutathione reductase (gor); Cellular location: membrane; Similar to strain R6 sequence 15902736 (0.E+01)
MREYDIIAIGGGSGGIATMNRAGEHGAKAAVIEEKKLGGTCVNVGCVPKKIMWYGAQIAETFHQFGEDYGFKTTDLNFDFATLRRNREAYIDRARSSYDGSFKRNGVDLIEGHAEFVDSHTVSVNGELIRAKHIVIATGAHPSIPNIPGAELGGSSDDVFAWEELPESIAILGAGYIAVELAGVLHTFGVKTDLFVRRDRPLRGFDSYIVEGLVKEMERTNLPLHTHKVPVKLEKTTDGITIHFEDGTSHTASQVIWATGRRPNVKGLQLEKAGVTLNERGFIQVDEYQNTVVEGIYALGDVTGEKELTPVAIKAGRTLSERLFNGKTTAKMDYSTIPTVVFSHPAIGTVGLTEEQAIKEYGQDQIKVYKSSFASMYSACTCNRQESRFKLITAGSEEKVVGLHGIGYGVDEMIQGFAVAIKMGATKADFDATVAIHPTASEEFVTMR

SEQ ID NO: 1491 - DNA, 1197 bp, Streptococcus pneumoniae
atgaagaaaaagaatggtaaagctaaaaagtggcaactgtatgcagcaatcggtgctgcgagtgtagttgtattgggtgctggggggattttactctttagacaaccttctcagactgctctaaaagatgagcctactcatcttgttgttgccaaggaaggaagcgtggcctcctctgttttattgtcagggacagtaacagcaaaaaatgaacaatatgtttattttgatgctagtaagggtgatttagatgaaatccttgtttctgtgggcgataaggtcagcgaagggcaggctttagtcaagtacagtagttcagaagcgcaggcggcctatgattcagctagtcgagcagtagctagggcagatcgtcatatcaatgaactcaatcaagcacgaaatgaagccgcttcagctccggctccacagttaccagcgccagtaggaggagaagatgcaacggtgcaaagcccaactccagtggctggaaattctgttgcttctattgacgctcaattgggtgatgcccgtgatgcgcgtgcagatgctgcggcgcaattaagcaaggctcaaagtcaattggatgcaacaactgttctcagtaccctagagggaactgtggtcgaagtcaatagcaatgtttctaaatctccaacaggggcgagtcaagttatggttcatattgtcagcaatgaaaatttacaagtcaagggagaattgtctgagtacaatctagccaacctttctgtaggtcaagaagtaagctttacttctaaagtgtatcctgataaaaaatggactgggaaattaagctatatttctgactatcctaaaaacaatggtgaagcagctagtccagcagccgggaataatacaggttctaaatacccttatactattgatgtgacaggcgaggttggtgatttgaaacaaggtttttctgtcaacattgaggttaaaagcaaaactaaggctattcttgttcctgttagcagtctagtaatggatgatagtaaaaattatgtctggattgtggatgaacaacaaaaggctaaaaaagttgaggtttcattgggaaatgctgacgcagaaaatcaagaaatcacttctggtttaacgaacggtgctaaggtcatcagtaatccaacatcttccttggaagaaggaaaagaggtgaaggctgatgaagcaactaat

SEQ ID NO: 1492 - protein, 399 aa, Streptococcus pneumoniae
  conserved hypothetical protein; Cellular location: outside; Similar to strain R6 sequence 15902737 (0.E+01)
MKKKNGKAKKWQLYAAIGAASVVVLGAGGILLFRQPSQTALKDEPTHLVVAKEGSVASSVLLSGTVTAKNEQYVYFDASKGDLDEILVSVGDKVSEGQALVKYSSSEAQAAYDSASRAVARADRHINELNQARNEAASAPAPQLPAPVGGEDATVQSPTPVAGNSVASIDAQLGDARDARADAAAQLSKAQSQLDATTVLSTLEGTVVEVNSNVSKSPTGASQVMVHIVSNENLQVKGELSEYNLANLSVGQEVSFTSKVYPDKKWTGKLSYISDYPKNNGEAASPAAGNNTGSKYPYTIDVTGEVGDLKQGFSVNIEVKSKTKAILVPVSSLVMDDSKNYVWIVDEQQKAKKVEVSLGNADAENQEITSGLTNGAKVISNPTSSLEEGKEVKADEATN

SEQ ID NO: 1493 - DNA, 699 bp, Streptococcus pneumoniae
atgaagcaactaattagtctaaaaaatatcttcagaagttaccgtaatggtgaccaagaactgcaggttctcaaaaatatcaatctagaagtgaatgagggtgaatttgtagccatcatgggaccatctgggtctggtaagtccactctgatgaatacgattggcatgttggatacaccaaccagtggagaatattatcttgaaggtcaagaagtggctgggcttggtgaaaaacaactagctaaggtccgtaaccaacaaatcggttttgtctttcagcagttctttcttctatcgaagctcaatgctctgcaaaatgtagaattgcccttgatttacgcaggagtttcgtcttcaaaacgtcgcaagttggctgaggaatatttagacaaggttgaattgacagaacgtagtcaccatttaccttcagaattatctggtggtcaaaagcaacgtgtagccattgcgcgtgccttggtaaacaatccttctattatcctagcggatgaaccgacaggagccttggataccaaaacaggtaaccaaattatgcaattattggttgatttgaataaagaaggaaaaaccattatcatggtaacgcatgagcctgagattgctgcctatgccaaacgtcagattgtcattcgggatggggtcatttcgtctgacagtgctcagttaggaaaggaggaaaac

SEQ ID NO: 1494 - protein, 233 aa, Streptococcus pneumoniae
  ABC transporter, ATP-binding protein; Cellular location: cytoplasm; Similar to strain R6 sequence 15902738 (e-128)
MKQLISLKNIFRSYRNGDQELQVLKNINLEVNEGEFVAIMGPSGSGKSTLMNTIGMLDTPTSGEYYLEGQEVAGLGEKQLAKVRNQQIGFVFQQFFLLSKLNALQNVELPLIYAGVSSSKRRKLAEEYLDKVELTERSHHLPSELSGGQKQRVAIARALVNNPSIILADEPTGALDTKTGNQIMQLLVDLNKEGKTIIMVTHEPEIAAYAKRQIVIRDGVISSDSAQLGKEEN

SEQ ID NO: 1495 - DNA, 1257 bp, Streptococcus pneumoniae
atgcagaatctgaaatttgccttttcatctatcatggctcacaagatgcgttctttgcttactatgattgggattattatcggtgtttcatcagttgttgtgattatggctttgggtgattccctatctcgtcaagtcaataaagatatgactaaatctcagaaaaatattagcgtctttttctctcctaaaaaaagtaaagacgggtcttttactcagaaacaatcagcttttacggtttctggaaaggaagaggaagttcctgttgaaccgccaaaaccgcaagaatcctgggtccaagaggcagctaaactgaagggagtggatagttactatgtaaccaattcaacgaatgccatcttgacctatcaagataaaaaggttgagaatgctaatttgacaggtggaaacagaacttacatggacgctgttaagaatgaaattattgcaggtcgtagtctgagagagcaagatttcaaagagtttgcaagtgtcattttgctagatgaggaattgtccattagtttatttgaatctcctcaagaggctattaacaaggttgtagaagtcaatggatttagttaccgggtcattggggtttatactagtccggaggctaaaagatcaaaaatatatgggtttggtggcttgcctattactaccaatatctcccttgctgcgaattttaatgtagatgaaatagctaatattgtctttcgagtgaatgataccagtttaaccccaactctgggtccagaactggcacgaaaaatgacagagcttgcaggcttacaacagggagaataccaggtggcagatgagtccgttgtatttgcagaaattcaacaatcgtttagttttatgacgacgattattagttccatcgcagggatttctctctttgttggaggaactggtgtcatgaacatcatgctggtttcggtgacagagcgcactcgtgagattggtcttcgtaaggctttgggtgcaacacgtgccaatattttaattcagtttttgattgaatccatgattttgaccttgttaggtggcttaattggcttgacaattgcaagtggtttaactgccttagcaggtttgttactgcaaggtttaatagaaggtatagaagttggagtatcaatcccagtcgccctatttagtcttgcagtttcggctagtgttggtatgatttttggagtcttgccagccaacaaggcatcgaaacttgatccaattgaagcccttcgttatgaa

SEQ ID NO: 1496 - protein, 419 aa, Streptococcus pneumoniae
  conserved hypothetical protein; Cellular location: membrane; Similar to strain R6 sequence 15902739 (0.E+01)
MQNLKFAFSSIMAHKMRSLLTMIGIIIGVSSVVVIMALGDSLSRQVNKDMTKSQKNISVFFSPKKSKDGSFTQKQSAFTVSGKEEEVPVEPPKPQESWVQEAAKLKGVDSYYVTNSTNAILTYQDKKVENANLTGGNRTYMDAVKNEIIAGRSLREQDFKEFASVILLDEELSISLFESPQEAINKVVEVNGFSYRVIGVYTSPEAKRSKIYGFGGLPITTNISLAANFNVDEIANIVFRVNDTSLTPTLGPELARKMTELAGLQQGEYQVADESVVFAEIQQSFSFMTTIISSIAGISLFVGGTGVMNIMLVSVTERTREIGLRKALGATRANILIQFLIESMILTLLGGLIGLTIASGLTALAGLLLQGLIEGIEVGVSIPVALFSLAVSASVGMIFGVLPANKASKLDPIEALRYE

SEQ ID NO: 1497 - DNA, 1995 bp, Streptococcus pneumoniae
atgtctgaaaaaaatttttatattacaacgccgatttactatccatctgggaaacttcatatcggttctgcctacacaactatcgcatgtgatgtcctagcacgttacaaacgcctgatgggctacgatgtattttatctgacaggtcttgatgaacatggtcagaaaatccagcagaaagcggaagaagctggtattacacctcaagcctatgttgatggaatggcggttggagttaaagaactctggcaattactagatatctcatacgataaatttatccgtacaactgatgactaccatgaaaaagttgtcgcacaagtctttgaacgcttacttgctcaagatgatatctacttgggtgaatactctggttggtattcagtatcagacgaagaattctttacagaaagccagctggcagaagttttccgtgatgaagctggaaatgtgactggtggtattgctccatcaggtcatgaggttgaatgggtttctgaagaatcatacttccttcgccttagcaaataccaagaccgtttggtcgaatttttcaaagctcatcctgaatttatcacgccagatggtcgccttaatgaaatgctacgcaacttcatcgagccaggcttggaagatttggcggtatctcgtacaacctttacatggggagtgcctgtcccatcaaatccaaaacacgttgtctacgtttggattgatgcccttcttaactatgcgacagctcttggctacgctcaagacgaacatggtaactttgacaagttctggaatggaacagtcttccatatggtaggaaaagatatccttcgcttccactctatctactggccaatccttcttatgatgttggatgttaaattacctgatcgtttgattgcccatggttggtttgtcatgaaagacggaaaaatgtctaagtcaaaagggaatgtcgtttaccctgaaatgttggtagagcgttatggactagatccacttcgttactacctcatgcgtaaccttccagttggttcagacggaacctttactcctgaagactatgtcggccgtatcaactatgaattggctaatgaccttgggaacctccttaaccgtacggtttccatgattaataagtactttgatggacaaatccctgcctatgtagaaggtgtgactgaatttgatcatgttcttgctgaggttgcagaacaatcaatcgcagacttccatacacacatggaagcagttgactatccacgtgcgcttgaagcagtctggactctgatctctcgtaccaataaatacatcgatgagaccgcaccatgggtcttggccaaggatgaagctcttcgtgaccaattggcaagtgtcatgagccacttggcagccagcattcgtgtagttgctcacttgattgaaccatttatgatggaaactagtcgtgcagttttgactcaacttggtttggaagaagtttctagtcttgaaaacttgagtttggctgacttcccagcagatgtgactgtagttgccaaaggaacacctatctttccacgtctaaatatggaagaagaaatcgcctatatcaaggaacaaatggaaggcaataaaccagcagtcgaaaaagaatggaatccggacgaagttgagctcaaactaaacaaggatgaaatcaagtttgaagactttgacaaggttgaaatccgtgtcgcagaagtcaaagaagtgtctaaagtagaaggttcagataagttgcttcaattccgcttggatgctggtgatggagaagatcgtcagattctttcaggaattgcaaaatactatccaaatgaacaagaattggtcggcaagaaagttcaaatcgttgctaacctcaaaccacgtaaaatgatgaaaaaatatgtcagccagggtatgattctctcagctgaacatgatggcaaattaacccttctcacagttgatccagctgtaccaaatggaagtgtgattggg

SEQ ID NO: 1498 - protein, 665 aa, Streptococcus pneumoniae
  methionyl-tRNA synthetase (metG); Cellular location: cytoplasm; Similar to strain R6 sequence 15902740 (0.E+01)
MSEKNFYITTPIYYPSGKLHIGSAYTTIACDVLARYKRLMGYDVFYLTGLDEHGQKIQQKAEEAGITPQAYVDGMAVGVKELWQLLDISYDKFIRTTDDYHEKVVAQVFERLLAQDDIYLGEYSGWYSVSDEEFFTESQLAEVFRDEAGNVTGGIAPSGHEVEWVSEESYFLRLSKYQDRLVEFFKAHPEFITPDGRLNEMLRNFIEPGLEDLAVSRTTFTWGVPVPSNPKHVVYVWIDALLNYATALGYAQDEHGNFDKFWNGTVFHMVGKDILRFHSIYWPILLMMLDVKLPDRLIAHGWFVMKDGKMSKSKGNVVYPEMLVERYGLDPLRYYLMRNLPVGSDGTFTPEDYVGRINYELANDLGNLLNRTVSMINKYFDGQIPAYVEGVTEFDHVLAEVAEQSIADFHTHMEAVDYPRALEAVWTLISRTNKYIDETAPWVLAKDEALRDQLASVMSHLAASIRVVAHLIEPFMMETSRAVLTQLGLEEVSSLENLSLADFPADVTVVAKGTPIFPRLNMEEEIAYIKEQMEGNKPAVEKEWNPDEVELKLNKDEIKFEDFDKVEIRVAEVKEVSKVEGSDKLLQFRLDAGDGEDRQILSGIAKYYPNEQELVGKKVQIVANLKPRKMMKKYVSQGMILSAEHDGKLTLLTVDPAVPNGSVIG

SEQ ID NO: 1499 - DNA, 324 bp, Streptococcus pneumoniae
atgaaaatcaaagagcaaactaggaagctagccgcaggttgctcaaaacactgttttgaggttgtagacgaaactgacgaagtcagctcaaaacatgtttttgaggttgtagatgaaactgacgaagtcagctcaaaacactgttttgaggttgtagatgaaactgacgaagtcagctcaaaacactgttttgaggttgtagatgaaactgacgaagtcagctcaaaacatgtttttgaggttgtagatgaaactgacgaagtcagtaaccatacatacggtagggcgacgctgacgtggtttgaagagattttcgaagagtat

SEQ ID NO: 1500 - protein, 108 aa, Streptococcus pneumoniae
  box element
MKIKEQTRKLAAGCSKHCFEVVDETDEVSSKHVFEVVDETDEVSSKHCFEVVDETDEVSSKHCFEVVDETDEVSSKHVFEVVDETDEVSNHTYGRATLTWFEEIFEEY

SEQ ID NO: 1501 - DNA, 321 bp, Streptococcus pneumoniae
gtgatgaaagaaactcagctattaaaaggtgttcttgaaggttgtgtcttggatatgattggtcaaaaagagcggtatggttatgagttggttcagactttgcgagaggctggatttgatactatcgttccaggaactatttatcctttgttgcaaaagttagaaaaaaatcaatggataagaggcgacatgcgcccgtcgccagatggtccagatcggaagtatttttcattaatgaaagaaggagaagagcgtgtctcagtcttttggcaacaatgggacgatttgagtcaaaaagtagaagggattaagaatgggggt

SEQ ID NO: 1502 - protein, 107 aa, Streptococcus pneumoniae
  conserved hypothetical protein; Cellular location: cytoplasm; Feature of note: RGD motif; Similar to strain R6 sequence 15902741 (4.E-60)
MMKETQLLKGVLEGCVLDMIGQKERYGYELVQTLREAGFDTIVPGTIYPLLQKLEKNQWIRGDMRPSPDGPDRKYFSLMKEGEERVSVFWQQWDDLSQKVEGIKNGG

SEQ ID NO: 1503 - DNA, 813 bp, Streptococcus pneumoniae
atgaagaaaatgaagtattacgaagaaacaagcgctttgctacatgagttttctgaggagaatcaaaagtattttgaggagttgtgggaaagttttaatcttgctggatttctctatgatgaagactatctcagagagcagatctatttgatgatgctagatttctcagaagcagaacgagatggcatgagtgcagaggattatctaggtaagaatcctaaaaaaataatgaaagagattctcaagggagcacctcgcagttctatcaaagagtcccttttgacgccaattcttgtcctggcggtattacgttattatcaactactaagtgatttttctaaaggtcctctcttaacagtcaatttgctcacatttttagggcaacttcttatttttctgattggatttggacttgtggccacaattttacgaagaagtttagtccaagattctcctaaaatgaaaattggcacttacattgttgttgggactatagttcttctagttgttttaggatatgtaggaatggcaagcttcatacaagaaggagccttttatattccggctccctgggatagtttgtctgtctttacgatttcgctagttatcggtatttggaattggaaagaagcggtctttcgtccatttgtcagtatgattattgcccatcttgtggtgggttctctgctccgttattatgagtggatgggaatttcaaatgttttccttacaaaagttattcctttagctgtcctctttattggaatctttgtcttgttccgtgggtttaagaagataaaatggagtgaagta

SEQ ID NO: 1504 - protein, 271 aa, Streptococcus pneumoniae
  conserved domain protein; Cellular location: membrane; Similar to strain R6 sequence 15902742 (e-153)
MKKMKYYEETSALLHEFSEENQKYFEELWESFNLAGFLYDEDYLREQIYLMMLDFSEAERDGMSAEDYLGKNPKKIMKEILKGAPRSSIKESLLTPILVLAVLRYYQLLSDFSKGPLLTVNLLTFLGQLLIFLIGFGLVATILRRSLVQDSPKMKIGTYIVVGTIVLLVVLGYVGMASFIQEGAFYIPAPWDSLSVFTISLVIGIWNWKEAVFRPFVSMIIAHLVVGSLLRYYEWMGISNVFLTKVIPLAVLFIGIFVLFRGFKKIKWSEV

SEQ ID NO: 1505 - DNA, 924 bp, Streptococcus pneumoniae
atgagatacataactcttggtcaagatgacaaagaattatcagaaattgttctcggaatgatgagaataaaagataaatctgtaaaagaagttgaagagcttgtagaaacagcactttctgttggaatcaatgccttcgacttggctgatatttatggtcgtggtcgttgtgaagaactgttaggtcttgtcctaaaaaatcgtccagatttaagagaaaagatgtggattcagtccaaatgtggcattcgcattgaagaatttacctattttgatttttctaaggactatattataaaatcagtagacggtattttgcaaagattgaagattgatcatctagatagcttgctccttcatcgaccagatgctttgatggaatctgaccaagtagcagaagcctttaatctcctttataaacaaggtaaagttcgagattttggagtttctaatcaaaatcctatgatgatggagttgcttaaaaaagatgtcaagcagccgttagctgttaatcagctacaattgagtgcggcttttactccaggatttgaatcagcttttcatgttaatatggaagatagtcaagcagctatgcgagatggcagcatttttgaatattgccaattacacgatgtggtcattcaagcatggtctgtcttacaattcgggtattttaaagggaattttgttggaaatgagaaatttcaagctttaaatcaagtacttgatcgtttagctattaaatatggagtaacctcttcaactattgccatttcttggatattgcgttatccagcaaaaatgcaggcagtcgtaggtacaacaaatcctaagcacttgagagaagttagccgagcggcaaactttagcttaacaagaaaagaatggtatgaaatttatcttgctgcagggaataatttgccg

SEQ ID NO: 1506 - protein, 308 aa, Streptococcus pneumoniae
  oxidoreductase, aldo/keto reductase family; Cellular location: cytoplasm; Similar to strain R6 sequence 15902743 (e-175)
MRYITLGQDDKELSEIVLGMMRIKDKSVKEVEELVETALSVGINAFDLADIYGRGRCEELLGLVLKNRPDLREKMWIQSKCGIRIEEFTYFDFSKDYIIKSVDGILQRLKIDHLDSLLLHRPDALMESDQVAEAFNLLYKQGKVRDFGVSNQNPMMMELLKKDVKQPLAVNQLQLSAAFTPGFESAFHVNMEDSQAAMRDGSIFEYCQLHDVVIQAWSVLQFGYFKGNFVGNEKFQALNQVLDRLAIKYGVTSSTIAISWILRYPAKMQAVVGTTNPKHLREVSRAANFSLTRKEWYEIYLAAGNNLP

SEQ ID NO: 1507 - DNA, 264 bp, Streptococcus pneumoniae
atgaagaatgtagaattaaaggagaaaaacatgacatttgaagagatcctgcctgggttaaaggctaagagaaaatatgtacgaactggttggggaggtgcggaaaactatgtccaactctttgataccatcgagcaaaatgggcttgcacttgaaatgacaccttatttcctaatcaacgtttctggcgaaggagaaggtttttccatgtggagcccgacagtttgtgatgttttggcaacggattgggtagaagtgcatgac

SEQ ID NO: 1508 - protein, 88 aa, Streptococcus pneumoniae
  hypothetical protein; Cellular location: cytoplasm; Similar to strain R6 sequence 15902744 (3.E-45)
MKNVELKEKNMTFEEILPGLKAKRKYVRTGWGGAENYVQLFDTIEQNGLALEMTPYFLINVSGEGEGFSMWSPTVCDVLATDWVEVHD

SEQ ID NO: 1509 - DNA, 696 bp, Streptococcus pneumoniae
atgactaaacgtgtactcattacaggagtgagttcagggatcggattggctcaagctcgcctctttttagagaagggctatcaagtttatggagttgaccaaggtgaaaagccactcttagagggtgattttcgctttttacagagagatttgaccttggacttggaacctatttttgactggtgccctcaggtggatgttttgtgtaatactgctggagttttggatgattacaaaccactgttggaacaaacggcgcaggacattcaagagatttttgaaatcaactacattattccagtagagttgactcggtattatttgacacaaatgctggaaaataaaaagggaatcatcatcaatatgtgttccattgcttctagcctagcaggtggaggtggtcacgcctatacttcatccaagcatgccttggctggcttcaccaagcagttggctctagactatgctgaagctgggattcaggtctttggtatcgctccaggagcagtcaagacagctatgaccgctgcggattttgaaccaggtggtttggctgactgggtggctagtgaaaccccaatcaagcgctggattgagccagaggaaatagcagagcttagtctttttttagcaagtggaaaagcgagcgccatgcaaggacaaatcttgacaatagatggtggctggtctttgaag

SEQ ID NO: 1510 - protein, 232 aa, Streptococcus pneumoniae
  oxidoreductase, short chain dehydrogenase/reductase family; Cellular location: cytoplasm; Similar to strain R6 sequence 15902745 (e-132)
MTKRVLITGVSSGIGLAQARLFLEKGYQVYGVDQGEKPLLEGDFRFLQRDLTLDLEPIFDWCPQVDVLCNTAGVLDDYKPLLEQTAQDIQEIFEINYIIPVELTRYYLTQMLENKKGIIINMCSIASSLAGGGGHAYTSSKHALAGFTKQLALDYAEAGIQVFGIAPGAVKTAMTAADFEPGGLADWVASETPIKRWIEPEEIAELSLFLASGKASAMQGQILTIDGGWSLK

SEQ ID NO: 1511 - DNA, 117 bp, Streptococcus pneumoniae
ttggggtctactgtgtttgctttgaaaatggaaagttactttgcattgaaaaaacgagaggcccttatcaacatcggtatgatctacctggaggcagtcagcaacttggtgaaggac

SEQ ID NO: 1512 - protein, 39 aa, Streptococcus pneumoniae
  hypothetical protein
MGSTVFALKMESYFALKKREALINIGMIYLEAVSNLVKD

SEQ ID NO: 1513 - DNA, 498 bp, Streptococcus pneumoniae
atggaaatcaaaaatcactttggggtctactgtgtttgctttgaaaatggaaagttactttgcattgaaaaaacgagaggcccttatcaacatcggtatgatctacctggaggcagtcagcaacttggtgaaggactgacggaaacgctgactagagaagttatggaagagacgggatttactgttagaagctactctaatcctcgaatctacgatgttttcgtcagggaagagttaaaaaattttatggttcaccatgtcatagccttgtatgatgttgaaatgaatgagagtgcacctcaagttacgatttcggaagctgtgtctgatggtgcgaatgattcacttggatatatttggatggatattcaagagattacagaagaaaatgcatcgccattagtcttgaaggttaagtctgaattattaggatttccagaactggacaagacttcttacatgaattggaaggtgaatgatgagaaatcaacttgccct

SEQ ID NO: 1514 - protein, 166 aa, Streptococcus pneumoniae
  MutT/nudix family protein; Cellular location: cytoplasm; Similar to strain R6 sequence 15902746 (9.E-91)
MEIKNHFGVYCVCFENGKLLCIEKTRGPYQHRYDLPGGSQQLGEGLTETLTREVMEETGFTVRSYSNPRIYDVFVREELKNFMVHHVIALYDVEMNESAPQVTISEAVSDGANDSLGYIWMDIQEITEENASPLVLKVKSELLGFPELDKTSYMNWKVNDEKSTCP

SEQ ID NO: 1515 - DNA, 792 bp, Streptococcus pneumoniae
atgattcgtggggaatacttattgagagagctcaatcaaaatatactattacaaagttgtcaggaatttgtgaaagattatcttgatactatttgctccttttacttaggtaaggaagtttggtatcgttttactgaattaacgaatacagaagccaattgtttagtggggactaaagagttttttgacgaagggcatcccttgtttggctatagaggaactaggcgtttactggcgtgtttggatgaatttcaggctgaagcacatgtcgttacagaagtttatcaaaccaaccccaatctatctgttatctttccttttgtcaatgatgccgaccaattaaaacaagctattacagtattgcgtcagcagggttttactgggaaagtcggaacgatgattgaattaccgtcagcgtattttgacttatctagtatactggaaacgggcatttcaaagattgtagttggaatgaatgatttgacttcctttgtttttgcgactatgagaaacagtcaatggcatgatatggaaagtccaataatgttagatatgctaagagatatgcaggataaagcaagaaagaacaagattgattttgctgtagcaggctatctgaatacttctttcatacaaaaaatgaatcagttgggtatcaagtgcattatccactacagttctattccagagatttttgatttagagattgaccatccagatcatcttaaacacataaaagaagaaagtaaaaaattacaaaggagcacccatgataccgcaagaaatgtggaa

SEQ ID NO: 1516 - protein, 264 aa, Streptococcus pneumoniae
  PEP-utilizing enzymes family protein; Cellular location: cytoplasm; Similar to strain R6 sequence 15902748 (e-152)
MIRGEYLLRELNQNILLQSCQEFVKDYLDTICSFYLGKEVWYRFTELTNTEANCLVGTKEFFDEGHPLFGYRGTRRLLACLDEFQAEAHVVTEVYQTNPNLSVIFPFVNDADQLKQAITVLRQQGFTGKVGTMIELPSAYFDLSSILETGISKIVVGMNDLTSFVFATMRNSQWHDMESPIMLDMLRDMQDKARKNKIDFAVAGYLNTSFIQKMNQLGIKCIIHYSSIPEIFDLEIDHPDHLKHIKEESKKLQRSTHDTARNVE

SEQ ID NO: 1517 - DNA, 438 bp, Streptococcus pneumoniae
atgataccgcaagaaatgtggaataaatacaagcaaatcaatcctttgatcggagatgaaatcgatgcctgggcttttggagttgaaccagaccttttagcggatttggtgtttaaaggagaaaagacagcaacagcatcagcctatgacctctatgtgctagaagacgaaccacttccccaagtagggaccttcgatgtcattttagatagtcaaaatcaggctgtctgcattgtcgaaattacaaaggtttctgttaaacccttcaatcgagtgtcagctgaccatgcctataaggaaggtgagggaaacaagacacttgtctattggcgccaggttcatgaggattttttcagagactgcttgggtgaagcaggattgacttttacacctgaaagcaaggttgttttagaagaatttcgcaaggtctacccactg

SEQ ID NO: 1518 - protein, 146 aa, Streptococcus pneumoniae
  conserved hypothetical protein; Cellular location: cytoplasm; Similar to strain R6 sequence 15902749 (6.E-78)
MIPQEMWNKYKQINPLIGDEIDAWAFGVEPDLLADLVFKGEKTATASAYDLYVLEDEPLPQVGTFDVILDSQNQAVCIVEITKVSVKPFNRVSADHAYKEGEGNKTLVYWRQVHEDFFRDCLGEAGLTFTPESKVVLEEFRKVYPL

SEQ ID NO: 1519 - DNA, 2544 bp, Streptococcus pneumoniae
atgcaagcagttgaacattttattaagcaatttgttcctgaacattatgatttatttttagatttgagtcgtgagaccaagactttttctgggaaagtgaccatcactggtcaagcacagagtgaccgcatctccctccaccaaaaagatttggaaatcacctctgtagaagttgcaggtcaagctcgtccatttacagttgaccatgacaatgaagcccttcatatcgaattggctgaggctggtcaagttgaattggttcttgccttttctggtaaaattacagacaacatgacagggatttacccttcttattatacagttgatggagtcaagaaggaggtcttgtctactcagttcgagagccattttgcgcgcgaagctttcccatgtgtggatgagcctgaagccaaagcaacttttgacctctctcttcgctttgaccaagcagaaggtgaattggccttgtcaaacatgccagaaatcgatgttgaaaaccgtaaggaaacaggtatctggaagtttgagacaacacctcgcatgtcttcttacttgttggcctttgttgctggtgatttgcaaggggtgaccgctaaaactaaaaatggtaccctggtaggtgtctactcaaccaaagcacatccactttcaaatcttgatttctcactggatatcgctgttcgctctatcgagttttacgaagattactatggagttaagtacccaattcctcaatctctccacatcgcccttcctgacttctcagctggtgctatggaaaactggggtcttgtgacctaccgtgaagtttacttggttgtcgatgagaactctacatttgctagccgtcaacaagttgcccttgttgtggcccatgaattggctcaccaatggtttgggaacctcgtgactatgaaatggtgggatgacctttggctcaatgaaagtttcgctaatatgatggaatacgtctgtgtggataccatcgaaccaagctggaatatctttgaagatttccaaacaggtggagtacctcttgctcttgaacgtgacgctactgatggcgttcagtctgtccacgtcgaagttaaacatccagatgaaatcaatacactctttgacggcgctatcgtctatgccaaaggaagccgtctcatgcacatgcttcgccgttggctaggagatgctgattttgctaaaggtttgcacgcctactttgaaaaacaccaatacagcaacaccattggtagtgacctttgggatgcccttggtcaagcgtcaggacgtgatgtcgcagccttcatggattcttggttggaacagcctggttacccagttcttactgttaaagttgaaaatgatgtcttgaagatttcacaaaaacaattcttcatcggtgagaacgaagacaagaaccgtctctgggtggtgcccctcaatagcaactggaaaggcttgcctgatacactcgaaactgaaagtatcgaaatccctggctacgcagctcttcttgctgaaaatgaaggagctcttcgtctcaacactgaaaatactgcccactatattaccgactatcaaggagacttgttagcagctgttcttgctgagctagagacacttgataacacaagcaaactgcaaattgttcaagaacgtcgtttgttggctgaggcagggcacatttcttatgcagacttgcttccagttcttgataaacttgctaaggaagagtcttatctggtggtttcagctgtttctcaagtgatttcagcccttgagcgctttattgatgaaggaacggatgctgaaacagccttcaaaggactggttgctaaattggctcgtcataactatgaccgtcttggttttgaagctaaagacggagaatcagatgaggatgaattggttcgtcagctggctgtttcgatgatgattcgctcaaatgatgcagaagctagtcaagtcgctagccaaatcttcgcaacacacaaggagaatcttgcaggactcccagcagctattcgctcacaagttctgattaatgagatgaaacatcatgagactaaagacttgttagcactttatcttgatacttatactcacgcaacagatgctgtctttaaacgccagttggcagcagctcttgcatacagtacagatgcggataatatccaaaacctgattacttcttggaaggacaaatttgtggtcaaaccacaggacttgtctgcttggtattaccaattcctagctcatcaagcaactcagaaaacagcttggtcttgggcgcgtgaaaactgggcttggattaaggcagcccttggaggagatatgagctttgatagctttgttatccttcctgctcatgtatttaagactcagcaacgcttggcggaatacaaggagttctttgaaccgcaactttctgaccttgctcttagccgtaacatcggtatgggaatcaaggaaattgcagcgcgtgttgacttgattagccgtgaaaaagctgcagtcgaagcagttgttcttcaatacggaaatgca

SEQ ID NO: 1520 - protein, 848 aa, Streptococcus pneumoniae
  aminopeptidase N (pepN); Cellular location: cytoplasm; Similar to strain R6 sequence 15902750 (0.E+01)
MQAVEHFIKQFVPEHYDLFLDLSRETKTFSGKVTITGQAQSDRISLHQKDLEITSVEVAGQARPFTVDHDNEALHIELAEAGQVELVLAFSGKITDNMTGIYPSYYTVDGVKKEVLSTQFESHFAREAFPCVDEPEAKATFDLSLRFDQAEGELALSNMPEIDVENRKETGIWKFETTPRMSSYLLAFVAGDLQGVTAKTKNGTLVGVYSTKAHPLSNLDFSLDIAVRSIEFYEDYYGVKYPIPQSLHIALPDFSAGAMENWGLVTYREVYLVVDENSTFASRQQVALVVAHELAHQWFGNLVTMKWWDDLWLNESFANMMEYVCVDTIEPSWNIFEDFQTGGVPLALERDATDGVQSVHVEVKHPDEINTLFDGAIVYAKGSRLMHMLRRWLGDADFAKGLHAYFEKHQYSNTIGSDLWDALGQASGRDVAAFMDSWLEQPGYPVLTVKVENDVLKISQKQFFIGENEDKNRLWVVPLNSNWKGLPDTLETESIEIPGYAALLAENEGALRLNTENTAHYITDYQGDLLAAVLAELETLDNTSKLQIVQERRLLAEAGHISYADLLPVLDKLAKEESYLVVSAVSQVISALERFIDEGTDAETAFKGLVAKLARHNYDRLGFEAKDGESDEDELVRQLAVSMMIRSNDAEASQVASQIFATHKENLAGLPAAIRSQVLINEMKHHETKDLLALYLDTYTHATDAVFKRQLAAALAYSTDADNIQNLITSWKDKFVVKPQDLSAWYYQFLAHQATQKTAWSWARENWAWIKAALGGDMSFDSFVILPAHVFKTQQRLAEYKEFFEPQLSDLALSRNIGMGIKEIAARVDLISREKAAVEAVVLQYGNA

SEQ ID NO: 1521 - DNA, 738 bp, Streptococcus pneumoniae
atgcagagagttgagttttttttaaggcaaatttggtataatagttttaataaggaggagtttctcatgataaaaatcttattggttgaggatgacctaggtctgtcaaattcagtatttgactttttagacgattttgcggatgttatgcaggtatttgatggagaagaaggtctctacgaagctgagagtggtgtctatgacttgattttgctggatttgatgttgccagaaaaaaatggtttccaagtcttaaaagaattgcgtgaaaagggaattacgacaccagttctgattatgactgccaaggaaagtttggatgacaagggacatggatttgaactgggagcggatgattatctgaccaaacctttctacctagaagaacttaaaatgcggattcaggcccttctcaaacgttcagggaagtttaatgaaaacaccttgacttatgggaatatcgtggttaatttatcaaccaataccgttaaagttgaagatactcctgtcgaattgctggggaaagagttcgatttactagtttatttccttcaaaatcaaaatgtgattttgcctaagacgcagatttttgaccgtctatggggatttgatagtgatacaacgatttcggttgtcgaagtctatgtttcaaaagtccgtaagaaattaaagggaaccacttttgcagagaatttgcaaactttgcgtagtgttgggtatcttttaaaagatgttcag

SEQ ID NO: 1522 - protein, 246 aa, Streptococcus pneumoniae
  DNA-binding response regulator CiaR (ciaR); Cellular location: cytoplasm; Similar to strain R6 sequence 15902751 (e-125)
MQRVEFFLRQIWYNSFNKEEFLMIKILLVEDDLGLSNSVFDFLDDFADVMQVFDGEEGLYEAESGVYDLILLDLMLPEKNGFQVLKELREKGITTPVLIMTAKESLDDKGHGFELGADDYLTKPFYLEELKMRIQALLKRSGKFNENTLTYGNIVVNLSTNTVKVEDTPVELLGKEFDLLVYFLQNQNVILPKTQIFDRLWGFDSDTTISVVEVYVSKVRKKLKGTTFAENLQTLRSVGYLLKDVQ

SEQ ID NO: 1523 - DNA, 1332 bp, Streptococcus pneumoniae
atgttcagtaaacttaaaaaaacatggtatgcggatgactttagttattttatccgcaacttcggtgtcttcaccctgattttttctacaatgactctgattattttacaagtcatgcattcgagtctttatacttcggtggacgataagcttcatggactgagtgaaaatcctcaagcagttattcagctggctataaatagggcaacagaagagattaaagatttagaaaatgctagggcggacgctagtaaagtagaaataaaacctaatgtcagttccaatacggaagtcattctctttgataaagactttactcaacttctttctggaaatcgatttttgggcttggataagattaagttagaaaagaaagaactaggacatatctaccagattcaggtttttaatagctatgggcaggaagaaatctatcgtgtgattttgatggagaccaatattagttcggtttcaaccaatatcaagtatgctgctgtcttgattaataccagtcagttggaacaggctagtcaaaagcatgagcaattgattgtggtcgtgatggctagtttctggattttgtctttacttgccagtctctatctagctagggtcagtgttaggcccctgcttgagagtatgcagaagcaacagtcttttgtggaaaatgccagtcatgagttacgaactccactcgcagttttgcaaaatcgcttagagaccctttttcgtaagccagaagctaccattatggatgtgagcgaaagcattgcatcgagtttggaagaagtccgaaatatgcgttttttaacgacaagcttgctgaacttagctcggagagatgatgggattaagccggagcttgcagaagttccaactagcttttttaatacaactttcacaaactacgagatgattgcttcggaaaataatcgtgtcttccgttttgaaaatcgtatccatcgaacaattgtcacagatcagcttcttctgaaacaactgatgaccattcttttcgataatgccgtcaagtatactgaggaggatggtgaaattgattttcttatctcggcgaccgatcgcaatctttatttacttgtttctgataatggaatcggtatttcgacagaagataaaaagaaaatttttgaccgtttttatcgagtagacaaggctagaacccggcaaaaaggtggttttggtttaggattatccctagccaagcaaattgtagatgctctaaaaggaactgttactgtcaaagataataaacccaagggaacaatctttgaagtgaagattgccattcagacaccatctaaaaagaaaaaa

SEQ ID NO: 1524 - protein, 444 aa, Streptococcus pneumoniae
  sensor histidine kinase CiaH (ciaH); Cellular location: membrane; Similar to strain R6 sequence 15902752 (0.E+01)
MFSKLKKTWYADDFSYFIRNFGVFTLIFSTMTLIILQVMHSSLYTSVDDKLHGLSENPQAVIQLAINRATEEIKDLENARADASKVEIKPNVSSNTEVILFDKDFTQLLSGNRFLGLDKIKLEKKELGHIYQIQVFNSYGQEEIYRVILMETNISSVSTNIKYAAVLINTSQLEQASQKHEQLIVVVMASFWILSLLASLYLARVSVRPLLESMQKQQSFVENASHELRTPLAVLQNRLETLFRKPEATIMDVSESIASSLEEVRNMRFLTTSLLNLARRDDGIKPELAEVPTSFFNTTFTNYEMIASENNRVFRFENRIHRTIVTDQLLLKQLMTILFDNAVKYTEEDGEIDFLISATDRNLYLLVSDNGIGISTEDKKKIFDRFYRVDKARTRQKGGFGLGLSLAKQIVDALKGTVTVKDNKPKGTIFEVKIAIQTPSKKKK

SEQ ID NO: 1525 - DNA, 285 bp, Streptococcus pneumoniae
atgcccgtaagaaaattacaatcctatgaggtagactatcaagaagaattaaaccagcagcttcctcattaccaagcttatacacctgaagcgcaatctgatgccaatctcaaggaaatcctattttttattaatatcgctgttttttgtatctgtattgctatctttagttttatctttttagcattaaaattatcaactgctcttgcctttgccgcagcaatcggattcagcttacttgttttaaaagttcaacggtctattatcaaacgaaaacgtagaaga

SEQ ID NO: 1526 - protein, 95 aa, Streptococcus pneumoniae
  hypothetical protein; Cellular location: membrane; Similar to strain R6 sequence 15902753 (4.E-49)
MPVRKLQSYEVDYQEELNQQLPHYQAYTPEAQSDANLKEILFFINIAVFCICIAIFSFIFLALKLSTALAFAAAIGFSLLVLKVQRSIIKRKRRR

SEQ ID NO: 1527 - DNA, 1068 bp, Streptococcus pneumoniae
atgattctctccttaacagtacatacctattttatcattttttcggcagagaattattacagaaaggttacaaaaagaataaagtcccttttcattttcaaagcatggctgattttggagaaatgtggtataatttttcttatggaaaagattgtcattacagcaactgctgaaagtattgaacaagttgaacaactactcgaagctggcgtagaccgtatctatgtcggtgagaaagattttggtcttcgtctgccaacgacctttagttatgaccaattacgtgaaatcgctaagttggttcatgatgctggtaaggaattgatcgttgcggtcaatgctctcatgcaccaagatatgatggaccgtatcaagcctttcttaaacttcttggaagaaatcaagacagactatattacgattggggatgcaggcgtcttttacgtagttaaccgcgatggttattcatttaagaccatctacgatgcttcaaccatggtaactagcagtcgtcagattaacttctggggacaaaaggctggcgcatctgaggctgttttggcgcgtgaaattccatcagctgaacttttcaaaatgccagagattttggaaattcctgctgaagttttggtttacggtgctagcgtcatccatcattctaaacgtccactcttgcaaaactactataactttacacatatcgatgatgaaaagacgcataaacgtgacctcttcttggctgagccaagtgatccagagagccactattccatttttgaagataatcatgggacccatatctttgccaacaatgaccttgatttgatgatcaaattaacagaattggtggagcatggctttactcgctggaaactagaagggctctacactcctggtcagaactttgttgagattgcaaaactctttatccaagcgcgtagcttgattcaagagggcaactttagtcatgctcaagccttcttgctggatgaagaagttcgtaaacttcaccctaaaaaccgtttccttgatacaggattttatgactacgatcctgacatggttaga

SEQ ID NO: 1528 - protein, 356 aa, Streptococcus pneumoniae
  conserved hypothetical protein; Cellular location: membrane; Similar to strain R6 sequence 15902754 (0.E+01)
MILSLTVHTYFIIFSAENYYRKVTKRIKSLFIFKAWLILEKCGIIFLMEKIVITATAESIEQVEQLLEAGVDRIYVGEKDFGLRLPTTFSYDQLREIAKLVHDAGKELIVAVNALMHQDMMDRIKPFLNFLEEIKTDYITIGDAGVFYVVNRDGYSFKTIYDASTMVTSSRQINFWGQKAGASEAVLAREIPSAELFKMPEILEIPAEVLVYGASVIHHSKRPLLQNYYNFTHIDDEKTHKRDLFLAEPSDPESHYSIFEDNHGTHIFANNDLDLMIKLTELVEHGFTRWKLEGLYTPGQNFVEIAKLFIQARSLIQEGNFSHAQAFLLDEEVRKLHPKNRFLDTGFYDYDPDMVR

SEQ ID NO: 1529 - DNA, 2448 bp, Streptococcus pneumoniae
atgaaaacgattggtaatcgctatgttgtggtggatttagaggcaactagcacaggtagtaaggctaaaattatccaagtgggaattgtcgtgattgaggacggagaaatcgtcgatcactatacgacggatgtcaatccacatgaacccttggatgctcatatcaaagaactgacaggattgacagaccaacgtctggcgcaagcacctgatttttcgcaagttgccagaaaaatatttgacttggtggaggatgggatttttgtagcccataatgttcagtttgatgctaatctcttggcggaaaatttattttttgaaggctatgagctaagaaaccctcgtgttgatacggtcgaattggcccaggtctttttccctgaactggaaaaatatagcttgccgattttgtgtcgagaattaggaattcctcttaaacacgcacacacagccctttcagatgcccaagctacagcagaattacttctttttttacggaaaaagatgacccagcttcctaaaggtctcttggaacgcttgctggaaatggctgacgctctcctatatgagtcctacctggttattgaggaaacttatcgcaaccaatctatcctgagttctccagacttggtccaagttcaaggtctatattttaagaaaacggaagcttctctggagccacgaaaactatctcaagacttttctaaaaatatttctctgttgaaccttgaagtgagggaggaacaagaaagttttgctaaagaggttggcttgctattgaaagatgaacctgtctctctgattcaagcgccgacagggattgggaaaacctatggctatctcttacccgctttatctcaatccaaagagcgacaaattgttcttagtgttccgacaaagattcttcaaaatcaaatcatggaagaagaaggtaaacgcctcaaggaagtgttccatacagatattcatagcttaaagggaccacaaaattatctgaagttggatgccttttatcattccttgcaggaaaatgatgaaaatcgcttatttagacgctttaaaatgcaagtcttggtctggcttactgagacagagacaggagatttggatgaaatcgggcaactctaccgttaccaacattttctagcagaccttcgtcatgatgggaatttatcatcccagagcttatttgtgacggaagatttttggaaacgtagtcaagaaagggcagagacttgcaagcttttagtgactaatcatgcctatctcgtaaccagacttgaagataatcctgaatttgtcagtgaccgtttactgattattgatgaagtccaaaagattttgttagctctagaaaatctgcttcaagagacctacgatatacaatctattatcgatttaattgataaggctttagtaggagaagaaaacagggttcaacaacggatactagaaagtattcgctttgagtgtctctacttgatagaacaatttcagtctggcaaatctaggaaaaatatcttagattctctggacaatctccatcagtatttttcagaattggaagtagaagactttgatgagctggttcgctattttacagctgaaggtgattactggcttgaagtaactgaaacgagtcaaaagaaaattcagatttcttctacaaaatcaggccgtactcttctgtcctctttacttcctgagagttgccaagtcttgggagtatcggctactcttgagattagtcagagggtttctttggcagaccttttaggctatcctgaagctaaatttgtcaagattgaatctcggggaaaacaggaacaagaagtggtcatggtcaaagatttccctctggtaacagaaacctccttagaagtctatgccagagaggtagctgctttactagtggaaattcaagctttccagcaaccgattttggttctctttaccgctaaagacatgcttctagcagtatcggatttacttacagttagccacttggcccagtataaaaatggggatgttcatcagctaaagaaacgctttgaaaaaggtgaacaacaaatcttgcttggtgcagcaagtttctgggagggagttgatttttcaagccatccttctgtgattcaagttgtaccgaggcttcctttccaaaatcctcaagaacccttgacgaaaaagattaatcaagaactgaatcaagaagggaaaaatgccttttatgattatcaattgccaatggccattattcgtttaaaacaggctttgggaagaagtatgagacgtgaataccaacgttccttaactcttattttggataggagaatcgtcggaaaacgatacggcaaacaaatagtagcatctctagcagaagaagcgactgttaaaaccatctctcgatccgaagttgacgaggctattgatagattttttaatgagctt

SEQ ID NO: 1530 - protein, 816 aa, Streptococcus pneumoniae
  DNA polymerase III, epsilon subunit/ATP-dependent helicase DinG; Cellular location: membrane; Similar to strain R6 sequence 15902755 (0.E+01)
MKTIGNRYVVVDLEATSTGSKAKIIQVGIVVIEDGEIVDHYTTDVNPHEPLDAHIKELTGLTDQRLAQAPDFSQVARKIFDLVEDGIFVAHNVQFDANLLAENLFFEGYELRNPRVDTVELAQVFFPELEKYSLPILCRELGIPLKHAHTALSDAQATAELLLFLRKKMTQLPKGLLERLLEMADALLYESYLVIEETYRNQSILSSPDLVQVQGLYFKKTEASLEPRKLSQDFSKNISLLNLEVREEQESFAKEVGLLLKDEPVSLIQAPTGIGKTYGYLLPALSQSKERQIVLSVPTKILQNQIMEEEGKRLKEVFHTDIHSLKGPQNYLKLDAFYHSLQENDENRLFRRFKMQVLVWLTETETGDLDEIGQLYRYQHFLADLRHDGNLSSQSLFVTEDFWKRSQERAETCKLLVTNHAYLVTRLEDNPEFVSDRLLIIDEVQKILLALENLLQETYDIQSIIDLIDKALVGEENRVQQRILESIRFECLYLIEQFQSGKSRKNILDSLDNLHQYFSELEVEDFDELVRYFTAEGDYWLEVTETSQKKIQISSTKSGRTLLSSLLPESCQVLGVSATLEISQRVSLADLLGYPEAKFVKIESRGKQEQEVVMVKDFPLVTETSLEVYAREVAALLVEIQAFQQPILVLFTAKDMLLAVSDLLTVSHLAQYKNGDVHQLKKRFEKGEQQILLGAASFWEGVDFSSHPSVIQVVPRLPFQNPQEPLTKKINQELNQEGKNAFYDYQLPMAIIRLKQALGRSMRREYQRSLTLILDRRIVGKRYGKQIVASLAEEATVKTISRSEVDEAIDRFFNEL

SEQ ID NO: 1531 - DNA, 1248 bp, Streptococcus pneumoniae
ttgtatgaaagtataaggttagtatatatgaaacgttctctcgactcaagagtcgattacagtttgctcttgccagtattttttctactggtcatcggtgtggtggctatctatatagccgttagtcatgattatcccaataatattctgcccattttagggcagcaggtcgcctggattgccttggggcttgtgattggttttgtggtcatgctctttaatacagaatttctttggaaggtgaccccctttctatatattttaggcttgggacttatgatcttgccgattgtattttataatccaagcttagttgcatcaacgggtgccaaaaactgggtatcaataaatggaattaccctattccaaccgtcagaatttatgaagatatcctatatcctcatgttggctcgtgtcattgtccaatttacaaagaaacataaggaatggagacgcacggttccgctggactttttgttaattttctggatgattctctttaccattccagtcctagttcttttagcacttcaaagtgacttggggacggctttggtttttgtagccattttctcaggaatcgttttattatcaggggtttcttggaaaattattatcccagtatttgtgactgctgtaacaggagttgctggtttcttagctatctttattagcaaggacggacgagcttttcttcaccagattggaatgccgacctaccaaattaatcggattttggcttggctcaatccctttgagtttgcccaaacaacgacttaccagcaggctcaagggcagattgccattgggagtggtggcttatttggtcagggatttaatgcttcgaatctgcttatcccagttcgagagtcagatatgatttttacggttattgcagaagattttggctttattggctctgtcctggttattgccctctatctcatgttgatttaccgtatgttgaagattactcttaaatcaaataaccagttctacacttatatttccacaggtttgattatgatgttgctcttccacatctttgagaatatcggtgctgtgactggactacttcctttgacggggattcccttgcctttcatttcgcaagggggatcagctattatcagtaatctgattggtgttggtttgcttttatcgatgagttaccagactaatctagctgaagaaaagagcggaaaagtcccattcaaacggaaaaaggttgtattaaaacaaattaaa

SEQ ID NO: 1532 - protein, 416 aa, Streptococcus pneumoniae
  rod shape-determining protein RodA, putative; Cellular location: membrane; Similar to strain R6 sequence 15902756 (0.E+01)
MYESIRLVYMKRSLDSRVDYSLLLPVFFLLVIGVVAIYIAVSHDYPNNILPILGQQVAWIALGLVIGFVVMLFNTEFLWKVTPFLYILGLGLMILPIVFYNPSLVASTGAKNWVSINGITLFQPSEFMKISYILMLARVIVQFTKKHKEWRRTVPLDFLLIFWMILFTIPVLVLLALQSDLGTALVFVAIFSGIVLLSGVSWKIIIPVFVTAVTGVAGFLAIFISKDGRAFLHQIGMPTYQINRILAWLNPFEFAQTTTYQQAQGQIAIGSGGLFGQGFNASNLLIPVRESDMIFTVIAEDFGFIGSVLVIALYLMLIYRMLKITLKSNNQFYTYISTGLIMMLLFHIFENIGAVTGLLPLTGIPLPFISQGGSAIISNLIGVGLLLSMSYQTNLAEEKSGKVPFKRKKVVLKQIK

SEQ ID NO: 1533 - DNA, 552 bp, Streptococcus pneumoniae
atggtaaaagtagcagttatattagctcagggctttgaagaaattgaagccttgacagttgtagatgtcttgcgtcgagccaatatcacatgtgatatggttggttttgaagagcaagtaacgggttcgcatgcaatccaagtaagagcagatcatgtctttgatggagatttatcagactatgatatgattgttcttcctggaggtatgcctggttctgcacatttacgtgataatcagaccttgattcaagaattgcaaagcttcgagcaagaagggaagaaactagcagccatttgtgcggcaccaattgccctcaatcaagcagagatattgaaaaataagcgatacacttgttatgacggcgttcaagagcaaatccttgatggtcactacgtcaaggaaacagtagtggtagatggtcagttgacaaccagtcggggtccttcaacagcccttgcctttgcctacgagttggtggagcaactaggaggggacgcagagagtttacgaacaggaatgctctatcgagatgtctttggtaaaaatcag

SEQ ID NO: 1534 - protein, 184 aa, Streptococcus pneumoniae
  4-methyl-5(b-hydroxyethyl)-thiazole monophosphate biosynthesis protein,; Cellular location: cytoplasm; Similar to strain R6 sequence 15902757 (e-102)
MVKVAVILAQGFEEIEALTVVDVLRRANITCDMVGFEEQVTGSHAIQVRADHVFDGDLSDYDMIVLPGGMPGSAHLRDNQTLIQELQSFEQEGKKLAAICAAPIALNQAEILKNKRYTCYDGVQEQILDGHYVKETVVVDGQLTTSRGPSTALAFAYELVEQLGGDAESLRTGMLYRDVFGKNQ

SEQ ID NO: 1535 - DNA, 570 bp, Streptococcus pneumoniae
atgaagggtatgaaatatcacgattacatctgggatttaggtggaactttactggataattatgaaacttcaacagctgcatttgttgaaacattggcactgtatggtatcacacaagaccatgacagtgtctatcaagctttaaaggtttctactccttttgcgattgagacattcgctcccaatttagagaattttttagaaaagtacaaggaaaatgaagccagagagcttgaacacccgattttatttgaaggagtttctgacctattggaagacatttcaaatcaaggtggccgtcattttttggtctctcatcgaaatgatcaggttttggaaattttagaaaaaacctctatagcagcttattttacagaagtggtgacttctagctcaggctttaagagaaagccaaatcccgaatccatgctttatttaagagaaaagtatcagattagctctggtcttgtcattggtgatcggccgattgatatcgaagcaggtcaagctgcaggacttgatacccacttgtttaccagtatcgtgaatttaagacaagtattagacata

SEQ ID NO: 1536 - protein, 190 aa, Streptococcus pneumoniae
  hydrolase, haloacid dehalogenase-like family; Cellular location: cytoplasm; Similar to strain R6 sequence 15902758 (e-106)
MKGMKYHDYIWDLGGTLLDNYETSTAAFVETLALYGITQDHDSVYQALKVSTPFAIETFAPNLENFLEKYKENEARELEHPILFEGVSDLLEDISNQGGRHFLVSHRNDQVLEILEKTSIAAYFTEVVTSSSGFKRKPNPESMLYLREKYQISSGLVIGDRPIDIEAGQAAGLDTHLFTSIVNLRQVLDI

SEQ ID NO: 1537 - DNA, 1944 bp, Streptococcus pneumoniae
atgacagaagaaatcaaaaatctgcaggcacaggattatgatgccagtcaaattcaagttttagagggcttagaggctgttcgtatgcgtccagggatgtacattggatcaacctcaaaagaaggtcttcaccatctagtctgggaaattgttgataactcaattgacgaggccttggcaggatttgccagccatattcaagtttttattgagccagatgattcgattactgttgtggatgatgggcgtggtatcccagtcgatattcaggaaaaaacaggccgtcctgctgttgagaccgtctttacagtccttcacgctggaggaaagttcggcggtggtggatacaaggtttcaggtggtcttcacggggtggggtcgtcagtagttaatgccctttccactcaattagacgttcatgttcacaaaaatggtaagattcattaccaagaataccgtcgtggtcatgttgtcgcagatcttgaaatagttggagatacggataaaacaggaacaactgttcacttcacaccggacccaaaaatcttcactgaaacaacaatctttgattttgataaattaaataaacggattcaagagttggcctttctaaatcgcggtcttcaaatttcaattacagataagcgccaaggtttggaacaaaccaagcattatcattatgaaggtgggattgctagttacgttgaatatatcaacgagaacaaggatgtaatctttgatacaccaatctatacagacggtgagatggatgatatcacagttgaggtagccatgcagtacacaactggttaccatgaaaatgtcatgagtttcgccaataatattcatacccatgaaggtggaacacatgaacaaggtttccgtacagccttgacacgtgttatcaacgattatgctcgtaaaaataagttactgaaagacaatgaagataatttaacaggggaagatgttcgcgaaggcttaactgcagttatctcagttaaacacccaaatccacagtttgaaggacaaaccaagaccaaattgggaaatagcgaagtggtcaagattaccaatcgcctcttcagtgaagctttctccgatttcctcatggaaaatccacagattgccaaacgtatcgtagaaaaaggaattttggctgccaaggctcgtgtggctgccaagcgtgcgcgtgaagtcacacgtaaaaaatctggtttggaaatttccaaccttccagggaaactagcagactgttcttctaataaccctgctgaaacagaactcttcatcgtcgaaggagactcagctggtggatcagccaaatctggtcgtaaccgtgagtttcaggctatccttccaattcgcggtaagattttgaacgttgaaaaagcaagtatggataagattctagccaacgaagaaattcgtagtcttttcacagccatgggaacaggatttggcgcagaatttgatgtttcgaaagcccgttaccaaaaactcgttttgatgaccgatgccgatgtcgatggagcccacattcgtacccttcttttaaccttgatttatcgttatatgaaaccaatcctagaagctggttatgtttatattgcccaaccaccaatctatggtgtcaaggttggaagcgagattaaagaatatatccagccgggtgcagatcaagaaatcaaactccaagaagctttagcccgttatagtgaaggtcgtaccaaaccgactattcagcgttataaggggctaggtgaaatggacgatcatcagctgtgggaaacaaccatggatcccgaacatcgcttgatggctagagtttctgtagatgatgctgcagaagcagataaaatctttgatatgttgatgggggatcgagtagagcctcgtcgtgagtttatcgaagaaaatgctgtctatagtacacttgatgtc

SEQ ID NO: 1538 - protein, 648 aa, Streptococcus pneumoniae
  DNA gyrase subunit B (gyrB); Cellular location: cytoplasm; Similar to strain R6 sequence 15902759 (0.E+01)
MTEEIKNLQAQDYDASQIQVLEGLEAVRMRPGMYIGSTSKEGLHHLVWEIVDNSIDEALAGFASHIQVFIEPDDSITVVDDGRGIPVDIQEKTGRPAVETVFTVLHAGGKFGGGGYKVSGGLHGVGSSVVNALSTQLDVHVHKNGKIHYQEYRRGHVVADLEIVGDTDKTGTTVHFTPDPKIFTETTIFDFDKLNKRIQELAFLNRGLQISITDKRQGLEQTKHYHYEGGIASYVEYINENKDVIFDTPIYTDGEMDDITVEVAMQYTTGYHENVMSFANNIHTHEGGTHEQGFRTALTRVINDYARKNKLLKDNEDNLTGEDVREGLTAVISVKHPNPQFEGQTKTKLGNSEVVKITNRLFSEAFSDFLMENPQIAKRIVEKGILAAKARVAAKRAREVTRKKSGLEISNLPGKLADCSSNNPAETELFIVEGDSAGGSAKSGRNREFQAILPIRGKILNVEKASMDKILANEEIRSLFTAMGTGFGAEFDVSKARYQKLVLMTDADVDGAHIRTLLLTLIYRYMKPILEAGYVYIAQPPIYGVKVGSEIKEYIQPGADQEIKLQEALARYSEGRTKPTIQRYKGLGEMDDHQLWETTMDPEHRLMARVSVDDAAEADKIFDMLMGDRVEPRREFIEENAVYSTLDV

SEQ ID NO: 1539 - DNA, 1725 bp, Streptococcus pneumoniae
atgtctaatggacaactaatttatttaatggttgcaattgcagtcattttagttctggcttatgtagtggcaatctttctacgtaagcgaaacgaggggagattagaggcgctagaagaaaaaaaagaagaactatacaatcttccagtaaatgatgaagtagaagctgtaaaaaatatgcacttgattggacaaagtcaagtggctttccgtgaatggaatcaaaaatgggtcgatttatctctcaactcttttgccgatattgaaaataatctctttgaagcagaaggctataaccattcatttcgttttctcaaggccagtcatcaaattgaccaaattgagagtcaaattactttgattgaagaagatattgcggcaattcgcaatgctttggcagacttagagaagcaagaatctaaaaatagtggtcgtgttcttcatgctttggatttatttgaggaacttcagcatagagttgctgaaaattcagaacagtatggtcaagccttggatgaaattgaaaaacaattagaaaatatccaatctgaattttcacaatttgtaaccttgaattcatcgggtgaccctgtggaagccgcagtgattttggataatacagaaaatcacattttggccttaagtcatattgtggatcgtgttccagccttggttacgacgctttctacagaattgccagatcaattacaggatttggaagccggttatcgtaaactaattgatgctaattatcattttgttgaaacggatattgaagcgcgtttccacttgctttatgaagcattcaagaaaaaccaagagaatattcgtcagttggaattggataatgccgaatatgagaatggacaggcacaagaggaaatcaatgccttgtatgatatttttactcgagaaattgctgctcagaaagtagtggaaaatctacttgcaactcttccaacttatcttcaacatatgaaagagaataatactttattgggagaagatattgcacgtttgaacaagacctatttacttcctgagacagctgcaagccatgttcgtcgtattcagacagaattagagagttttgaggcagctattgttgaggtaacttcaaatcaagaagaaccaacccaagcttattcagttcttgaagaaaatcttgaggatttacaaactcaactaaaagatattgaagatgagcaaatttcagttagtgagcgcctgacacaaattgagaaagatgatattaatgcacgtcaaaaggccaatgtttatgtcaatcgtctccatactatcaagcgatacatggaaaaacgcaatctgccaggtattccacaaactttcttgaagttattctttacggcaagcaataataccgaggatttaatggttgagttagaacaaaaaatgattaacattgaatctgttacccgagttcttgaaattgcaacgaatgatatggaagctttagaaacggaaacttataatattgtacaatatgcaactttgacagagcaactcttgcaatattctaaccgctatcgctcatttgatgaacgcattcaagaagcatttaacgaagctttagatatttttgaaaaagaatttgattatcacgcttcatttgacaagatttctcaagcattggaagtggcagagcctggtgtaaccaatcgctttgttacctcatatgagaaaacacgtgaaacgattcgtttt

SEQ ID NO: 1540 - protein, 575 aa, Streptococcus pneumoniae
  septation ring formation regulator EzrA, putative; Cellular location: outside; Similar to strain R6 sequence 15902760 (0.E+01)
MSNGQLIYLMVAIAVILVLAYVVAIFLRKRNEGRLEALEEKKEELYNLPVNDEVEAVKNMHLIGQSQVAFREWNQKWVDLSLNSFADIENNLFEAEGYNHSFRFLKASHQIDQIESQITLIEEDIAAIRNALADLEKQESKNSGRVLHALDLFEELQHRVAENSEQYGQALDEIEKQLENIQSEFSQFVTLNSSGDPVEAAVILDNTENHILALSHIVDRVPALVTTLSTELPDQLQDLEAGYRKLIDANYHFVETDIEARFHLLYEAFKKNQENIRQLELDNAEYENGQAQEEINALYDIFTREIAAQKVVENLLATLPTYLQHMKENNTLLGEDIARLNKTYLLPETAASHVRRIQTELESFEAAIVEVTSNQEEPTQAYSVLEENLEDLQTQLKDIEDEQISVSERLTQIEKDDINARQKANVYVNRLHTIKRYMEKRNLPGIPQTFLKLFFTASNNTEDLMVELEQKMINIESVTRVLEIATNDMEALETETYNIVQYATLTEQLLQYSNRYRSFDERIQEAFNEALDIFEKEFDYHASFDKISQALEVAEPGVTNRFVTSYEKTRETIRF

SEQ ID NO: 1541 - DNA, 93 bp, Streptococcus pneumoniae; identical to SEQ ID NO: 1379

SEQ ID NO: 1542 - protein, 31 aa, Streptococcus pneumoniae; identical to SEQ ID NO: 1380
  hypothetical protein; Cellular location: cytoplasm

SEQ ID NO: 1543 - DNA, 264 bp, Streptococcus pneumoniae
atgacagttgaggaaaagaaagtctttcttgcccgccatttgaaggctgcagaggcaggagaatttgttacaattgatgccttatttcaggcttataaaaaggagttaggtcgttcctacacacgtgatgccttctatcaactgttgaagtgccatggttggcgaaatattatgccacgtccagaacatcctaagaaagcagacgctcaaaccattgtcgcgtctaaaaataaaatctcaattcaagaagaaaagaaagcgctt

SEQ ID NO: 1544 - protein, 88 aa, Streptococcus pneumoniae
  hypothetical protein (Transposase); Cellular location: cytoplasm; Similar to strain R6 sequence 15902761 (1.E-44)
MTVEEKKVFLARHLKAAEAGEFVTIDALFQAYKKELGRSYTRDAFYQLLKCHGWRNIMPRPEHPKKADAQTIVASKNKISIQEEKKAL

SEQ ID NO: 1545 - DNA, 510 bp, Streptococcus pneumoniae
ttgatgtaccaagatgaggctggtttcggtagaatcagtaaactgggatcttgttgggctccaataggagtaggtccacatatccatagtcactatatacgagaatttcgctattgttatggagctgttgatgcccatacaggcgaatcatttttcttaatagctggtagatgtaatactgagtggatgaacgcctttttagaagagctttcacaagcttatccagatgattatcttttactcgttatggacaatgctatatggcataaatcaagtaccttaaagattccgactaatattggttttacctttattcctccatacacaccagagatgaaccccattgaacaagtgtggaaagagattcgtaaacgtggatttaagaataaagcctttcaaactttggaagatgtcatgaatcaactccaagatgttatacaaggattggagaaggaggtgataaagtccatcgttaatcggagatggactagaatgctttttgaaaacaga

SEQ ID NO: 1546 - protein, 170 aa, Streptococcus pneumoniae
  transposase family protein; Cellular location: cytoplasm; Similar to strain R6 sequence 15902762 (2.E-94)
MMYQDEAGFGRISKLGSCWAPIGVGPHIHSHYIREFRYCYGAVDAHTGESFFLIAGRCNTEWMNAFLEELSQAYPDDYLLLVMDNAIWHKSSTLKIPTNIGFTFIPPYTPEMNPIEQVWKEIRKRGFKNKAFQTLEDVMNQLQDVIQGLEKEVIKSIVNRRWTRMLFENR

SEQ ID NO: 1547 - DNA, 285 bp, Streptococcus pneumoniae
atgataattcaactaagtgatttaggtcaagttcaccttgtttgtggcaagacagatatgaggcagggaatagactcattagcctatgtagttaaaacccactttgaattggattctttctccggtcaagtctttctcttttgtggtggacgtaaagaccgctttaaagccctttactgggatggtcaaggattttggctactatataaacgctttgagaacggaaaactgacttggctaagtacagaaaaagatgtcaaagctctcgcacctgaacaagtagac

SEQ ID NO: 1548 - protein, 95 aa, Streptococcus pneumoniae
  IS66 family element, Orf2, interruption; Cellular location: cytoplasm
MIIQLSDLGQVHLVCGKTDMRQGIDSLAYVVKTHFELDSFSGQVFLFCGGRKDRFKALYWDGQGFWLLYKRFENGKLTWLSTEKDVKALAPEQVD

SEQ ID NO: 1549 - DNA, 513 bp, Streptococcus pneumoniae
atgaaattaagttatgatgataaagttcagatctatgaacttagaaaacaaggatatagcttagagaagctttcaaataaatttgggataaataattctaatcttaggtatatgattaaattgattgatcgttacggaatagagttcgtcaaaaaaggaaaaaatcgttactattttcctgatttaaaacaagaaatgattaataaagtcttacatgaaggctgaactaaagatagagtttctcttgaatacggtctcccaagtcgtacgatacttcttaactggctagcacaatacagaaaaaacgggtatactattgttgagaaaacaagagggagagtacctaaaatgggacgtaagccaaaaaagagacctgaagagagaacagaattagaacgtcttcaagcagaaaatgagtacctgagagcggagaatgctatcctaaaaaagttaagagaactccgatggaaggaggaaaaagagaaagaagaaagacagaaattgttcaagaat

SEQ ID NO: 1550 - skipped

SEQ ID NO: 1551 - DNA, 820 bp, Streptococcus pneumoniae
atgactgagttttcgttagatcttcttctaaaagccattaaactagctcgttggacctactactatcacttgaaacagctagacaaaccagataaggaccaagagcttaaagctgaaattcaatccatttttatcgaacacaagggaaattatggttatcgtcggatttatttagaactaagaaatcgtggttatctggtaaatcataaaagagttcaaggcttgatgaaagtactcaatttacaagctaaaatgcgacagaaacgaaaataaaggagacgttggtaagaaggcagagaatctcattcaaggccaatttgaaggctctaaaacaatggaaaagtgctacacagatgtgacagaatttgccattccagcaagtactcaaaagctttacttatcaccagttttagatggctttaatagcgaaattattgcttttaatctttcgacttcacccaacttagaacaagtacaaacaatgttagaacaggcattcaaagagaagcactacgagaatacgattctccatagtgaccaaggctggcaatatcaacacgattcttatcatcggttcctagagagtaagggaattcaagcatctatgtcacgcaagggcaacagccaagacaacggtatgatggaatctttctttggcattttaaaatccgaaatgttttatggctatgagaaaacatttaaatcacttaaccaattggaacaagccattatagactatattgattactacaacaacaaacgaattaaggtaaaactaaaaggacttagtcctgtgcagtacagaactaaatcctttgga

SEQ ID NO: 1552 - protein, 90 aa, Streptococcus pneumoniae
  IS3-Spn1, transposase FRAMESHIFT
MTEFSLDLLLKAIKLARWTYYYHLKQLDKPDKDQELKAEIQSIFIEHKGNYGYRRIYLELRNRGYLVNHKRVQGLMKVLNLQAKMRQKRK

SEQ ID NO: 1553 - DNA, 486 bp, Streptococcus pneumoniae
atggaaaagtgctacacagatgtgacagaatttgccattccagcaagtactcaaaagctttacttatcaccagttttagatggctttaatagcgaaattattgcttttaatctttcgacttcacccaacttagaacaagtacaaacaatgttagaacaggcattcaaagagaagcactacgagaatacgattctccatagtgaccaaggctggcaatatcaacacgattcttatcatcggttcctagagagtaagggaattcaagcatctatgtcacgcaagggcaacagccaagacaacggtatgatggaatctttctttggcattttaaaatccgaaatgttttatggctatgagaaaacatttaaatcacttaaccaattggaacaagccattatagactatattgattactacaacaacaaacgaattaaggtaaaactaaaaggacttagtcctgtgcagtacagaactaaatcctttgga

SEQ ID NO: 1554 - protein, 162 aa, Streptococcus pneumoniae
  probable transposase (insertionsequen)
MEKCYTDVTEFAIPASTQKLYLSPVLDGFNSEIIAFNLSTSPNLEQVQTMLEQAFKEKHYENTILHSDQGWQYQHDSYHRFLESKGIQASMSRKGNSQDNGMMESFFGILKSEMFYGYEKTFKSLNQLEQAIIDYIDYYNNKRIKVKLKGLSPVQYRTKSFG

SEQ ID NO: 1555 - DNA, 111 bp, Streptococcus pneumoniae
ttgctactatgcgttttattattgaaagacttattggactttctctcaaatcgagtttttactcaattttcttacttgattgggattgaaattccaattaatttctctgag

SEQ ID NO: 1556 - protein, 37 aa, Streptococcus pneumoniae
  hypothetical protein (Transposase); Cellular location: cytoplasm; Similar to strain R6 sequence 15903342 (1.E-38)
MLLCVLLLKDLLDFLSNRVFTQFSYLIGIEIPINFSE

SEQ ID NO: 1557 - DNA, 297 bp, Streptococcus pneumoniae
atgaagcttatcaatacgacaaactcacactcgcaacttgtaaaaagtcagctagaaagtaccgatgcaacccttgttgaggtttattctgcagggaatacagatgttatttttacccaagctccgcttcactatgaaatcctcatctcaaacaaacaccgtgctattcgtgagcctgaaatcgaaaccattcaagaatttttcttgaaacgtaaaattgataaggcctctgttgatgaagccaatatcaagacactctactcagagaaattaattggaatttcaatcccaatcaag

SEQ ID NO: 1558 - protein, 99 aa, Streptococcus pneumoniae
  hypothetical protein; Cellular location: cytoplasm; Similar to strain R6 sequence 15902764 (9.E-51)
MKLINTTNSHSQLVKSQLESTDATLVEVYSAGNTDVIFTQAPLHYEILISNKHRAIREPEIETIQEFFLKRKIDKASVDEANIKTLYSEKLIGISIPIK

SEQ ID NO: 1559 - DNA, 420 bp, Streptococcus pneumoniae
gtgaatacagactatattgctcgctatggcgtatatgcagttatccctaatcctgaacaaaaacaaattgttcttgttcaagaaccaaatggtgcttggttcctaccatgtggagaaattgaagcaggtgaaaatcatcaggaagccctaaagcatgagttgattgaagagcttggtttcacagcagaaattggtacctattacggacaagctgacgaatatttctattctcgtcatcgtgatacctactactacaatcctgcctacctctatgaagcaactcctttcaaagaagtacaaaagccactagaaaactttaatcatattgcctggttccctattgacgaggctatcaaaaaccttaaacgtggtagccataaatgggccattgaatcttggaaaaaacagcataagattggc

SEQ ID NO: 1560 - protein, 140 aa, Streptococcus pneumoniae
  MutT/nudix family protein; Cellular location: cytoplasm; Similar to strain R6 sequence 15902765 (1.E-82)
MNTDYIARYGVYAVIPNPEQKQIVLVQEPNGAWFLPCGEIEAGENHQEALKHELIEELGFTAEIGTYYGQADEYFYSRHRDTYYYNPAYLYEATPFKEVQKPLENFNHIAWFPIDEAIKNLKRGSHKWAIESWKKQHKIG

SEQ ID NO: 1561 - DNA, 348 bp, Streptococcus pneumoniae
atgtggtataatcttcttatggcatattcaatagattttcgtaaaaaagttctctcttattgtgagcgaacaggtagtataacagaagcatcacacgttttccaaatctcacgtaataccatttatggctggttaaagctaaaagagaaaacaggagagctaaaccaccaagtaaaaggaataaaaccaagaaaggttgatagagatagacttaaaaactatcttactgacaatccagacgcttatttgactgaaatagcttctgaatttggctgtcatccaactaccatccactatgcgctcaaagctatgggctacactcgaaaaaaaaaagaactacacctacta

SEQ ID NO: 1562 - protein, 116 aa, Streptococcus pneumoniae
  IS630-Spn1, transposase Orf1 FRAMESHIFT; Cellular location: cytoplasm; Similar to strain R6 sequence 15902766 (1.E-62)
MWYNLLMAYSIDFRKKVLSYCERTGSITEASHVFQISRNTIYGWLKLKEKTGELNHQVKGIKPRKVDRDRLKNYLTDNPDAYLTEIASEFGCHPTTIHYALKAMGYTRKKKELHLL

SEQ ID NO: 1563 - DNA, 321 bp, Streptococcus pneumoniae
atgaatggtgagttaatcgctccaatgacttacgaagagacgatgacgagcgacttttttgaagcttggtttcagaagtttctcttaccaacattaaccacaccatcggttattattatggataatgcaagattccatagaatgggtaagttagaactcttgtgtgaagagtttgggtataaacttttacctcttcctccctactcacctgagtacaatcctattgagaaaacatgggctcatatcaaaaagcacctcaaaaaggtattaccaagttgcaataccttttatgaggctcttttgtcttgttcttgtttcaat

SEQ ID NO: 1564 - protein, 107 aa, Streptococcus pneumoniae
  IS630-Spn1, transposase Orf2; Cellular location: cytoplasm; Similar to strain R6 sequence 15903869 (2.E-61)
MNGELIAPMTYEETMTSDFFEAWFQKFLLPTLTTPSVIIMDNARFHRMGKLELLCEEFGYKLLPLPPYSPEYNPIEKTWAHIKKHLKKVLPSCNTFYEALLSCSCFN

SEQ ID NO: 1565 - DNA, 2256 bp, Streptococcus pneumoniae
atgctttgtcaaaactgtaaaattaacgactcaacaattcatctttacaccaatctcaatggaaaacaaaaacaaattgacctctgtcaaaactgctataagattatcaaaacagatcctaacaatagcctcttcaaaggtatgacggatctgaacaatcgtgacttcgatccctttggtgatttcttcaatgatctaaacaatttcagaccttctagcaatactcctcctattcccccaacccaatcaggtggaggttacggtggaaacggcggttatggttcccaaaatcgtggatctgctcaaactccgccacctagccaagaaaaaggcctgctggaagaatttggtattaatgtaactgaaattgcccgtcgtggagacattgaccccgttattgggcgcgacgatgagattatccgtgtcatcgagattctcaatcgtagaaccaagaataatcctgtccttatcggtgaacctggtgtcggaaaaacggccgttgtcgaaggtctagctcagaaaattgtcgatggcgatgtgccacataaactccaaggtaaacaagtcatccgtctggatgtggttagcttagttcaaggaacggggattcgaggacaatttgaagaacgcatgcaaaaactcatggaagaaattcgcaaacgtgaagacatcatcctctttatcgatgaaatccatgaaattgttggtgctggttctgcgagtgatggtaatatggacgcaggaaatatcctcaagccagcccttgctcgtggagaactgcaactagtcggtgctactaccctcaatgaataccgtatcattgaaaaggatgctgccctcgagcgtcgtatgcagcctgttaaagtcgatgaaccaacggtggacgaaacaatcactattctcaaagggattcaaaagaaatacgaagattaccaccacgttcaatatacagatgctgcgattgaagcagctgcaactctttccaatcgctacatccaagatcgcttcttgcctgacaaggccattgacctcctagatgaagctggttctaagatgaacttgaccttgaattttgtggatcctaaagtaattgatcagcgcttgattgaggctgaaaatctcaagtctcaagctacacgagaagaagattttgagaaggcggcctacttccgcgaccagattgccaagtataaggaaatgcaaaagaaaaagatcacagaccaggatactcctagcatcagcgagaaaactattgagcacattatcgagcagaaaaccaatatccctgttggtgatttgaaagagaaagaacaatctcaactcatccatctagccgaagatctcaagtctcatgttattggtcaagatgatgcagtcgataagattgccaaggctattcgccgtaatcgtgtcggacttggtacccctaaccgcccaatcggaagcttcctcttcgttgggccaactggtgtcggtaagacagaactttccaaacaactggctatcgaactttttggttctgctgatagtatgattcgctttgatatgagtgaatacatggaaaaacatagtgtggctaagttggtcggcgctcctccaggttatgttggctatgatgaggctggtcaattaactgaaaaagttcgccacaatccatattctctcatccttctcgatgaagtggaaaaagctcacccagatgttatgcacatgtttcttcaagtcttggacgatggtcgtttgacagacgggcaaggacgcaccgttagcttcaaggatgccatcattatcatgacctcaaatgcaggtacaggaaagaccgaagctagcgttggatttggtgctgctagagaaggacgtaccaattctgtcctcggtgaactcggtaacttctttagcccagagtttatgaaccgttttgatggcattatcgaatttaaggctctcagcaaggataacctccttcagattgtcgagctcatgctagcagatgttaacaagcgcctctctagcaacaacattcgtttggatgtaactgataaggtcaaggaaaagttggttgacctaggttatgatccaaaaatgggagcacgcccacttcgtcggactattcaagactatattgaggacacaatcactgactactaccttgaaaatccaagcgaaaaagatctcaaagcagttatgactagcaagggaaacattcagattaaatctgccaaaaaagctgaagttaaaagttctgaaaaagaaaaa

SEQ ID NO: 1566 - protein, 752 aa, Streptococcus pneumoniae
  ATP-dependent Clp protease, ATP-binding subunit ClpE (clpE); Cellular location: cytoplasm; Feature of note: RGD motif; Similar to strain R6 sequence 15902769 (0.E+01)
MLCQNCKINDSTIHLYTNLNGKQKQIDLCQNCYKIIKTDPNNSLFKGMTDLNNRDFDPFGDFFNDLNNFRPSSNTPPIPPTQSGGGYGGNGGYGSQNRGSAQTPPPSQEKGLLEEFGINVTEIARRGDIDPVIGRDDEIIRVIEILNRRTKNNPVLIGEPGVGKTAVVEGLAQKIVDGDVPHKLQGKQVIRLDVVSLVQGTGIRGQFEERMQKLMEEIRKREDIILFIDEIHEIVGAGSASDGNMDAGNILKPALARGELQLVGATTLNEYRIIEKDAALERRMQPVKVDEPTVDETITILKGIQKKYEDYHHVQYTDAAIEAAATLSNRYIQDRFLPDKAIDLLDEAGSKMNLTLNFVDPKVIDQRLIEAENLKSQATREEDFEKAAYFRDQIAKYKEMQKKKITDQDTPSISEKTIEHIIEQKTNIPVGDLKEKEQSQLIHLAEDLKSHVIGQDDAVDKIAKAIRRNRVGLGTPNRPIGSFLFVGPTGVGKTELSKQLAIELFGSADSMIRFDMSEYMEKHSVAKLVGAPPGYVGYDEAGQLTEKVRHNPYSLILLDEVEKAHPDVMHMFLQVLDDGRLTDGQGRTVSFKDAIIIMTSNAGTGKTEASVGFGAAREGRTNSVLGELGNFFSPEFMNRFDGIIEFKALSKDNLLQIVELMLADVNKRLSSNNIRLDVTDKVKEKLVDLGYDPKMGARPLRRTIQDYIEDTITDYYLENPSEKDLKAVMTSKGNIQIKSAKKAEVKSSEKEK

SEQ ID NO: 1567 - DNA, 99 bp, Streptococcus pneumoniae
atgaaaatttttgtgaatttggactataaaaaaatcctatttgtgagacaaaaaggattttacttagacatgcagggacaatcccagcttgttttagat

SEQ ID NO: 1568 - protein, 33 aa, Streptococcus pneumoniae
  hypothetical protein; Cellular location: cytoplasm
MKIFVNLDYKKILFVRQKGFYLDMQGQSQLVLD

SEQ ID NO: 1569 - DNA, 228 bp, Streptococcus pneumoniae
atggaatcacatttggttagaatcatcaaccgccttgaagcaatggcaaacgatggcggaaatttaaaacgtaattttgaacgcgaaggagttgttgttgcagaagttgcgtacagccacgacgaagaaaacggcccaatctttacccttcgtgacgtagaagatcgcgaaacgtatacgtttgatagcattgacttaatcgcaatggaaatttacgaacttctctac

SEQ ID NO: 1570 - protein, 76 aa, Streptococcus pneumoniae
  conserved hypothetical protein; Cellular location: cytoplasm; Similar to strain R6 sequence 15902770 (1.E-39)
MESHLVRIINRLEAMANDGGNLKRNFEREGVVVAEVAYSHDEENGPIFTLRDVEDRETYTFDSIDLIAMEIYELLY

SEQ ID NO: 1571 - DNA, 687 bp, Streptococcus pneumoniae
gtgactatgaatttttcttttttacctaagtatttaccttattttaactatggggctgttgtgacgattcttatttctatctgtgttatctttttgggaactattttgggtgttgtcttggcttttgggcaacgttcaaagtttaaaccgcttgtttggttggccaacttgtacgtttggattttccgtgggacaccgatgatggttcaaattatgattgcctttgctcttatgcatatcaatgctccgactattcagattggaattttaggtgttgatttttcgcgtctgattccagggattttgattatctctatgaatagtggtgcttatgtttcggagactgttcgtgccggaatcaatgcggttccaaaaggtcagctagaagcggcttattcgctagggattcgtcctaaaaatgcgatgcgttatgtgattttgccacaagcagtcaaaaatatcttgccagcattggggaacgaatttatcaccattatcaaggacagctccctcttatcagctattggggtcatggagttgtggaatggggctacaacagtttctacaacaacctatctacctttaacaccacttttatttgcagcattttactacttgattatgacctctattctgacagtagccttgaaagcttttgaaaaacatatgggacaaggagataagaaa

SEQ ID NO: 1572 - protein, 229 aa, Streptococcus pneumoniae
  amino acid ABC transporter, permease protein; Cellular location: membrane; Similar to strain R6 sequence 15902771 (e-127)
MTMNFSFLPKYLPYFNYGAVVTILISICVIFLGTILGVVLAFGQRSKFKPLVWLANLYVWIFRGTPMMVQIMIAFALMHINAPTIQIGILGVDFSRLIPGILIISMNSGAYVSETVRAGINAVPKGQLEAAYSLGIRPKNAMRYVILPQAVKNILPALGNEFITIIKDSSLLSAIGVMELWNGATTVSTTTYLPLTPLLFAAFYYLIMTSILTVALKAFEKHMGQGDKK

SEQ ID NO: 1573 - DNA, 732 bp, Streptococcus pneumoniae
atgacagaaaccttgataaaaattgaaaatttacataaatcctttggaaagaatgaagtattgaagggcatcaacctcgagattaaaagaggagaagttgtcgttatcatcggtccttcagggagcgggaaatctaccttgcttcgctctatgaatttgttggaagaagcaaccaaggggaaggttatctttgagggagtcgatattacggacaagaagaatgacctgtttgccatgcgtgagaagatgggcatggtttttcaacaattcaatctctttcctaatatgactgtgatggaaaatatcaccttgtcccctatcaagaccaaaggtgacagtaaggccgttgcagagaaaagagctcaggaacttttggaaaaagttggtttgccagataaggcagacgcttatccacagagtttgtcaggtggccagcaacagcggattgccatcgcgcgtgggttggctatggaaccagatgttttgctctttgacgagccaacttcagccctagatcctgagatggttggagaagttctggctgttatgcaagatctagccaagtcaggaatgaccatggttatcgtaacacatgagatgggatttgcccgtgaggtggcagatcgtgtcatctttatggcagacggtgtggttgttgaagacggaacacctgagcagatttttgaacaaacccaaggacaaaggactaaagacttcttgagtaaggtttta

SEQ ID NO: 1574 - protein, 244 aa, Streptococcus pneumoniae
  amino acid ABC transporter, ATP-binding protein; Cellular location: cytoplasm; Similar to strain R6 sequence 15902772 (e-131)
MTETLIKIENLHKSFGKNEVLKGINLEIKRGEVVVIIGPSGSGKSTLLRSMNLLEEATKGKVIFEGVDITDKKNDLFAMREKMGMVFQQFNLFPNMTVMENITLSPIKTKGDSKAVAEKRAQELLEKVGLPDKADAYPQSLSGGQQQRIAIARGLAMEPDVLLFDEPTSALDPEMVGEVLAVMQDLAKSGMTMVIVTHEMGFAREVADRVIFMADGVVVEDGTPEQIFEQTQGQRTKDFLSKVL

SEQ ID NO: 1575 - DNA, 855 bp, Streptococcus pneumoniae
atgacacagattattgatgggaaagctttagcggccaaattgcaggggcagttggctgaaaagactgcaaaattaaaggaagaaacaggtctagtgcctggtttggtagtgattttggttggggacaatccagccagccaagtctacgttcgcaacaaggagaggtcagcccttgcggctggtttccgtagcgaagtagtacgggttccagagaccattactcaagaggaattgttagacctgattgctaaatacaatcaggatccagcttggcatgggattttggttcagttgccattaccaaaacacattgatgaagaggcggttctattggctattgacccagaaaaggatgtggatggtttccatcctctaaacatggggcgtctttggtctggtcatccagtcatgattccttcgacaccggcaggaattatggaaatgttccatgaatatgggattgacttggaaggtaaaaatgcagtcgtcatcggtcgatccaatattgtcggaaaacctatggcccagcttcttttggcaaagaatgcaacagtaaccttgactcactcacgtactcataatctttccaaggtggctgcaaaagcagatattctggttgttgcaatcggtcgtgccaagtttgtgactgctgactttgtcaaaccaggtgcggtagtcattgacgttgggatgaaccgcgatgaaaatggtaagctctgtggggatgttgattatgaggcggttgccccacttgctagccacattacgccagtccctggaggtgtcggtcctatgaccattactatgctgatggagcaaacctatcaggcagcacttaggacattggatagaaaa

SEQ ID NO: 1576 - protein, 285 aa, Streptococcus pneumoniae
  methylenetetrahydrofolate dehydrogenase/methenyltetrahydrofolate cycloh; Cellular location: membrane; Similar to strain R6 sequence 15902773 (e-160)
MTQIIDGKALAAKLQGQLAEKTAKLKEETGLVPGLVVILVGDNPASQVYVRNKERSALAAGFRSEVVRVPETITQEELLDLIAKYNQDPAWHGILVQLPLPKHIDEEAVLLAIDPEKDVDGFHPLNMGRLWSGHPVMIPSTPAGIMEMFHEYGIDLEGKNAVVIGRSNIVGKPMAQLLLAKNATVTLTHSRTHNLSKVAAKADILVVAIGRAKFVTADFVKPGAVVIDVGMNRDENGKLCGDVDYEAVAPLASHITPVPGGVGPMTITMLMEQTYQAALRTLDRK

SEQ ID NO: 1577 - DNA, 819 bp, Streptococcus pneumoniae
atgattttaaaaatttataatggggaatatagtttacaatgggatggaatatactacttagcactaattgattatccaaatattcaagagtgggaattagaaaaaattgctaaatttatagcttacgaaaaacttcataaacgtcaaacaagtattgagtgtgctgattcttgtttaaaaaaagaaattttagattacatctgtcagcatccctttctgccaccatttactcctacagataaaagagtagcctcgacttatgacctacataagaggttagtgacttcagactactgtagtcatactacgactatagatgcagcgatttctatttttaaaactggtcgtcttttatctgctgtgaaagcctttgggcgagatgctgaggagttggttttggatagtcgaaatgctgcatctgatccgatagattattttgactatgtcatgttagggtggtcaaatacaagttctggttatcgattggcgatggagcgtttattaggtcgagctccttcagagaaagaattacaagacaagtttattcctggagtaagttttcattttatctatacagatttgattaaagttcctggttatatttttgatggttaccatgctgtaaaaattaaggacatgcttaatttattaagtgagttgtatatttgcattattccaactcataataagagccaatttgaaaatattattccaaccaaaatacaagatagggtgtattatcttgactatgctggagaagacttagaagagtggactaagaaagtctatcaagttgttttaaaacaatcagataaagga

SEQ ID NO: 1578 - protein, 273 aa, Streptococcus pneumoniae
  hypothetical protein; Cellular location: cytoplasm
MILKIYNGEYSLQWDGIYYLALIDYPNIQEWELEKIAKFIAYEKLHKRQTSIECADSCLKKEILDYICQHPFLPPFTPTDKRVASTYDLHKRLVTSDYCSHTTTIDAAISIFKTGRLLSAVKAFGRDAEELVLDSRNAASDPIDYFDYVMLGWSNTSSGYRLAMERLLGRAPSEKELQDKFIPGVSFHFIYTDLIKVPGYIFDGYHAVKIKDMLNLLSELYICIIPTHNKSQFENIIPTKIQDRVYYLDYAGEDLEEWTKKVYQVVLKQSDKG

SEQ ID NO: 1579 - DNA, 837 bp, Streptococcus pneumoniae
atgaaagtgattgatcaaaccttactagaaaaagtcattattgaacgttcttgtacaagtcataaaggagactacggtcgtctgctgttgcttggtgggacttatccttatggtggtgccatcatcatggctgctttagcagctgtaaaaagcggtgcaggattggtaaccgttggaacggacagggaaaatatccctgctctacacagccatttgcctgaggctatggccttttctctgcaagatcagtaattgttacaagagcaattggagaaggcagaagttgtcttgctggggcctggtttacgagacgatacgtttggagaaaatcttgtaaaacaggtctttgctagcttaaaaaagaatcagattttgattgtagatggaggggccttaaccatccttgctaggacaagtttgttgtttccatctaaccagcttatcttaactccccaccaaaaagaatgggaaaaactgtctggtattgctattgaaaagcaaaacgaaggtacaacatctagtgccctgacttctttccctcaaggaacaattttggtagagaaaggtccagctactcgtatttggcaagttggccagtctgattattaccagttaaaggttggcggtccctatcaggcgactggtggtatgggtgatacactggctggaatgattgcaggatttgcaggccaatttcgacaggccagtctctacgaacgtgtggcagtagcaacccatcttcattcagccatagcccaagaactatctcaagaaaattatgtggtcttgccgacggaaattagtaattgtcttcctaaagtaatgaaaagatatgtc

SEQ ID NO: 1580 - skipped

SEQ ID NO: 1581 - DNA, 681 bp, Streptococcus pneumoniae
gtggaaaatctgaagaaaatggcaggtatcacggctgctgaatttatcaaggatgggatggttgtagggctaggaacaggttctactgcctattattttgtcgaagaaatcggtcgtcgaatcaaggaagaaggcttgcagattacagctgtgacgacttctagtgtgaccagtaaacaggctgaagggctcaatatcccgctcaagtctattgaccaagtagactttgtcgatgtgacagtcgacggggcggatgaagtggatagtcagtttaatggaatcaaaggcggtggtggtgcccttctcatggaaaaggtggtcgcaacaccatcaaaagaatacatttgggtggtggatgaaagcaagctggtcgaaaaactaggtgcttttaaattgccagtagaagtggttcagtatggtgcagagcaggtctttcgtcattttgaacgagctggctacaaaccaagtttccgtgaaaaagacggccaacgttttgtgaccgatatgcagaattttatcattgacctcgccttggatgtcattgaaaatccaattgcttttggacaagaattggaccatgtcgttggtgttgtggagcatggtttattcaaccaaatggtggataaggtaatcgttgctggacgagatggagttcagatttcaacttcaaaaaaaggaaaa

SEQ ID NO: 1582 - protein, 227 aa, Streptococcus pneumoniae
  ribose 5-phosphate isomerase (rpiA); Cellular location: cytoplasm; Similar to strain R6 sequence 15902775 (e-124)
MENLKKMAGITAAEFIKDGMVVGLGTGSTAYYFVEEIGRRIKEEGLQITAVTTSSVTSKQAEGLNIPLKSIDQVDFVDVTVDGADEVDSQFNGIKGGGGALLMEKVVATPSKEYIWVVDESKLVEKLGAFKLPVEVVQYGAEQVFRHFERAGYKPSFREKDGQRFVTDMQNFIIDLALDVIENPIAFGQELDHVVGVVEHGLFNQMVDKVIVAGRDGVQISTSKKGK

SEQ ID NO: 1583 - DNA, 1272 bp, Streptococcus pneumoniae
ttgctggacgagatggagttcagatttcaacttcaaaaaaaggaaaatagaagggggcataagatgtctaaatttaatcgtattcatttggtggtactggattctgtaggaatcggtgcagcaccagatgctaataactttgtcaatgcaggggttccagatggagcttctgacacactgggacacatttcaaaaacagttggtttgaatgtcccaaacatggctaaaataggtcttggaaatattcctcgtgaaactcctcttaagactgtagcagctgaaagcaatccaactggatatgcaacaaaattagaggaagtatctcttggtaaggatactatgactggacactgggaaatcatgggactcaacattactgagcctttcgatactttctggaacggattcccagaagaaatcctgacaaaaatcgaagaattctcaggacgcaaggttattcgtgaagccaacaaaccttattcaggaacggctgttatctatgattttggaccacgtcagatggaaactggagagttgattatctatacttcagctgaccctgttttgcagattgctgcccacgaagacattattcctttggatgaattgtaccgtatctgtgaatacgctcgttcgattacccttgagcgtcctgcccttcttggtcgcatcattgctcgcccttatgtaggtgaaccaggtaacttcactcgtacggcaaaccgtcgtgacttggctgtatctccatttttcccaactgttttggataaattgaatgaggctggtatcgatacttatgctgtgggtaaaatcaacgatatctttaacggtgctggtatcaaccatgacatgggtcacaacaagtcaaatagtcatggaattgatacactattgaagactatgggacttgctgagtttgaaaaaggattctcattcacaaacctagttgactttgatgccctttacggccatcgtcgtaatgctcacggttaccgtgattgcttgcatgagtttgatgaacgcttacctgaaattatcgcagctatgagagagaatgaccttctcttgattactgcggaccatggaaatgacccaacgtatgcaggaacggatcacactcgggaatatattccattgttggcctatagccctgcctttaaaggaaatggtctcattccagtaggacattttgcagatatttcagcgactgttgccgataactttggtgtggaaactgctatgattggggaaagtttcttagataaattggta

SEQ ID NO: 1584 - protein, 424 aa, Streptococcus pneumoniae
  phosphopentomutase (deoB); Cellular location: cytoplasm; Similar to strain R6 sequence 15902776 (0.E+01)
MLDEMEFRFQLQKKENRRGHKMSKFNRIHLVVLDSVGIGAAPDANNFVNAGVPDGASDTLGHISKTVGLNVPNMAKIGLGNIPRETPLKTVAAESNPTGYATKLEEVSLGKDTMTGHWEIMGLNITEPFDTFWNGFPEEILTKIEEFSGRKVIREANKPYSGTAVIYDFGPRQMETGELIIYTSADPVLQIAAHEDIIPLDELYRICEYARSITLERPALLGRIIARPYVGEPGNFTRTANRRDLAVSPFFPTVLDKLNEAGIDTYAVGKINDIFNGAGINHDMGHNKSNSHGIDTLLKTMGLAEFEKGFSFTNLVDFDALYGHRRNAHGYRDCLHEFDERLPEIIAAMRENDLLLITADHGNDPTYAGTDHTREYIPLLAYSPAFKGNGLIPVGHFADISATVADNFGVETAMIGESFLDKLV

SEQ ID NO: 1585 - DNA, 540 bp, Streptococcus pneumoniae
atgacgcgctatgctttgctggtgagaggtatcaatgttggtggtaagaataaggtcgtcatggcggagcttcgtcaagaattgacaaacttgggactggaaaaggttgagagctacatcaatagtggcaatattttctttacttcgatagattccaaagcccaattggttgaaaagctagagactttctttgcagtccattatccatttattcagagcttttctttactgagtctagaggactttgaggcggaacttgaaaatctaccagcttggtggagcagagacttggcacgaaaagattttctcttttacactgagggtttggatgtggaccaagtcatcgcgacagttgaaagtttagagctgaaagatgaagtgctttattttggaaaacttgggattttctgggggaaattttctgaagaatcctattctaagactgcctatcataagtacttgctgaaggtgcctttctaccgccacattactattcgtaatgctaaaacctttgacaaaattggtcaaatgctaaaaaaa

SEQ ID NO: 1586 - protein, 180 aa, Streptococcus pneumoniae
  hypothetical protein; Cellular location: cytoplasm; Similar to strain R6 sequence 15902777 (8.E-74)
MTRYALLVRGINVGGKNKVVMAELRQELTNLGLEKVESYINSGNIFFTSIDSKAQLVEKLETFFAVHYPFIQSFSLLSLEDFEAELENLPAWWSRDLARKDFLFYTEGLDVDQVIATVESLELKDEVLYFGKLGIFWGKFSEESYSKTAYHKYLLKVPFYRHITIRNAKTFDKIGQMLKK

SEQ ID NO: 1587 - DNA, 807 bp, Streptococcus pneumoniae
atgacatttttaaacaaaatccatgaaactgctactttcctgaaagaaaagggaattgcagcccctgagttcggtctaatccttggatcaggacttggagaattggcagaagaaatcgaaaatccagttgtagtagactatgctgagattccaaactggggccgttcaacagtagtcggtcatgctggtaaattggtatatggtgaactggcaggtcgcaaggtcttggctcttcaagggcgtttccatttctatgaagggaatcctctggaagtggtgactttcccagttcgtgtgatgaaagttcttggatgtgaaggtgttattgtaaccaatgcagctggcggtatcggatttggtcctggtaccttgatggctatctcagaccatatcaacatgacggggcaaaatccattgatgggtgaaaacttggatgactttggcccacgtttcccagatatgtctagggcctacacaccagaataccgtgccactgcccatgaagtggctaaaaaacttaatatcaagcttgatgaaggtgtctatatcggagttactggtccgacttatgaaacaccagcagaaattcgttcctataagacactgggagcagatgcagttggtatgtctacggttcctgaagttatcgtggcagcccactctggcttgaaagttctgggaatttcatgtatcactaactttgcggccggtttccaagaagaactcaatcacgaagaagttgtagaagtgactgaacgtgttaaaggtgatttcaaaggcttgcttaaagcgattcttgctgaattg

SEQ ID NO: 1588 - protein, 269 aa, Streptococcus pneumoniae
  purine nucleoside phosphorylase, family 2 (deoD); Cellular location: membrane; Similar to strain R6 sequence 15902778 (e-155)
MTFLNKIHETATFLKEKGIAAPEFGLILGSGLGELAEEIENPVVVDYAEIPNWGRSTVVGHAGKLVYGELAGRKVLALQGRFHFYEGNPLEVVTFPVRVMKVLGCEGVIVTNAAGGIGFGPGTLMAISDHINMTGQNPLMGENLDDFGPRFPDMSRAYTPEYRATAHEVAKKLNIKLDEGVYIGVTGPTYETPAEIRSYKTLGADAVGMSTVPEVIVAAHSGLKVLGISCITNFAAGFQEELNHEEVVEVTERVKGDFKGLLKAILAEL

SEQ ID NO: 1589 - DNA, 168 bp, Streptococcus pneumoniae
gtggtaataggtgtgctagattctaaggaggaattgaaagagtcagaaaatgatgctccaaaactagaaactcctcttagagaggagccaagactagctcctcaaacgcttccggaagcaagtgaagttcttgaaaacaaaagggaagagtcaaaagtagagataaca

SEQ ID NO: 1590 - protein, 56 aa, Streptococcus pneumoniae
  hypothetical protein; Cellular location: cytoplasm; Similar to strain R6 sequence 15902779 (7.E-27)
MVIGVLDSKEELKESENDAPKLETPLREEPRLAPQTLPEASEVLENKREESKVEIT

SEQ ID NO: 1591 - DNA, 753 bp, Streptococcus pneumoniae
ttgtatatgacaggtcattctcttggatgttacctagctcagattgcagcggttgaagcttaccaaaaatatcctgatttttataaccatgtattgaggaaagtgacaactttcagtgctcctaaagtgattacttccagaactgtttggaatgctaagaatggtttctgggatgttggtttggaaagtcgtaaattagctgttagtggaaaaattaagcattatgtggttgataatgacaatgttgtgactcccttgattcataataatcgtgatattgttacatttacaggtaattcacgctttaaacaccgttctcgtggctattttgaaagtccaatgaatgatattcctaactttaatattggtaaacaagctaccttggataaacatggttatcgtgatccgaaattggataaagtgcgattctttaagaaacaggctctgcctcgatcttctagtcaaccaagcgctgaaccaatggaaaatattgcctcaggaaaacaggttactcaaagttcgacagctttcggaggagatgctagaagagctgtggatggcaaagtcgatggtaactatggtcacaattctgtcactcatacaaacttccaatctaagccttggtggcaagtagatttggctaaagaagaaaccattcgccaaatcaatatttacaaccgaacagacactgcccaggatagattggcaaactttgatgtcattcttttagacagttctggtaaagaaattgag

SEQ ID NO: 1592 - protein, 251 aa, Streptococcus pneumoniae
  hypothetical protein; Cellular location: outside; Similar to strain R6 sequence 15902779 (2.E-95)
MYMTGHSLGCYLAQIAAVEAYQKYPDFYNHVLRKVTTFSAPKVITSRTVWNAKNGFWDVGLESRKLAVSGKIKHYVVDNDNVVTPLIHNNRDIVTFTGNSRFKHRSRGYFESPMNDIPNFNIGKQATLDKHGYRDPKLDKVRFFKKQALPRSSSQPSAEPMENIASGKQVTQSSTAFGGDARRAVDGKVDGNYGHNSVTHTNFQSKPWWQVDLAKEETIRQINIYNRTDTAQDRLANFDVILLDSSGKEIE

SEQ ID NO: 1593 - DNA, 510 bp, Streptococcus pneumoniae
gtgtcagcacaaattacgattaaccataaaaaagcgcgctatgttcggattgagctagaaggctataatgccctcagtcttgcagaagttgaagttttctgctttatagctacgaatgctgaaacggcgacacaagtttctaagccagttcaaccaatcagtcagactcctgtgaaggataaaacattgacaattcaacacagtggagcttacattgcccgctactccataacttgggaagaagttccagtagataaagatggaaaccaagttgttcgtagtcattcttgggaaggaagcggtcgcaaccagactgcaggttttgtcctcaacctcccaatcaaagaaaatatgagaaatctgcgagttaagattgagaaaaagacgggcctactatggaatagatggcaaacaatctatgaaaacagaccaattttagctcaaccccaccgtaaaattacccattggggtacgacattgaattccaaggtgagtgacgatgatgtcttg

SEQ ID NO: 1594 - protein, 170 aa, Streptococcus pneumoniae
  hemolysin-related protein; Cellular location: cytoplasm; Feature of note: secreted, similar to alveolysin, toxin; Similar to strain R6 sequence 15902781 (1.E-92)
MSAQITINHKKARYVRIELEGYNALSLAEVEVFCFIATNAETATQVSKPVQPISQTPVKDKTLTIQHSGAYIARYSITWEEVPVDKDGNQVVRSHSWEGSGRNQTAGFVLNLPIKENMRNLRVKIEKKTGLLWNRWQTIYENRPILAQPHRKITHWGTTLNSKVSDDDVL

SEQ ID NO: 1595 - DNA, 111 bp, Streptococcus pneumoniae
atgaaaatcaaagagcaaactaagaaactagccgcaggttgctcaaagcactgctttgaggttgtagataagactgacgaagtcagtcacatatataatccaaggcgacgt

SEQ ID NO: 1596 - protein, 37 aa, Streptococcus pneumoniae
  box element
MKIKEQTKKLAAGCSKHCFEVVDKTDEVSHIYNPRRR

SEQ ID NO: 1597 - DNA, 708 bp, Streptococcus pneumoniae
atgtctatccatattgctgctcagcagggtgaaattgctgataaaattcttcttcctggggatcctcttcgtgctaagtttattgcggagaatttccttgatgatgctgtttgttttaacgaagtgcgtaacatgtttggttacactggtacttacaagggtcactgtgtatctgtcatgggaactgggatgggaatgccatctatttcgatttatgcgcgtgagttaatcgtagactacggtgtgaagaaattgattcgtgtgggaactgcaggttctttgaatgaagaggttcatgttcgtgaattagttttggcgcaggcggctgcaaccaactcaaacatcgttcgtaatgactggccacagtacgattttccacaaattgctagctttgatttgcttgataaagcctaccatatcgccaaaaaacttggtatgactactcacgttgggaacgttttgtcatctgatgtcttttactcaaattactttgaaaagaatatcgagcttggtaaatggggagtcaaggctgtggaaatggaagcagcagctctttactatcttgctgcccaataccatgttgatgcgctagctatcatgaccatctctgatagcttggtcaatccagacgaagacacaactgcagaagaacgtcaaaataccttcactgatatgatgaaggttggtttggaaaccttgattgcagaa

SEQ ID NO: 1598 - protein, 236 aa, Streptococcus pneumoniae
  purine nucleoside phosphorylase, family 1 (deoD); Cellular location: cytoplasm; Similar to strain R6 sequence 15902782 (e-132)
MSIHIAAQQGEIADKILLPGDPLRAKFIAENFLDDAVCFNEVRNMFGYTGTYKGHCVSVMGTGMGMPSISIYARELIVDYGVKKLIRVGTAGSLNEEVHVRELVLAQAAATNSNIVRNDWPQYDFPQIASFDLLDKAYHIAKKLGMTTHVGNVLSSDVFYSNYFEKNIELGKWGVKAVEMEAAALYYLAAQYHVDALAIMTISDSLVNPDEDTTAEERQNTFTDMMKVGLETLIAE

SEQ ID NO: 1599 - DNA, 1254 bp, Streptococcus pneumoniae
atggaacaattacattttatcacaaaactgctcgatattaaagacccaaacatcaagattctagatatcatcaatatggatacccacaaagaaattatcgctaagctggattatgaggctccatcttgccctgattgtggaagtctaatgaagaaacatgactttcaaaaaccgtctaagatcccttacctcgaaacaactggtatgccttctagaattctccttagaaaacgccgtttcaagtgctatcactcttcaaaaatgatggttgctgagactcccctggtaaagaaaaatcaccaaatccctcgtatcatcaaccaaaaaattgctcaaaagttaattgaaaaaatttctatgactgatattgcccatcagctggccatttcaacttcaactgtcattcgcaagctcaatgactttcactttgagcatgatttttctcggcttccaaagattatgtcttgggatgagtatgccttcactaagggaaagatgagtttcattgcgcaagattttgataatcttaatattatcactgttcttgaaggcagaacacaagctgtcatccgaaatcactttcttcgctacgatagagccgttcgttgtcaagtgaaaatcattacgatggatatgtttagtccttactatgacttggctaaacagctttttccgtgtgctaaaatcgttctagatcgtttccatattatccaacatctcagccgtgccatgagtcgttttcgtgttcaaattatgaatcagtttgaacgaaaatctcatgaatacaaggctatcaagcgttactggaaactcatccaacaggatagtcgtaaattgagcgataaacgtttttatcgccctacttttcgcatgcacttaacaaataaagaaattcttgacaagattttaagctattcagaagacttgaaacaccactatcagatctatcaactcttactttttcactttcagaacaaagaccctgagaaatttttcggactcattgaggacaatctgaagcaggttcatcctctttttcagactgtctttaaaacctttctaaagaacaaagagaaaatcgtcaacgcccttcaactacactattctaatgccaaactggaagcgaccaataatctcatcaaacttatcaagcgcaatgcctttggttttcggaactttgaaaacttcaaaaaacggatttttatcgccctgaatatcaaaaaagaaaggacgaaatttgtcctttctcaagct

SEQ ID NO: 1600 - protein, 418 aa, Streptococcus pneumoniae
  IS1167, transposase; Cellular location: cytoplasm; Similar to strain R6 sequence 15903763 (0.E+01)
MEQLHFITKLLDIKDPNIKILDIINMDTHKEIIAKLDYEAPSCPDCGSLMKKHDFQKPSKIPYLETTGMPSRILLRKRRFKCYHSSKMMVAETPLVKKNHQIPRIINQKIAQKLIEKISMTDIAHQLAISTSTVIRKLNDFHFEHDFSRLPKIMSWDEYAFTKGKMSFIAQDFDNLNIITVLEGRTQAVIRNHFLRYDRAVRCQVKIITMDMFSPYYDLAKQLFPCAKIVLDRFHIIQHLSRAMSRFRVQIMNQFERKSHEYKAIKRYWKLIQQDSRKLSDKRFYRPTFRMHLTNKEILDKILSYSEDLKHHYQIYQLLLFHFQNKDPEKFFGLIEDNLKQVHPLFQTVFKTFLKNKEKIVNALQLHYSNAKLEATNNLIKLIKRNAFGFRNFENFKKRIFIALNIKKERTKFVLSQA

SEQ ID NO: 1601 - DNA, 522 bp, Streptococcus pneumoniae
atgaaaatcgcaattatcggatattctggttctggtaagtcaactatagcagaaaagttatctaactactactccattccaaaactgcacatggacacactccaatttcaacctggttggcaagacagtgactgcgaatggatgttaaccgagataaaaaactttctcaccaagcataaagcttgggtcatcgatggtaattattcttggtgctactaccaagaacgaatgcaagaagctgaccaaatcatctttctcaatttttcgccattgacctgtctctttagagcctttaagcgttatcttaaataccgtggaaaagtcagagaaagtatggcggtagattgccctgaacgctttgagtgggagtttatcagatggattctttgggatgggcgtagcaaaactcaaaaagaaaattaccaaaaactttgccaagaatattcacataaagtcactattcttcgaaatcagagagagctagatcaatttctggataagaaaaggaagtcctacaattca

SEQ ID NO: 1602 - protein, 174 aa, Streptococcus pneumoniae
  DNA topology modulation protein FlaR, putative, FRAMESHIFT; Cellular location: cytoplasm; Similar to strain R6 sequence 15902783 (e-103)
MKIAIIGYSGSGKSTIAEKLSNYYSIPKLHMDTLQFQPGWQDSDCEWMLTEIKNFLTKHKAWVIDGNYSWCYYQERMQEADQIIFLNFSPLTCLFRAFKRYLKYRGKVRESMAVDCPERFEWEFIRWILWDGRSKTQKENYQKLCQEYSHKVTILRNQRELDQFLDKKRKSYNS

SEQ ID NO: 1603 - DNA, 234 bp, Streptococcus pneumoniae
ttggcaaacattaaatcagctatcaaacgcgctgaattgaacgttaaacaaaacgaaaagaactcagctcaaaaatcagctatgcgtactgctataaaagctttcgaagcaaacccatctgaagaacttttccgtgctgctagctcagctatcgataaagcagaaactaaaggtttgattcacaaaaacaaagcaagccgcgataaagctcgtctttcagctaaacttgttaaa

SEQ ID NO: 1604 - protein, 78 aa, Streptococcus pneumoniae
  ribosomal protein S20 (rpsT); Cellular location: cytoplasm; Similar to strain R6 sequence 15902784 (4.E-37)
MANIKSAIKRAELNVKQNEKNSAQKSAMRTAIKAFEANPSEELFRAASSAIDKAETKGLIHKNKASRDKARLSAKLVK

SEQ ID NO: 1605 - DNA, 948 bp, Streptococcus pneumoniae
atgatagacaaaatatctaggggaaaacaaatgaccaacgaatttttacattttgaaaaaatcagccgccagacttggcaatctttacatcgaaagacaacacctcctttgacagaagaagaattggaatctatcaagagttttaatgaccaaatcagtctccaagacgttacagatatctatctccccttggctcatttgattcagatttacaagcgaactaaggaagatttagccttttcaaaaggaattttcctccaacgtgaaagtaaatctcaaccttttattattggggtttctgggagtgttgccgttggaaaatccacaaccagtcgcctacttcaaatcctactgtcccgtacgtttacagatgctacggttgagttggttacaactgatggttttctctatcccaatcaaaccttgattgagcaggggattttaaatcgtaaaggatttcctgaaagctatgatatggaagctcttctcaacttcttggaccgcatcaaaaatggacaagatgtagatattcctgtctattctcatgaagtttacgacatcgtacccgaagagaaacaaagtgtcaaagctgctgattttgtaattgttgagggaatcaatgtctttcaaaatccacaaaacgatcgtctctatatcactgacttctttgacttttccatctatgtagatgctggagtggatgatattgaaagttggtatctggaccgtttcttgaaaatgctgagtctagcccaaaacgaccctgatagctactattatcgttttactcagatgccgattggggaagtggagtcctttgcccatcaggtctggatcagtatcaatctcacaaatctgcaaaattatattgaaccaaccagaaatcgtgcagaagtgattcttcataaaagcaagaaccatgaaatcgatgaaatttacttaaaaaag

SEQ ID NO: 1606 - protein, 316 aa, Streptococcus pneumoniae
  pantothenate kinase (coaA); Cellular location: cytoplasm; Similar to strain R6 sequence 15902785 (e-176)
MIDKISRGKQMTNEFLHFEKISRQTWQSLHRKTTPPLTEEELESIKSFNDQISLQDVTDIYLPLAHLIQIYKRTKEDLAFSKGIFLQRESKSQPFIIGVSGSVAVGKSTTSRLLQILLSRTFTDATVELVTTDGFLYPNQTLIEQGILNRKGFPESYDMEALLNFLDRIKNGQDVDIPVYSHEVYDIVPEEKQSVKAADFVIVEGINVFQNPQNDRLYITDFFDFSIYVDAGVDDIESWYLDRFLKMLSLAQNDPDSYYYRFTQMPIGEVESFAHQVWISINLTNLQNYIEPTRNRAEVILHKSKNHEIDEIYLKK

SEQ ID NO: 1607 - DNA, 234 bp, Streptococcus pneumoniae
atgaaaatcttaaaacgttacatattggaactctgttttattttaagttttgctttaccttttataaaaggaaccaatgcagataatggtagatgctttgtggaaacctattacggttttacttttttgatggaacatgctattgtaacagctgtctttatttgttcgttcttaattgctttcttactaaaaaacgatggacgaaatggattgctgcgggtagttattgctttt

SEQ ID NO: 1608 - protein, 78 aa, Streptococcus pneumoniae
  hypothetical protein; Cellular location: membrane; Similar to strain R6 sequence 15902786 (2.E-31)
MKILKRYILELCFILSFALPFIKGTNADNGRCFVETYYGFTFLMEHAIVTAVFICSFLIAFLLKNDGRNGLLRVVIAF

SEQ ID NO: 1609 - DNA, 588 bp, Streptococcus pneumoniae
atgagtaaaatgtactatgcagaaaatcctgacgctgctcacgacattcatgagttgagagtggacttgttgggagaaaaaatgacttttttgacagatgcgggtgtttttagcaagaaaatggttgactttggaagtcaactcttgctcaagtgtctggatgtcaaccaaggagagacagtcctagatgtaggctgtggttatggtccattaggtttgtccttggtcaaggtttacggagttcaggcgaccatggttgatattaacactcgtgccctggatttagctcagagaaatgctgaaaaaaataatgcaaaagcgacgatatttcaatctaatatttatgcaagagttcaagggcgatttgaccatgtcatttccaatcctcctatccgtgcgggcaagcaagtcgttcatgaaatcatcgagaaaagtaaagatttcttggaaattggtggagatttgaccatcgtcatccagaaaaaacaaggagctccaagtgccaagtctaagatggaagatgtgtttggcaattgtgaaatccttaaaaaagacaagggatactatatccttagaagtgtgaaagaa

SEQ ID NO: 1610 - protein, 196 aa, Streptococcus pneumoniae
  conserved hypothetical protein; Cellular location: cytoplasm; Similar to strain R6 sequence 15902787 (e-104)
MSKMYYAENPDAAHDIHELRVDLLGEKMTFLTDAGVFSKKMVDFGSQLLLKCLDVNQGETVLDVGCGYGPLGLSLVKVYGVQATMVDINTRALDLAQRNAEKNNAKATIFQSNIYARVQGRFDHVISNPPIRAGKQVVHEIIEKSKDFLEIGGDLTIVIQKKQGAPSAKSKMEDVFGNCEILKKDKGYYILRSVKE

SEQ ID NO: 1611 - DNA, 1275 bp, Streptococcus pneumoniae
atgagagcagttgatttaatccaaaaaaaacgagacggtcaagaactgacttcaagtgaaattgaatggctgatagaaggctatgtatcaggaactgttcctgattatcagatgtctgcctttgctatggctgtttattttaaaggaatgacgactcgagaaatctctgatttaacgatgaatatggttaagactgggcaagagtttgacctgtcagccattgatggtgtgaaagttgacaagcattctactggtggtgtcggcgataaggtaaccttgattttagctcctcttgttgctagcttcggtgtgcctgtagcaaaaatgagtggtcgtggtcttggccatacaggcggaacaattgataaattggagtccattaagggctatcaagtagaacgtagtcaagaggattttattcgtcaggttcaggatattggagtatctgtcattgggcaatcagaccagctggtcaaagcagataagcttctctatgcccttcgtgatgtgaccgcaactgtcgacacgattcctttgattgcgagttcggtgatgagcaagaaaattgcggcaggggcggatgctattttgctagacgtgactgtcggtgagggtgccttcatgaagacggttgatgaggcgcgtgagttggctcaaactatggtagatcttggtaaggttgttggacggaagacagtagcagtgattacggatatgagccagcctttgggacgagcgattggaaatcgtctggaaatccttgaagcattggagattttgcaaggtcaaggacgtcaggatattacccactttatttgtgaattggctcaaattatgcttggtttggcaaatgttaacaaaactgttgaagaagttcaccaacatcttgagaatggtcaagcactggctaagtttgaggaaatggtgcaagcccaaggtggagacttggaagacctctatcgtcctgtaaatgtagctcatgtggtggaaatccctgctcaggaaacgggtgtcatttcagctcttccagctatggactttggtctttatgccatgaggctgggtgctggtcgtgcagttaagtctgatgccttggactatgaaacaggaattgtttttgaaaagaagattggagactccgttcaaaagggtgaaattgttgcaaaagtatacacaaatgaaaaaattccacctcaactagttacagatttccaaaaatgtgttaaaataagtgatgaagtgaaaaaaatccgtgaaattgtagaaatcatctcc

SEQ ID NO: 1612 - protein, 425 aa, Streptococcus pneumoniae
  pyrimidine-nucleoside phosphorylase (pyn); Cellular location: membrane; Similar to strain R6 sequence 15902788 (0.E+01)
MRAVDLIQKKRDGQELTSSEIEWLIEGYVSGTVPDYQMSAFAMAVYFKGMTTREISDLTMNMVKTGQEFDLSAIDGVKVDKHSTGGVGDKVTLILAPLVASFGVPVAKMSGRGLGHTGGTIDKLESIKGYQVERSQEDFIRQVQDIGVSVIGQSDQLVKADKLLYALRDVTATVDTIPLIASSVMSKKIAAGADAILLDVTVGEGAFMKTVDEARELAQTMVDLGKVVGRKTVAVITDMSQPLGRAIGNRLEILEALEILQGQGRQDITHFICELAQIMLGLANVNKTVEEVHQHLENGQALAKFEEMVQAQGGDLEDLYRPVNVAHVVEIPAQETGVISALPAMDFGLYAMRLGAGRAVKSDALDYETGIVFEKKIGDSVQKGEIVAKVYTNEKIPPQLVTDFQKCVKISDEVKKIREIVEIIS

SEQ ID NO: 1613 - DNA, 660 bp, Streptococcus pneumoniae
atgaaattaaataaatatatagatcatacgcttttaaaacaagatgcaaagaaaaaacaaattgatagtttgttgtctgaggctagagagtatgactttgccagtgtttgcgttaatccgacctgggttgaacatgctaaaaaaggacttgaaggcacagatgttaaggtttgcacagtagtaggtttccctttgggagcaacaacttcagccgtgaaagcatttgagacaaaagaagctatccaaaatggtgcagatgagattgatatggtgatcaatgttggagctctcaaatcaggtaatttagccttggttgagtcagatattcgcgcagtagtggaagcaagtggtgataagttagtgaaagtcattattgaagcttgccttctgacagaccaagaaaaagttgttgtttgccaattggcccaaaaagctggggctgactttgtcaaaacatctactggcttttcaactggtggtgctacgatagcagatgttacattaatgcgtgaaacagttggatctgatatgggtgtcaaggccgccggtggagctcgttcttatgcagatgctcttgcctttgtcgaagcaggtgcgacccgtatcggaacgtcagctggggtagctattttaaaaggagaattggcagatggcgactac

SEQ ID NO: 1614 - protein, 220 aa, Streptococcus pneumoniae
  deoxyribose-phosphate aldolase (deoC); Cellular location: cytoplasm; Similar to strain R6 sequence 15902789 (e-120)
MKLNKYIDHTLLKQDAKKKQIDSLLSEAREYDFASVCVNPTWVEHAKKGLEGTDVKVCTVVGFPLGATTSAVKAFETKEAIQNGADEIDMVINVGALKSGNLALVESDIRAVVEASGDKLVKVIIEACLLTDQEKVVVCQLAQKAGADFVKTSTGFSTGGATIADVTLMRETVGSDMGVKAAGGARSYADALAFVEAGATRIGTSAGVAILKGELADGDY

SEQ ID NO: 1615 - DNA, 387 bp, Streptococcus pneumoniae
atggcgactactgagttgattgaactggcaattgaaaccagcaaacatgcctatgtcccctattctcactttcctatcggagcagttttagtagctaaagacggaagtgtttacacgggagtgaatattgaaaatgctagctatcctttgaccaattgcggtgagagaacagctatttttaaggctatatctgaaggccaaagagaattttcagaattgattgtctatggtcaaactgaaaaaccgatctcgccatgtggtgcttgtcgccaagtgatggctgaattttttgaacaagatctaaaagtgaccttagtcgcaaaagataaatcgacggtcgagatgacggtcggggaattacttccatactcttttacagacttaaac

SEQ ID NO: 1616 - protein, 129 aa, Streptococcus pneumoniae
  cytidine deaminase (cdd); Cellular location: cytoplasm; Similar to strain R6 sequence 15902790 (6.E-71)
MATTELIELAIETSKHAYVPYSHFPIGAVLVAKDGSVYTGVNIENASYPLTNCGERTAIFKAISEGQREFSELIVYGQTEKPISPCGACRQVMAEFFEQDLKVTLVAKDKSTVEMTVGELLPYSFTDLN

SEQ ID NO: 1617 - DNA, 1050 bp, Streptococcus pneumoniae
atgaacaagaaacaatggctaggtcttggcctagttgcagtggcagcagttggacttgctgcatgtggtaaccgctcttctcgtaacgcagcttcatcttctgatgtgaagacaaaagcagcaatcgtcactgatactggtggtgttgatgacaaatcattcaaccaatcagcttgggaaggtttgcaggcttggggtaaagaacacaatctttcaaaagataacggtttcacttacttccaatcaacaagtgaagctgactacgctaacaacttgcaacaagcggctggaagttacaacctaatcttcggtgttggttttgcccttaataatgcagttaaagatgcagcaaaagaacacactgacttgaactatgtcttgattgatgatgtgattaaagaccaaaagaatgttgcgagcgtaactttcgctgataatgagtcaggttaccttgcaggtgtggctgcagcaaaaacaactaagacaaaacaagttggttttgtaggtggtatcgaatctgaagttatctctcgttttgaagcaggattcaaggctggtgttgcgtcagtagacccatctatcaaagtccaagttgactacgctggttcatttggtgatgcggctaaaggtaaaacaattgcagccgcacaatacgcagccggtgcagatattgtttaccaagtagctggtggtacaggtgcaggtgtctttgcagaggcaaaatctctcaacgaaagccgtcctgaaaatgaaaaagtttgggttatcggtgttgatcgtgaccaagaagcagaaggtaaatacacttctaaagatggcaaagaatcaaactttgttcttgtatctactttgaaacaagttggtacaactgtaaaagatatttctaacaaggcagaaagaggagaattccctggcggtcaagtgatcgtttactcattgaaggataaaggggttgacttggcagtaacaaacctttcagaagaaggtaaaaaagctgtcgaagatgcaaaagctaaaatccttgatggaagcgtaaaagttcctgaaaaa

SEQ ID NO: 1618 - protein, 350 aa, Streptococcus pneumoniae
  lipoprotein; Cellular location: lipoprotein; Similar to strain R6 sequence 15902791 (0.E+01)
MNKKQWLGLGLVAVAAVGLAACGNRSSRNAASSSDVKTKAAIVTDTGGVDDKSFNQSAWEGLQAWGKEHNLSKDNGFTYFQSTSEADYANNLQQAAGSYNLIFGVGFALNNAVKDAAKEHTDLNYVLIDDVIKDQKNVASVTFADNESGYLAGVAAAKTTKTKQVGFVGGIESEVISRFEAGFKAGVASVDPSIKVQVDYAGSFGDAAKGKTIAAAQYAAGADIVYQVAGGTGAGVFAEAKSLNESRPENEKVWVIGVDRDQEAEGKYTSKDGKESNFVLVSTLKQVGTTVKDISNKAERGEFPGGQVIVYSLKDKGVDLAVTNLSEEGKKAVEDAKAKILDGSVKVPEK

SEQ ID NO: 1619 - DNA, 1533 bp, Streptococcus pneumoniae
atggcacacgaaaatgtcattgagatgcgtgatattaccaaggtgtttggtggatttgttgccaacgacaaaatcaacttgcacctacgaaaaggtgaaattcatgcacttttaggagaaaatggggctggtaagtccacgctaatgaacatgttagcaggccttcttgaaccaactagtggtgaaatcgcggtcaacggtcaagttgtcaatctcgactccccatctaaagcagctagcttgggaatcgggatggttcaccagcactttatgttggttgaagccttcacagtggctgaaaacatcattttaggtagtgaattgactaaaaatggtgtgctagatatcgctggagctagcaaagaaatcaaggctctttctgaacgttatggcttagctgttgacccttctgccaaggtagcagatatctcagttggagcccaacaacgtgtagaaattttaaaaacactttatcggggggctgatatccttatctttgacgaaccaacggctgttttgactccatcagaaattgatgagttgatggctattatgaaaaatcttgtcaaagaaggaaaatcaattatcttgattacccacaaattggatgaaattcgagcagtttctgaccgtgttacagttatccgtcgtgggaaatcaattgaaaccgttgaaattgcaggggctaccaatgctgatttggcggaaatgatggtaggacgttctgtttcctttaaaacagagaagcaagcctctaaaccaaaagaagtggttttgtctatcaaagatttggtggtcaatgaaaaccgtggtgttccagctgttaaaaatctgtccttggatgttcgtgctggagagattgttggtattgcggggattgatggaaatggtcagtctgaactgattcaagccattacaggtcttcgtaaggttgaatctggtagcattgagctaaaaggagattcaattgtaggcttgcacccacgtcagattacagaactaagtgttgggcacgttccagaagaccgtcaccgtgatggcttgattttggaaatgatgatatctgaaaatattgcccttcaaacctactataaagaaccacatagtaaaaatggaattttgaattattcaaatattacttcttatgctaaaaagctgatggaagagtttgatgttcgcgctgccagtgaattagttcctgcagctgcactctcaggaggaaatcaacaaaaagcaattattgctcgtgaaattgatcgagatcctgatctccttatcgttagccagccaactcgtgggttggatgtcggtgccattgagtatatccacaaacgcttgattgaagagcgtgataatggcaaggctgtccttgttgtcagctttgaattggatgagattttaaacgtctcagaccgtattgccgttatccacgatggtaagattcaaggtattgtatcaccagaaacaaccaataaacaagaacttggtgtcttgatggctggtggaaacttgggaaaggagaagagtgatgtc

SEQ ID NO: 1620 - protein, 511 aa, Streptococcus pneumoniae
  sugar ABC transporter, ATP-binding protein; Cellular location: cytoplasm; Similar to strain R6 sequence 15902792 (0.E+01)
MAHENVIEMRDITKVFGGFVANDKINLHLRKGEIHALLGENGAGKSTLMNMLAGLLEPTSGEIAVNGQVVNLDSPSKAASLGIGMVHQHFMLVEAFTVAENIILGSELTKNGVLDIAGASKEIKALSERYGLAVDPSAKVADISVGAQQRVEILKTLYRGADILIFDEPTAVLTPSEIDELMAIMKNLVKEGKSIILITHKLDEIRAVSDRVTVIRRGKSIETVEIAGATNADLAEMMVGRSVSFKTEKQASKPKEVVLSIKDLVVNENRGVPAVKNLSLDVRAGEIVGIAGIDGNGQSELIQAITGLRKVESGSIELKGDSIVGLHPRQITELSVGHVPEDRHRDGLILEMMISENIALQTYYKEPHSKNGILNYSNITSYAKKLMEEFDVRAASELVPAAALSGGNQQKAIIAREIDRDPDLLIVSQPTRGLDVGAIEYIHKRLIEERDNGKAVLVVSFELDEILNVSDRIAVIHDGKIQGIVSPETTNKQELGVLMAGGNLGKEKSDV

SEQ ID NO: 1621 - DNA, 1056 bp, Streptococcus pneumoniae
atgtctaaaaaattacaacaaatttcggttcccttgatttctgtattcctaggaattttactcggagccattgtcatgtggatcttcggttatgatgctatttggggctacgaagaattgttctatacagcctttggcagtctgcgtgggattggagaaatcttccgtgctatgggtcctctggtcttgattggtcttggttttgccgttgccagtcgagctggtttctttaacgtcggacttcctggtcaggctttggcaggttggattctcagtggttggtttgccctgtcgcatccagatatgccccgtcccttgatgattctagcaaccatcgtgattgccttgattgctggtgggattgtcggagcgattccaggtattcttagggcctatctagggacgtcagaggttattgtaaccatcatgatgaactacattgtcttgtatgtagggaatgcctttatccatgctttccctaaagacttcatgcaaagtacagattcgaccattcgtgttggggctaatgcaacctatcagacaccttggttggctgagttgactggtaactcacggatgaatattggtattttctttgccatcattgccgttgcagttatttggttcatgctcaagaaaacaactcttggttttgaaatccgtgcagttggtcttaatccacatgcttcagaatatgctggtatttctgccaagcggactattatcctatctatgattatttcaggtgccttggcaggtcttggtggagctgttgaaggtttgggaaccttccagaacgtctatgttcaaggttcgtcattagctatcggatttaacggaatggcggttagtttgcttgcggccaactcaccaattggtatactctttgcagccttcctatttggcgttctccaagttggggctcctggtatgaatgcggcgcaggtaccatctgagcttgtcagcattgtaacagcgtctattatcttctttgtcagtgttcattaccttatcgaacgctttgtcaaaccgaaaaaacaagttaaaggaggtaag

SEQ ID NO: 1622 - protein, 352 aa, Streptococcus pneumoniae
  sugar ABC transporter, permease protein, putative; Cellular location: membrane; Similar to strain R6 sequence 15902793 (0.E+01)
MSKKLQQISVPLISVFLGILLGAIVMWIFGYDAIWGYEELFYTAFGSLRGIGEIFRAMGPLVLIGLGFAVASRAGFFNVGLPGQALAGWILSGWFALSHPDMPRPLMILATIVIALIAGGIVGAIPGILRAYLGTSEVIVTIMMNYIVLYVGNAFIHAFPKDFMQSTDSTIRVGANATYQTPWLAELTGNSRMNIGIFFAIIAVAVIWFMLKKTTLGFEIRAVGLNPHASEYAGISAKRTIILSMIISGALAGLGGAVEGLGTFQNVYVQGSSLAIGFNGMAVSLLAANSPIGILFAAFLFGVLQVGAPGMNAAQVPSELVSIVTASIIFFVSVHYLIERFVKPKKQVKGGK

SEQ ID NO: 1623 - DNA, 954 bp, Streptococcus pneumoniae
atgtctattataaccttgctccccctcttggtgtcttctatgctgatttactcagcacctctcatctttacaagtatcggtggtgttttctctgaacgtggtggtgtggtaaacgttggccttgaaggaattatggttatgggtgccttttctggagttgtctttaaccttgaatttgcagaacaatttggagcagcaactccatggctatccttgcttgtagcaggattggttggtagtgttttctctatcatccacgcagcagcgacggttcatttccgtgcagaccatgttgtcagcggtacggtattgaacttgatggcgcctgccttggctgttttcttagttaaagttctttataacaaaggacaaaccgacaacctaagtcaaacttttggacgctttgatttcccagtcttggcaaatatcccagtgattggtgatatcttcttcaagtcaactagtctacttggttatctggcgattgccttctcattccttgcttggtttattctctttaagactcaatttggtcttcgtctccgctctgtcggtgaacatcctcaagcagcggataccttgggaatcaacgtctacaagatgagatatttaggggttattatttcaggttttctaggtggaattggcggagcgatttatgcgcaatcaatctcagttaacttctcagtgacaactattgttggacctggatttatcgcccttgctgcgatgatctttgggaaatggaatccaatcggtgctatgctttctagtctcttctttggactttcacaaagtttggctgttatcggttctcaattgccgttcctacaaggagtgccagcggtttatcttcaaattgcaccttatgttttgacaattcttgtcttagcagccttctttggaaaagcagtcgcaccaaaagcagatggtatcaactacatcaaatcaaaa

SEQ ID NO: 1624 - protein, 318 aa, Streptococcus pneumoniae
  sugar ABC transporter, permease protein, putative; Cellular location: membrane; Similar to strain R6 sequence 15902794 (e-177)
MSIITLLPLLVSSMLIYSAPLIFTSIGGVFSERGGVVNVGLEGIMVMGAFSGVVFNLEFAEQFGAATPWLSLLVAGLVGSVFSIIHAAATVHFRADHVVSGTVLNLMAPALAVFLVKVLYNKGQTDNLSQTFGRFDFPVLANIPVIGDIFFKSTSLLGYLAIAFSFLAWFILFKTQFGLRLRSVGEHPQAADTLGINVYKMRYLGVIISGFLGGIGGAIYAQSISVNFSVTTIVGPGFIALAAMIFGKWNPIGAMLSSLFFGLSQSLAVIGSQLPFLQGVPAVYLQIAPYVLTILVLAAFFGKAVAPKADGINYIKSK

SEQ ID NO: 1625 - DNA, 436 bp, Streptococcus pneumoniae
atgaaattaagttatgatgataaagttcagatctatgaacttagaaaacaaggatatagcttagagaagctttcaaataaatttgggataaacaattctaatcttaggtatatgattaaattgattgatcgttacggaatagagttcgtcaaaaaaggaaaaaatcgttactattctcctgatttaaaacaagaaatgattaataaagtctgacatgaaggctggactaaagatagagtttctcttgaatacggtctcccaagtcgtacgatacttcttaactggctagcacaatacaggaaaaacgggtatactattgttgagaaaccaagagggagagtacctgagagcggagaatgccatcctaaaaaagttaagagaactccgattgaaggaggaaaaagagaaagaagaaagacagaaattgtttaagaat

SEQ ID NO: 1626 - protein, 70 aa, Streptococcus pneumoniae
  IS3-Spn1, hypothetical protein POINT MUTATION FRAMESHIFT
MKLSYDDKVQIYELRKQGYSLEKLSNKFGINNSNLRYMIKLIDRYGIEFVKKGKNRYYSPDLKQEMINKV

SEQ ID NO: 1627 - DNA, 120 bp, Streptococcus pneumoniae
ttgttgagaaaccaagagggagagtacctgagagcggagaatgccatcctaaaaaagttaagagaactccgattgaaggaggaaaaagagaaagaagaaagacagaaattgtttaagaat

SEQ ID NO: 1628 - protein, 40 aa, Streptococcus pneumoniae
  hypothetical protein
MLRNQEGEYLRAENAILKKLRELRLKEEKEKEERQKLFKN

SEQ ID NO: 1629 - DNA, 831 bp, Streptococcus pneumoniae
atgactgagttttcgttagatcttcttttaaaagtcattaaactagctcgttcgacctactactatcacttgaaacagctagataaaccagataaggaccaagagcttaaagctgaaattcaatccatttttatcgaacacaaaggaaattatgcttatcgtcggatttatttagaactaagaaatcgtggttatctggtaaatcataaaagagttcaaggcttgatgaaagtactcaatttacaagctaaaacgcgacagaaacgaaaatattcttctcataaaggagacgttggcaagaaggcagagaatctcattcaaggccaatttgaaggctctaaaacaatggaacagtgctacacagatgtgacagaatttgccattccagtaagtacttaaaagctttacttatcaccagttttagatggctttaatagcgaaattatcgcctataatctttcaacttcacccaacttagaacaagtacaaacaatgttggaacaggcattcacagagaagcactacgagaatacgattctccatagtgaccaaggctggcaataccaacacgattcttatcatcggttcctagagagtaagggaattcaagcatccatgtcacgtaagggcaacagccaagacaacggtaggatggaatctttctttggcattttaaaatccgaaatgttttatggctatgagaaaacatttaaatcacttaatcaattggaacaagccattatagactatattgattactacaacaacaaacgaattaaggtaaaactaaaaggacttagtcctgtgcagtacagaactaaatcctttgga

SEQ ID NO: 1630 - protein, 132 aa, Streptococcus pneumoniae
  IS3-Spn1, transposase POINT MUTATION
MTEFSLDLLLKVIKLARSTYYYHLKQLDKPDKDQELKAEIQSIFIEHKGNYAYRRIYLELRNRGYLVNHKRVQGLMKVLNLQAKTRQKRKYSSHKGDVGKKAENLIQGQFEGSKTMEQCYTDVTEFAIPVST

SEQ ID NO: 1631 - DNA, 339 bp, Streptococcus pneumoniae
atgttggaacaggcattcacagagaagcactacgagaatacgattctccatagtgaccaaggctggcaataccaacacgattcttatcatcggttcctagagagtaagggaattcaagcatccatgtcacgtaagggcaacagccaagacaacggtaggatggaatctttctttggcattttaaaatccgaaatgttttatggctatgagaaaacatttaaatcacttaatcaattggaacaagccattatagactatattgattactacaacaacaaacgaattaaggtaaaactaaaaggacttagtcctgtgcagtacagaactaaatcctttgga

SEQ ID NO: 1632 - protein, 113 aa, Streptococcus pneumoniae
  DNA transposase
MLEQAFTEKHYENTILHSDQGWQYQHDSYHRFLESKGIQASMSRKGNSQDNGRMESFFGILKSEMFYGYEKTFKSLNQLEQAIIDYIDYYNNKRIKVKLKGLSPVQYRTKSFG

SEQ ID NO: 1633 - DNA, 639 bp, Streptococcus pneumoniae
atgattacaatagttttattaatcctagcctatctgctgggttcgattccatctggtctctggattggacaagtattctttcaaatcaatctacgcgagcatggttctggtaacactggaacgaccaacaccttccgcattttaggtaagaaagctggtatggcaacctttgtgattgactttttcaaaggaaccctagcaacgctgcttccgattatttttcatctacaaggcgtttctcctctcatctttggacttttggctgttatcggccataccttccctatctttgcaggatttaaaggtggtaaggctgtcgcaaccagtgctggagtgattttcggatttgcgcctatcttctgtctctaccttgcgattatcttctttggagctctctatcttggcagtatgatttcactgtctagtgtcacagcatcgattgcggctgttatcggggttctgctctttccactttttggttttatcctgagtaactatgactctctcttcatcgctattatcttagcacttgctagtttgattatcattcgtcataaggacaatatagctcgtatcaaaaataaaactgaaaatttggtcccttggggattgaacctaacccatcaagatcctaaaaaa

SEQ ID NO: 1634 - protein, 213 aa, Streptococcus pneumoniae
  conserved hypothetical protein; Cellular location: membrane; Similar to strain R6 sequence 15902799 (e-118)
MITIVLLILAYLLGSIPSGLWIGQVFFQINLREHGSGNTGTTNTFRILGKKAGMATFVIDFFKGTLATLLPIIFHLQGVSPLIFGLLAVIGHTFPIFAGFKGGKAVATSAGVIFGFAPIFCLYLAIIFFGALYLGSMISLSSVTASIAAVIGVLLFPLFGFILSNYDSLFIAIILALASLIIIRHKDNIARIKNKTENLVPWGLNLTHQDPKK

SEQ ID NO: 1635 - DNA, 1941 bp, Streptococcus pneumoniae
gtgtcaaaaaaggaaatcaatattaacaattataatgatgatgctattcaggtgctagaagggttggatgcggtccgaaaacgtccagggatgtatattggatcgaccgatggcgctggtcttcatcacctagtttgggaaatcgttgataatgcagtcgatgaagccttgtctgggtttggtgatcgtattgatgtaactatcaataaagacggtagtctaacggttcaagaccatggacgtgggatgccgacaggtatgcacgctatgggaattccaactgttgaggttatctttaccattcttcatgccggagggaaattcggtcaaggtggctataagacatcaggtggacttcacggagtgggttcttccgttgttaacgccctttctagctggttagaagttgaaattacccgtgatggcgcagtttacaagcaacgtttcgaaaatggtggaaaacctgtcacgactttgaagaaaatcggtacagcacccaagtctaaaacaggcaccaaagttacttttatgcctgacgcgactatattttctacgacagatttcaagtacaataccatttcagagcgccttaatgaatcagcctttctcttgaaaaatgtgaccttgtctttaacggacaagcgaacaaatgaagcgattgagttccactatgagaatggagtacaagattttgtttcttatctcaacgaagataaggaaatcttgacgccagttctttactttgaaggggaagacaatggttttcaagtggaagtagccctccagtacaatgacggattctcagataacattctatcttttgtcaataacgttcgcaccaaggacggtggaacgcacgagacaggactcaagtctgccattaccaaggtcatgaatgactatgcacgtaaaacaggtcttctcaaggaaaaagataaaaaccttgaaggttcagactatcgtgagggactagcggccgttctttctatcttagttcctgaagaacacttgcagtttgaaggacagaccaaggataaactaggaagccccctagctcgcccagttgtggatggaatagtggctgataagttgacctttttccttatggaaaatggggaattagcttctaacctcatccgcaaggctatcaaggcccgtgatgctcgtgaagcagcacgtaaggcgcgtgatgagagccgaaatgggaagaaaaacaagaaagataagggcttgttgtctgggaaattgaccccagcccaatctaagaatcctgctaagaatgaactctatctagttgagggggactctgccggtggttctgccaaacaaggtcgtgaccgcaagttccaggctattctacctcttcgtggtaaggttgtcaatacagccaaggccaagatggcggatatcctcaaaaatgaagagatcaataccatgatttataccattggtgcgggtgttggagcagacttctctattgaagatgccaactatgataagatcattatcatgaccgatgcggataccgacggtgcccatatccagaccttgctcttgacatttttctaccgttacatgcgtccgctagtcgaggcaggtcatgtctatattgccctcccacctctttacaagatgtccaaaggtaaaggcaagaaagaagaagtggcctacgcttggacggacggagaactagaagaactccgtaaacagttcggtaaaggcgctaccctccaacgatacaaaggacttggtgagatgaatgcggaccagctctgggaaacaaccatgaacccagaaacacgtaccctcatccgtgtcacaattgaagatttagcgcgcgccgaacgccgcgtcaatgttctcatgggagataaggtagaaccacgccgtaaatggattgaagataatgtcaagtttacgctagaagaaacgacagtgttt

SEQ ID NO: 1636 - protein, 647 aa, Streptococcus pneumoniae
  topoisomerase IV, subunit B (parE); Cellular location: cytoplasm; Similar to strain R6 sequence 15902800 (0.E+01)
MSKKEININNYNDDAIQVLEGLDAVRKRPGMYIGSTDGAGLHHLVWEIVDNAVDEALSGFGDRIDVTINKDGSLTVQDHGRGMPTGMHAMGIPTVEVIFTILHAGGKFGQGGYKTSGGLHGVGSSVVNALSSWLEVEITRDGAVYKQRFENGGKPVTTLKKIGTAPKSKTGTKVTFMPDATIFSTTDFKYNTISERLNESAFLLKNVTLSLTDKRTNEAIEFHYENGVQDFVSYLNEDKEILTPVLYFEGEDNGFQVEVALQYNDGFSDNILSFVNNVRTKDGGTHETGLKSAITKVMNDYARKTGLLKEKDKNLEGSDYREGLAAVLSILVPEEHLQFEGQTKDKLGSPLARPVVDGIVADKLTFFLMENGELASNLIRKAIKARDAREAARKARDESRNGKKNKKDKGLLSGKLTPAQSKNPAKNELYLVEGDSAGGSAKQGRDRKFQAILPLRGKVVNTAKAKMADILKNEEINTMIYTIGAGVGADFSIEDANYDKIIIMTDADTDGAHIQTLLLTFFYRYMRPLVEAGHVYIALPPLYKMSKGKGKKEEVAYAWTDGELEELRKQFGKGATLQRYKGLGEMNADQLWETTMNPETRTLIRVTIEDLARAERRVNVLMGDKVEPRRKWIEDNVKFTLEETTVF

SEQ ID NO: 1637 - DNA, 105 bp, Streptococcus pneumoniae
atgaaagaaaataatatgttagtaaactggaaattagagtcggatgtgaatgactatgtgaaaaagcagtttgaaaatcttggtttgaaaaaattgcaggattat

SEQ ID NO: 1638 - protein, 35 aa, Streptococcus pneumoniae
  hypothetical protein; Cellular location: cytoplasm
MKENNMLVNWKLESDVNDYVKKQFENLGLKKLQDY

SEQ ID NO: 1639 - DNA, 123 bp, Streptococcus pneumoniae
atgagtgcttatctcaaagaggcgcttaagggagcggctaagacacaaactaagactaattttggaaaaccagattttcatattgaaaaatacaaacaggatagtttggttacttatcgtaac

SEQ ID NO: 1640 - protein, 41 aa, Streptococcus pneumoniae
  hypothetical protein; Cellular location: cytoplasm
MSAYLKEALKGAAKTQTKTNFGKPDFHIEKYKQDSLVTYRN

SEQ ID NO: 1641 - DNA, 2478 bp, Streptococcus pneumoniae
ttgtatcttatgtctaacattcaaaacatgtccctggaggacatcatgggagagcgctttggtcgctactccaagtacattattcaagaccgggctttgccagatattcgtgatgggttgaagccggttcagcgccgtattctttattctatgaataaggatagcaatacttttgacaagagctaccgtaagtcggccaagtcagtcgggaacatcatggggaatttccacccacacggggattcttctatctatgatgccatggttcgtatgtcacagaactggaaaaatcgtgagattctagttgaaatgcacggtaataacggttctatggacggagatcctcctgcggctatgcgttatactgaggcacgtttgtctgaaattgcaggctaccttcttcaggatatcgagaaaaagacagttccttttgcatggaactttgacgatacggagaaagaaccaacggtcttgccagcagcctttccaaacctcttggtcaatggttcgactgggatttcggctggttatgccacagacattcctccccataatttagctgaggtcatagatgctgcagtttacatgattgaccacccaactgcaaagattgataaactcatggaattcttgcctggaccagacttccctacaggggctattattcagggtcgtgatgaaatcaagaaagcttatgagactgggaaagggcgcgtggttgttcgttccaagactgaaattgaaaagctaaaaggtggtaaggaacaaatcgttattattgagattccttatgaaatcaataaggccaatctagtcaagaaaatcgatgatgttcgtgttaataacaaggtagctgggattgctgaggttcgtgatgagtctgaccgtgatggtcttcgtatcgctatcgaacttaagaaagacgctaatactgagcttgttctcaactacttatttaagtacaccgacctacaaatcaactacaactttaatatggtggcgattgacaatttcacacctcgtcaggttgggattgttccaatcctgtctagctatatcgctcaccgtcgagaagtgattttggcgcgttcacgctttgacaaagaaaaggctgagaaacgtctccatatcgtcgaaggtttgattcgtgtgatttcgattttggatgaagtcattgctcttatccgtgcttctgagaataaggcggacgccaaggaaaacctcaaagttagctatgattttacggaagaacaggctgaggctatcgtaactttgcaactgtaccgtttgaccaataccgatgtggttgtcttgcaggaagaagaagcagagcttcgtgagaagattgctatgctggcggctattatcggtgatgaaaggactatgtacaatctcatgaagaaagaacttcgtgaggtcaagaagaaatttgcaactcctcgtttgagttctttagaagacactgcgaaagcaattgagattgatacagctagtcttatcgctgaggaagatacctacgtcagcgtgaccaaggcaggttacatcaagcgtaccagtccacgttcctttgcggcttccaccttggaagaaattggcaagcgtgatgatgaccgtttgatttttgttcaatctgccaagacaacccagcacctcttgatgttcacaagtcttggaaatgtcatctacagaccaatccatgagttggcagatattcgttggaaggacatcggagagcatctgagccaaaccatcacaaactttgaaacgaatgaagaaatcctttatgtggaagtactggatcagtttgacgatgcgacaacctactttgcagtgactcgccttggtcaaatcaaacgggtagagcgaaaagaattcactccatggcggacctatagatctaagtctgtcaagtatgctaagctcaaagacgatacagatcagattgtagcagtggctccgattaaactagatgatgttgtcttggttagtcaaaatggttatgccctgcgtttcaatatcgaagaggttccggttgtcggtgctaaggcagcaggtgtcaaggctatgaatttgaaagaagatgatgtcctccaatctggctttatctgtaatacttcgtccttctacctcttgacccagcgtggaagcttgaaacgtgtttccattgaggaaattctagcaaccagccgtgccaaacgaggattacaagtcttgcgtgagttgaaaaacaaaccgcatcgtgtcttcttggcaggagcagttgcagagcaaggatttgttggcgatttcttcagtacggaagtggatgtgaacgaccaaactctgcttgtccaatccaataaaggaacaatctatgaaagccgattgcaagacttgaacttgtcagaacgcactagcaatggaagcttcatttctgacacgatttcagatgaagaagtttttgacgcttatcttcaggaagtagttactgaagataaa

SEQ ID NO: 1642 - protein, 826 aa, Streptococcus pneumoniae
  topoisomerase IV, subunit A (parC); Cellular location: membrane; Similar to strain R6 sequence 15902801 (0.E+01)
MYLMSNIQNMSLEDIMGERFGRYSKYIIQDRALPDIRDGLKPVQRRILYSMNKDSNTFDKSYRKSAKSVGNIMGNFHPHGDSSIYDAMVRMSQNWKNREILVEMHGNNGSMDGDPPAAMRYTEARLSEIAGYLLQDIEKKTVPFAWNFDDTEKEPTVLPAAFPNLLVNGSTGISAGYATDIPPHNLAEVIDAAVYMIDHPTAKIDKLMEFLPGPDFPTGAIIQGRDEIKKAYETGKGRVVVRSKTEIEKLKGGKEQIVIIEIPYEINKANLVKKIDDVRVNNKVAGIAEVRDESDRDGLRIAIELKKDANTELVLNYLFKYTDLQINYNFNMVAIDNFTPRQVGIVPILSSYIAHRREVILARSRFDKEKAEKRLHIVEGLIRVISILDEVIALIRASENKADAKENLKVSYDFTEEQAEAIVTLQLYRLTNTDVVVLQEEEAELREKIAMLAAIIGDERTMYNLMKKELREVKKKFATPRLSSLEDTAKAIEIDTASLIAEEDTYVSVTKAGYIKRTSPRSFAASTLEEIGKRDDDRLIFVQSAKTTQHLLMFTSLGNVIYRPIHELADIRWKDIGEHLSQTITNFETNEEILYVEVLDQFDDATTYFAVTRLGQIKRVERKEFTPWRTYRSKSVKYAKLKDDTDQIVAVAPIKLDDVVLVSQNGYALRFNIEEVPVVGAKAAGVKAMNLKEDDVLQSGFICNTSSFYLLTQRGSLKRVSIEEILATSRAKRGLQVLRELKNKPHRVFLAGAVAEQGFVGDFFSTEVDVNDQTLLVQSNKGTIYESRLQDLNLSERTSNGSFISDTISDEEVFDAYLQEVVTEDK

SEQ ID NO: 1643 - DNA, 1020 bp, Streptococcus pneumoniae
atgacagtaacgattgattgggaaaacctcggtttttcctatatgaaattaccttatcgctatcttgctcatttcaaaaatggacaatgggatcaaggagagcttacagaggatgcaactttgcatatttcagagtcttctccaagtcttcactatggacaacaagcatttgaaggtttgaaagcttatcgtactaaggatggcagtgttcaactgttccgtcctgatgaaaatgctaaacgtctgcaacgtacatgtgaccgtctcttgatgccacaagttccgacagacatgtttgtagaagcttgtaaagcagttgtccgtgcgaatgaagaatacgtaccaccatacggaacaggtggaaccttatatcttcgccctcttttgattggtgtcggagatattatcggggtaaaaccggcagaagagtacattttcaccatctttgctatgccagttggaaattactttaaaggtggtttggtcccaaccaacttcttgattcaggatgagtacgaccgtgcagcaccaaatggtacaggtgcggctaaggttggtggaaactatgctgcaagtctcttaccaggaaaaatggccaagtcacgtcatttctcagatgttatctatctggacccatcaactcatacaaagattgaagaagtcggatcagctaacttctttggaattacagctgataatgaatttgtaacaccattgagtccatctatcttgccatctattaccaagtattccttgctttatttggcagaacatcgcttgggattaactcctattgagggtgatgttccaattgataatcttgaccgttttgtagaggcaggtgcctgtggtacagcagcggttatttctccaattggaggtattcaacatggtgatgatttccatgtattctatagtgaaacagaagtaggtcctgtgacgcgtaaattatataatgaattgacgggtattcagtttggcgatattgaagcgccagaaggttggattgtaaaagtagat

SEQ ID NO: 1644 - protein, 340 aa, Streptococcus pneumoniae
  branched-chain amino acid aminotransferase (ilvE); Cellular location: cytoplasm; Similar to strain R6 sequence 15902802 (0.E+01)
MTVTIDWENLGFSYMKLPYRYLAHFKNGQWDQGELTEDATLHISESSPSLHYGQQAFEGLKAYRTKDGSVQLFRPDENAKRLQRTCDRLLMPQVPTDMFVEACKAVVRANEEYVPPYGTGGTLYLRPLLIGVGDIIGVKPAEEYIFTIFAMPVGNYFKGGLVPTNFLIQDEYDRAAPNGTGAAKVGGNYAASLLPGKMAKSRHFSDVIYLDPSTHTKIEEVGSANFFGITADNEFVTPLSPSILPSITKYSLLYLAEHRLGLTPIEGDVPIDNLDRFVEAGACGTAAVISPIGGIQHGDDFHVFYSETEVGPVTRKLYNELTGIQFGDIEAPEGWIVKVD

SEQ ID NO: 1645 - DNA, 702 bp, Streptococcus pneumoniae
gtggtcctgagcacgtcagctattttagtggcttgtggaaaaactgataaagaagcagatgcaccgacaacattttcttatgtctatgcagtagatccagcatcattgggctacagtatagcgactcgaacatcgaggacagacgttattggaaatgttattgatggtttgatggaaaatgataaatacggcaatgttgctccttctcaaaaagactatgatttgaacagtacaggatgggctccaagctatcaagatccagcgtctcacttgaatattatagatccaaaatctggttctgccatgaaacaccttggtattacgaaaggaaaagataaggatgttgtagctaaacctggtttggataaatataagaaattgttagaagatgctgtttctgagaccactgacctagagaaaagatatgaaaaatatgccaaagctcaagcttggtcgacagatagttcattattgatgccaacagcttcatctggtggttctccagttgtaagtaacgtagtaccattctcaaaaccatactcacaagttggtattaagggggatccatatatctttaaaggaatgaaattgcaaaaagatattgttacaacaaaagaatataacgaggtttttaaaaaatggcaaaaagaaaaattggaatccaatagcaaataccaaaaagaactagaaaaacacattaaa

SEQ ID NO: 1646 - protein, 234 aa, Streptococcus pneumoniae
  oligopeptide-binding protein, internal deletion, POINT MUTATION; Cellular location: lipoprotein; Similar to strain R6 sequence 15902804 (e-125)
MVLSTSAILVACGKTDKEADAPTTFSYVYAVDPASLGYSIATRTSRTDVIGNVIDGLMENDKYGNVAPSQKDYDLNSTGWAPSYQDPASHLNIIDPKSGSAMKHLGITKGKDKDVVAKPGLDKYKKLLEDAVSETTDLEKRYEKYAKAQAWSTDSSLLMPTASSGGSPVVSNVVPFSKPYSQVGIKGDPYIFKGMKLQKDIVTTKEYNEVFKKWQKEKLESNSKYQKELEKHIK

SEQ ID NO: 1647 - DNA, 708 bp, Streptococcus pneumoniae
ttgaatataaaggagtttgatatggagtggattagattaataggaatagcaatcattgttgtgggttttattttaaaatttgatacaattgcaacagtagtcttagctggtttggttacagctttagtttcaggtgtttctctcgttgaatttttggagattttgggaaaagaatttagcaatcagcgagtgctcacgatttttatggttaccttgcctcttgtggggctgtcagaaacctttggactcaagcaacgatcaatcgatttgattcgaaagattaaaggtctgacagttggaaacttctatacagtttatttctttattcgagagttagctggtttcttttcaattcgtctaggaggacaccctcagtttgtcagacctttggttcaacctatgggagaagcagctgcagagtctcaattaggtagaaagttaacagaggttgaagatgagacaataaaagcgcgtgcggctgcgaatgaaaattttggaaatttctttgctcaaaatacgtttgtaggtgctgggggagtcctcttgatagggggaacattagatcagttaggctatgaaagcaattatgcagggattgcttctacatctattattgttgctgttataacacttattgtagtggggatttataattatttatttgataaaaaattgatatcaaaaaagactaggggaggagaacaaaaa

SEQ ID NO: 1648 - protein, 236 aa, Streptococcus pneumoniae
  membrane protein, putative; Cellular location: membrane; Similar to strain R6 sequence 15902371 (0.E+01)
MNIKEFDMEWIRLIGIAIIVVGFILKFDTIATVVLAGLVTALVSGVSLVEFLEILGKEFSNQRVLTIFMVTLPLVGLSETFGLKQRSIDLIRKIKGLTVGNFYTVYFFIRELAGFFSIRLGGHPQFVRPLVQPMGEAAAESQLGRKLTEVEDETIKARAAANENFGNFFAQNTFVGAGGVLLIGGTLDQLGYESNYAGIASTSIIVAVITLIVVGIYNYLFDKKLISKKTRGGEQK

SEQ ID NO: 1649 - DNA, 921 bp, Streptococcus pneumoniae
atgacagagttggcaaagcaactattagagttgacctatattgtgattggttgtcaatttctccatacagcctattgtagttataaagataaaacaaacccagttcgacttgggacatctgcattttggactctattgtctattacgtttataggtggttcctatatgccaaatatgagtattggtattattgtaatcctattatcgctgttaacattgtttaagcaagtccgtatcggaaccttgccatccttagatgaaatgaaagccaatattgaatctaacaggttgaaaaataaaatttttattccagttatgctgatggcaatacttgcgttggtcttagcgcaaatgattccagaatttagcaagatttcgattagccttgccgccttgtttgctacaatttctgttcttgtgattaccaatagtcaccctaagagtctgttatcagaaaataatcgaatgactcagcaagtttcaacaagtgggattgttcctcaattattaggggctttgggggctatttttactgtagcaggtgttggtgatgttatctctcatctgattagcggtattgttccttcagatagtcgctttataggagttttggcctatgttcttggaatggttctattcacaatgattatgggaaatgcttttgcagcattcaccgttattacagcaggtgttggagttccctttgtatttgctctgggagctaatccaattgtggctggtgctcttgccatgacagcaggttattgtgggaccttattgaccccaatggctgctaattttaacgctctaccagcagcattgatggatatgaaagatcagaatggcgttataaaggctcaagcaggtgttgctctagtaatgattgttattcacatattcttaatgtactttctcgcattt

SEQ ID NO: 1650 - protein, 307 aa, Streptococcus pneumoniae
  membrane protein; Cellular location: membrane; Similar to strain R6 sequence 15902805 (e-169)
MTELAKQLLELTYIVIGCQFLHTAYCSYKDKTNPVRLGTSAFWTLLSITFIGGSYMPNMSIGIIVILLSLLTLFKQVRIGTLPSLDEMKANIESNRLKNKIFIPVMLMAILALVLAQMIPEFSKISISLAALFATISVLVITNSHPKSLLSENNRMTQQVSTSGIVPQLLGALGAIFTVAGVGDVISHLISGIVPSDSRFIGVLAYVLGMVLFTMIMGNAFAAFTVITAGVGVPFVFALGANPIVAGALAMTAGYCGTLLTPMAANFNALPAALMDMKDQNGVIKAQAGVALVMIVIHIFLMYFLAF

SEQ ID NO: 1651 - DNA, 642 bp, Streptococcus pneumoniae
atgaaaatattggttacaggttttaatccttttggaggtgaaaagattaatccagctttggaggctgtaaaattattaccatctgagattaatggggctgaagttcgctgggtagaaattccaacggttttttataagtcgtcagaagttttagaggcagaaatattacgatatcaaccagatgctgtactttgtattggacaagcaggcggcaggaccggcttaacacctgaacgagtggctattaatcaagatgatgctcgcatacctgataacgaaggcaatcaaccaattgatacaccgattcgtattgatggagcatcggcctattttagtagtttacctatcaaagcgatggtacaagctatcaaaaaacagggacttccggcagttgtatccaatagtgcaggaacctttgtttgcaatcatttgatgtaccaagctctttatttagtggataaaaaattccctaatatgagagcaggtttcatgcatattccatatatgatggaacaagtagtaaataagccgaatactgcaggaatgagtctatgtgatattgtaagaggcatagaggtagctattgaagctattgtagactacaaagataaggatttgcagttagtaggcggtgagactcac

SEQ ID NO: 1652 - protein, 214 aa, Streptococcus pneumoniae
  pyrrolidone-carboxylate peptidase (pcp); Cellular location: cytoplasm; Similar to strain R6 sequence 15902806 (e-122)
MKILVTGFNPFGGEKINPALEAVKLLPSEINGAEVRWVEIPTVFYKSSEVLEAEILRYQPDAVLCIGQAGGRTGLTPERVAINQDDARIPDNEGNQPIDTPIRIDGASAYFSSLPIKAMVQAIKKQGLPAVVSNSAGTFVCNHLMYQALYLVDKKFPNMRAGFMHIPYMMEQVVNKPNTAGMSLCDIVRGIEVAIEAIVDYKDKDLQLVGGETH

SEQ ID NO: 1653 - DNA, 228 bp, Streptococcus pneumoniae
atgagcaagaaagataaaaaaatcgaaattcaagtagcggatgccaaagttaatgttggtaaagacagttttgaaggttatacattgactatcggtaaaaaagttatcggagaaattgccgaattagacggacaatttgccattataaagaatgggaatgtcgatagtttttataaaaaattggaaaaagctgtggaaattttgattgaaaattataatttagcaaaa

SEQ ID NO: 1654 - protein, 76 aa, Streptococcus pneumoniae
  hypothetical protein; Cellular location: cytoplasm; Similar to strain R6 sequence 15902807 (2.E-38)
MSKKDKKIEIQVADAKVNVGKDSFEGYTLTIGKKVIGEIAELDGQFAIIKNGNVDSFYKKLEKAVEILIENYNLAK

SEQ ID NO: 1655 - DNA, 1200 bp, Streptococcus pneumoniae
atgaacgaatttgaagatttgctaaatagcgttagtcaagttgagactggtgatgttgttagtgctgaagtattgacagttgatgcgactcaagctaacgttgcaatctctggaactggtgttgaaggtgtcttgactcttcgcgaattgacaaacgatcgtgatgcagatatcaatgactttgttaaagtaggagaagtattggatgttcttgtacttcgtcaagtagttggtaaagatactgatacagttacataccttgtatctaaaaaacgccttgaagctcgcaaagcatgggacaaacttgttggtcgcgaagaagaagttgttactgttaaaggaacgcgtgccgttaaaggtggactttcagtagaatttgaaggtgttcgtggatttatcccagcttcaatgttggatactcgtttcgtacgtaacgctgagcgttttgtaggtcaagaatttgatactaaaatcaaagaagttaacgctaaagaaaaccgcttcatcctttcacgtcgtgaagttgttgaagcagctactgcagcagctcgcgctgaagtattcggtaaattggctgttggtgatgttgtaactggtaaagttgctcgtatcacaagcttcggcgctttcgtcgaccttggtggtgttgacggattggttcacttgactgaattgtcacatgaacgtaatgtatcaccaaaatcagttgtaactgttggtgaagaaattgaagtgaaaatccttgatcttaacgaagaagaaggacgtgtatcactttcacttaaagcaacagtaccaggaccatgggatggcgttgagcaaaaattggctaaaggtgatgtagtagaaggaacagttaaacgtttgactgacttcggtgcatttgttgaagtattgccaggtatcgatggacttgttcacgtatcacaaatttcacacaaacggattgaaaatccaaaagaagctcttaaagttggtcaagaagttcaagttaaagttcttgaagttaacgcagatgcagaacgcgtgtcactttctattaaagctcttgaagaacgtccagcccaagaagaaggacaaaaagaagaaaaacgtgctgctcgtccacgtcgtccaagacgtcaagaaaagcgtgatttcgaacttccagaaacacaaacaggattttcaatggctgatttgtttggtgatatcgaactt

SEQ ID NO: 1656 - protein, 400 aa, Streptococcus pneumoniae
  ribosomal protein S1 (rpsA); Cellular location: cytoplasm; Similar to strain R6 sequence 15902808 (0.E+01)
MNEFEDLLNSVSQVETGDVVSAEVLTVDATQANVAISGTGVEGVLTLRELTNDRDADINDFVKVGEVLDVLVLRQVVGKDTDTVTYLVSKKRLEARKAWDKLVGREEEVVTVKGTRAVKGGLSVEFEGVRGFIPASMLDTRFVRNAERFVGQEFDTKIKEVNAKENRFILSRREVVEAATAAARAEVFGKLAVGDVVTGKVARITSFGAFVDLGGVDGLVHLTELSHERNVSPKSVVTVGEEIEVKILDLNEEEGRVSLSLKATVPGPWDGVEQKLAKGDVVEGTVKRLTDFGAFVEVLPGIDGLVHVSQISHKRIENPKEALKVGQEVQVKVLEVNADAERVSLSIKALEERPAQEEGQKEEKRAARPRRPRRQEKRDFELPETQTGFSMADLFGDIEL

SEQ ID NO: 1657 - DNA, 1324 bp, Streptococcus pneumoniae
atggaacaattacattttatcacaaaattactagacattaaagaccctaatatccagattttagacatcatcaataaagatacacacaaggaaatcatcgccaaactggactacgacgccccatcttgccctgagtgcggaaaccaattgaagaaatatgactttcaaaaaccgtctaagattccttaccttgagacaactggtatgcctactagaattctacttagaaagcgtcgtttcaagtgctatcactgttcaaaaatgatggtcgctgaaacttctatcgtcaagaaaaatcaccaaattcctcgtattatcaaccaaaaaattgcgcaaaagttgattgagaagatttctatgaccgatattgctcatcagctggccatttcaacttcaactgtcattcgaaagctcaatgattctcactttgagcatgatttttcgcgtcttcctgagattatgtcctgggacgttgaaacagtccggggagtgactgtttcaatcgggagatgaagatgagctttattgcgcaagattttgacaagctcgatatcatcactgttcttgaaggtagaacacaagctatcatccgagatcactttcttaaatatgatagagccgtccgatgtcgcgtcaaaatcattactatggatatgtttagcccttactatgacttagctagacaacttcgctttcaaatttctaggctcaggctgaaacagtctcccagactgtttcactcccgaatgctaaaatcgttcttgatcgctttcatattgtacaacatcttagccgtgctatgagtcgtgtgcatgtccaaatcatgaatcagtttcatcgaaagtctcatgaatacaaggctatcaagcgctactggaagctcatacaacaggatagtcgtaaactgagtgataagcgattttatcgtcctacttttcgtatgcacttaaccaataaagagattttaaacaagcttttgagttattcggaagacttgaaacaccactatcagctctatcaactcttgctgtttcactttcagaataaggaaccggagaaatttttcggacttattgaggacaatcttaagcaggttcatcctatttttcagactgtctttaaaaccttcctcaaagataaagaaaagcttgtcaacacccttcaactacactattctaacgccaaactggaagcgaccaataatctcatcaaacttatcaagcgcaatgcctttggttttcggaactttgaaaacttcaaaaaacggatttttatcgctctgaatatcaaaaaagaaaggacaaaatttgtcctttctcgagct

SEQ ID NO: 1658 - protein, 175 aa, Streptococcus pneumoniae
  IS1167, transposase FRAMESHIFT
MSRVHVQIMNQFHRKSHEYKAIKRYWKLIQQDSRKLSDKRFYRPTFRMHLTNKEILNKLLSYSEDLKHHYQLYQLLLFHFQNKEPEKFFGLIEDNLKQVHPIFQTVFKTFLKDKEKLVNTLQLHYSNAKLEATNNLIKLIKRNAFGFRNFENFKKRIFIALNIKKERTKFVLSRA

SEQ ID NO: 1659 - DNA, 285 bp, Streptococcus pneumoniae
atgagctttattgcgcaagattttgacaagctcgatatcatcactgttcttgaaggtagaacacaagctatcatccgagatcactttcttaaatatgatagagccgtccgatgtcgcgtcaaaatcattactatggatatgtttagcccttactatgacttagctagacaacttcgctttcaaatttctaggctcaggctgaaacagtctcccagactgtttcactcccgaatgctaaaatcgttcttgatcgctttcatattgtacaacatcttagccgtgcta

SEQ ID NO: 1660 - protein, 95 aa, Streptococcus pneumoniae
  transposase-related
MSFIAQDFDKLDIITVLEGRTQAIIRDHFLKYDRAVRCRVKIITMDMFSPYYDLARQLRFQISRLRLKQSPRLFHSRMLKSFLIAFILYNILAVL

SEQ ID NO: 1661 - DNA, 510 bp, Streptococcus pneumoniae
atggaacaattacattttatcacaaaattactagacattaaagaccctaatatccagattttagacatcatcaataaagatacacacaaggaaatcatcgccaaactggactacgacgccccatcttgccctgagtgcggaaaccaattgaagaaatatgactttcaaaaaccgtctaagattccttaccttgagacaactggtatgcctactagaattctacttagaaagcgtcgtttcaagtgctatcactgttcaaaaatgatggtcgctgaaacttctatcgtcaagaaaaatcaccaaattcctcgtattatcaaccaaaaaattgcgcaaaagttgattgagaagatttctatgaccgatattgctcatcagctggccatttcaacttcaactgtcattcgaaagctcaatgattctcactttgagcatgatttttcgcgtcttcctgagattatgtcctgggacgttgaaacagtccggggagtgactgtttcaatcgggaga

SEQ ID NO: 1662 - protein, 170 aa, Streptococcus pneumoniae
  transposase
MEQLHFITKLLDIKDPNIQILDIINKDTHKEIIAKLDYDAPSCPECGNQLKKYDFQKPSKIPYLETTGMPTRILLRKRRFKCYHCSKMMVAETSIVKKNHQIPRIINQKIAQKLIEKISMTDIAHQLAISTSTVIRKLNDSHFEHDFSRLPEIMSWDVETVRGVTVSIGR

SEQ ID NO: 1663 - DNA, 495 bp, Streptococcus pneumoniae
atgttaaaatcagaaaaacaatcacgttatcaaatgttaaatgaagaattgtccttcctattggaaggcgaaaccaatgttttggctaatctttccaacgccagtgctctcataaaatcacgttttcctaataccgtatttgcaggcttttatttgttcgatggaaaggaattggttttaggccccttccaaggaggtgtttcctgcatccgtattgcactaggcaagggtgtttgtggtgaggcagctcactttcaggaaactgttattgttggagatgtgacgacctatctcaactatatttcttgtgatagtctagctaaaagtgaaattgtggtgccgatgatgaagaatggtcagttacttggagttctggatctggattcttcagagattgaggattacgatgctatggatcgagattatttggaacaatttgtcgctattttgcttgaaaagacagcatgggactttacgatgtttgaggaaaaatct

SEQ ID NO: 1664 - protein, 165 aa, Streptococcus pneumoniae
  conserved hypothetical protein; Cellular location: cytoplasm; Similar to strain R6 sequence 15902812 (5.E-91)
MLKSEKQSRYQMLNEELSFLLEGETNVLANLSNASALIKSRFPNTVFAGFYLFDGKELVLGPFQGGVSCIRIALGKGVCGEAAHFQETVIVGDVTTYLNYISCDSLAKSEIVVPMMKNGQLLGVLDLDSSEIEDYDAMDRDYLEQFVAILLEKTAWDFTMFEEKS

SEQ ID NO: 1665 - DNA, 1653 bp, Streptococcus pneumoniae
atgtatcaagcactttatcgaaaatatagaagtcaaaacttctcccagttagttggtcaagaagttgtggctaagactcttaaacaagcggtggagcaagagaaaataagtcacgcttatcttttttctggtcctcgtggaacgggaaaaaccagtgttgctaaaatctttgccaaggctatgaactgtcccaatcaagtgggtggcgaaccttgcaataactgctatatttgtcaagcagtgacggacggtagtttagaagatgtcattgaaatggatgcagcttctaataatggggtagatgaaattcgcgaaattcgtgataaatctacctatgcgcctagccttgctcgttataaggtttatatcatagatgaggttcacatgctgtctacaggggcttttaatgccctcctaaagacgctggaagaaccaacacagaatgtagtctttattttggccactactgaattgcacaagattcctgctactattctatcccgtgtgcaacgttttgagtttaaatcaattaagacacaggatattaaggaacatattcactatatcttagaaaaagaaaatatcagttctgaaccagaggctgtggaaatcattgccagacgggcggaaggtggaatgcgggacgccttgtctattttggatcaagccctgagtttgacacagggaaatgagctgacgactgctatctctgaagaaattactggcaccattagcctatcagccttggatgattatgtggcggccttgtctcaacaggatgttcccaaagctttgtcttgcttgaatcttctttttgacaatggtaagagcatgactcgttttgtgaccgatcttttgcactatttaagagacttgttaattgttcaaacagggggagcaaatactcatcatagttcagtctttgtagaaaatttggcacttcctcaaaaaaatctgtttgaaatgattcgcttagcaacagtgagtttagcagatattaagtctagtttgcaacccaagatttatgctgaaatgatgaccgtccgtttggcggaaatcaagtccgaaccagctctatcaggagcggttgaaaatgaaattgctacgctgagacaggaagttgcccgtctcaaacaagagctttctaatgtaggtgcggttcctaaacaagttgcaccagctcctagtcgaccagctacgggcaaaacagtctatcgtgtcgatcgcaataaagtgcaatctatcttacaagaggccgtcgaaaatcctgatttagcacgtcaaaatttaattcgtttgcagaatgcctggggagaggtaattgaaagtctaggtgggccggacaaggctctgctagttggttctcaaccggttgctgccaatgaacaccatgctattcttgcttttgagtctaacttcaatgctggtcaaactatgaaacgagacaatctcaataccatgtttggtaatatcctcagtcaggcggcaggtttttcacctgagattttagctatttccatggaggaatggaaagaagttcgcgcagccttttcagccaaagccaaatcttctcaaactgaaaaagaagtagaagaaagcctgattccagaaggatttgaatttttggctgataaagtgaaggtagaggaagac

SEQ ID NO: 1666 - protein, 551 aa, Streptococcus pneumoniae
  DNA polymerase III, gamma and tau subunits (dnaX); Cellular location: cytoplasm; Similar to strain R6 sequence 15902813 (0.E+01)
MYQALYRKYRSQNFSQLVGQEVVAKTLKQAVEQEKISHAYLFSGPRGTGKTSVAKIFAKAMNCPNQVGGEPCNNCYICQAVTDGSLEDVIEMDAASNNGVDEIREIRDKSTYAPSLARYKVYIIDEVHMLSTGAFNALLKTLEEPTQNVVFILATTELHKIPATILSRVQRFEFKSIKTQDIKEHIHYILEKENISSEPEAVEIIARRAEGGMRDALSILDQALSLTQGNELTTAISEEITGTISLSALDDYVAALSQQDVPKALSCLNLLFDNGKSMTRFVTDLLHYLRDLLIVQTGGANTHHSSVFVENLALPQKNLFEMIRLATVSLADIKSSLQPKIYAEMMTVRLAEIKSEPALSGAVENEIATLRQEVARLKQELSNVGAVPKQVAPAPSRPATGKTVYRVDRNKVQSILQEAVENPDLARQNLIRLQNAWGEVIESLGGPDKALLVGSQPVAANEHHAILAFESNFNAGQTMKRDNLNTMFGNILSQAAGFSPEILAISMEEWKEVRAAFSAKAKSSQTEKEVEESLIPEGFEFLADKVKVEED

SEQ ID NO: 1667 - DNA, 192 bp, Streptococcus pneumoniae
atgaataaacaacaatttattattatggcgctgtttacagctgctgagacctattttttcaatgaagcctggatgactggccgctatattatggcagccttttgggcaattttactctttagaaatttccgagtcagttatgtgatgggcaaaatcgttgatgtcatcgatcagcattttaataggaaagac

SEQ ID NO: 1668 - protein, 64 aa, Streptococcus pneumoniae
  hypothetical protein; Cellular location: outside; Similar to strain R6 sequence 15902814 (6.E-34)
MNKQQFIIMALFTAAETYFFNEAWMTGRYIMAAFWAILLFRNFRVSYVMGKIVDVIDQHFNRKD

SEQ ID NO: 1669 - DNA, 789 bp, Streptococcus pneumoniae
ttgaaaaagaaaggaactatcatgtcagtattagagatcaaagatcttcacgttgagattgaaggaaaagaaattttaaaaggggttaacctgaccctgaaaacaggagaaattgccgctatcatgggaccaaatggtacaggtaaatcgactctttctgccgctatcatgggaaatccaaactatgaagtaactaaaggtgaagttttgtttgatggcgtaaacatccttgagttggaagtggatgagcgtgcgcgtatgggacttttccttgctatgcaatacccatcagaaatccctggaattaccaatgctgagtttcttcgtgccgctatgaatgcgggtaaagaagatgatgagaagatttcagttcgtgagtttattactaagctagatgaaaaaatggaattgctcaacatgaaagaagaaatggcagagcgttacctcaacgaaggcttctctggtggtgagaaaaaacgcaatgaaattcttcaacttttgatgttggagccaacatttgctcttttggacgagattgactcaggtcttgatattgacgctcttaaagttgtgtctaaaggtgtcaatgccatgcgtggtgaaggttttggtgctatgatcatcactcactaccaacgtcttttgaactatatcacacctgatgtggtacacgtgatgatggaaggtcgtgttgtcctttctggtggtccagaattggctgcgcgtttggaacgtgaaggatacgcaaaattagctgaagaacttggctacgactacaaggaagaattg

SEQ ID NO: 1670 - protein, 263 aa, Streptococcus pneumoniae
  ABC transporter, ATP-binding protein; Cellular location: cytoplasm; Similar to strain R6 sequence 15902815 (e-142)
MKKKGTIMSVLEIKDLHVEIEGKEILKGVNLTLKTGEIAAIMGPNGTGKSTLSAAIMGNPNYEVTKGEVLFDGVNILELEVDERARMGLFLAMQYPSEIPGITNAEFLRAAMNAGKEDDEKISVREFITKLDEKMELLNMKEEMAERYLNEGFSGGEKKRNEILQLLMLEPTFALLDEIDSGLDIDALKVVSKGVNAMRGEGFGAMIITHYQRLLNYITPDVVHVMMEGRVVLSGGPELAARLEREGYAKLAEELGYDYKEEL

SEQ ID NO: 1671 - DNA, 1260 bp, Streptococcus pneumoniae
atgactagagaaaatattaaacttttttcagaaatgcacgctgaaccaagctggttggctgatctccgtcaaaaagcttttgacaagattgagactttggaattaccagttattgagtgtgtcaaattccaccgttggaatctgggtgatggaacgattacagaaaatgagccatcagcaaatgttccagatttcacagctttagatcatcacttgaagttggtgcaagtaggaactcaaactgttttcgaacaaactccagttgagttagctgaacagggtgttgtcttcacagactttcactcagctttagaagaaattccagagctgatcgaagaattcttcatgtcatctgttaagtatgatgatgacaagttggcggcttaccacacagcttactttaacagtggtgctgtactctatattccagataacgtagaaatcacagagccaattgaaggaattttctaccaagatagcgatagcaatgtgccgtttaacaagcatattatgattatcgttggtaaaaattctaagattagttatctggagcgtttagagtcacgcggtgaaggaagtgacaaagcaactgccaatatcacagtggaagtgattgcacgttctggtgcgcaagtcaagtttgctgctatcgaccgtctaggtgaaaacgtcactgcctacattagccgtcgtggtaaattaggcaacgatgcaagtattgactgggctatcggtgtcatgaacgaaggaaatgtcgttgctgattttgatagtgacttgattggtaatggtagccatgctgacctcaaggttgtagctctttcaagtggtcgtcaggtacaagggattgatactcgtgtaactaactatggctgcaactcaatcggaaacattctacaacatggggttatccttgaaaaagcaactttgactttcaatggtatcggccacatcatcaagggtgctaagggagcagatgcgcaacaagagagccgtgttctcatgctttcagaccaagcgcgttcagatgctaacccaattcttttgattgatgaaaatgacgtaactgcaggccatgcagcctctattggtcaggtagatccagaagatatgtactacctcatgagtcgtggcttggataaggcaactgcagagcgtttggttgttcgtggtttccttggatctgttatcgtggagattccagtcaaggaagttcgtgatgaaatgattgcaactatcgaagagaaattgtcaaaacgc

SEQ ID NO: 1672 - protein, 420 aa, Streptococcus pneumoniae
  conserved hypothetical protein; Cellular location: cytoplasm; Similar to strain R6 sequence 15902816 (0.E+01)
MTRENIKLFSEMHAEPSWLADLRQKAFDKIETLELPVIECVKFHRWNLGDGTITENEPSANVPDFTALDHHLKLVQVGTQTVFEQTPVELAEQGVVFTDFHSALEEIPELIEEFFMSSVKYDDDKLAAYHTAYFNSGAVLYIPDNVEITEPIEGIFYQDSDSNVPFNKHIMIIVGKNSKISYLERLESRGEGSDKATANITVEVIARSGAQVKFAAIDRLGENVTAYISRRGKLGNDASIDWAIGVMNEGNVVADFDSDLIGNGSHADLKVVALSSGRQVQGIDTRVTNYGCNSIGNILQHGVILEKATLTFNGIGHIIKGAKGADAQQESRVLMLSDQARSDANPILLIDENDVTAGHAASIGQVDPEDMYYLMSRGLDKATAERLVVRGFLGSVIVEIPVKEVRDEMIATIEEKLSKR

SEQ ID NO: 1673 - DNA, 1224 bp, Streptococcus pneumoniae
atgttagatgtagaagcgattcgcaaggattttccaattttagatcagattgtcaatgatgaacctctggtctatctggacaatgctgcgacgacacaaaaaccactagtagttctgaaagctattaacagctactatgagcaggacaatgccaatgttcaccgtggtgtccataccttagcggaacgagcgacagcttcttatgaagctgctcgtgaaaccattcgtaagtttattaatgcaggctctacaaaggaagttctctttaccagaggaacgacaaccagccttaactgggtggcacgctttgctgaggaaattctcactgagggagaccaggtcttgatttcagtaatggaacaccattctaatatcattccatggcaggaagcttgtcgaaagactggagcagagcttgtctatgtctatcttaaagacggtgccttggatatggaggatttgcgagctaaattgactgataaggttaaatttgtttccctagctcatgcctccaatgttcttggtgtggtcaatccgatcaaggaaatcactcaattagcccaccaagttggggcaattatggtagtggatggtgctcaatctacacctcatatgaagattgatgtccaggacttggatctggactttttcgccttttcgggtcacaagatggctggtccgactggtatcggtgtcctttacggcaaagaaaagtatcttgagcaaatgtctccagtagaatttggcggcgagatgattgattttgtctacgagcaatttgctagttggaaggaattgccttggaaatttgaggctggaacgccaaatatggcaggagctattggacttgcgactgcagttgattatctggaaaagattggtatggatgccgttgaagctcatgaacaggaattgattgcgtacgtctatccaaaactgcaggcaattgagggattgaccatttacggttctcaggatttggctcaacgttcgggtgttattgcctttaacctaggtgatctccatcctcacgatcttgcgacggctctggattatgaaggagtggctgttcgtgctggtcaccattgtgcgcaacccttgcttcagtatttggaagtcccagcaacagctcgtgcaagtttttatatctacaataccaaggcagattgcgacaaactagtcgatgccctacaaaagacaaaggagtttttcaatggcactttc

SEQ ID NO: 1674 - protein, 408 aa, Streptococcus pneumoniae
  aminotransferase, class-V; Cellular location: cytoplasm; Similar to strain R6 sequence 15902817 (0.E+01)
MLDVEAIRKDFPILDQIVNDEPLVYLDNAATTQKPLVVLKAINSYYEQDNANVHRGVHTLAERATASYEAARETIRKFINAGSTKEVLFTRGTTTSLNWVARFAEEILTEGDQVLISVMEHHSNIIPWQEACRKTGAELVYVYLKDGALDMEDLRAKLTDKVKFVSLAHASNVLGVVNPIKEITQLAHQVGAIMVVDGAQSTPHMKIDVQDLDLDFFAFSGHKMAGPTGIGVLYGKEKYLEQMSPVEFGGEMIDFVYEQFASWKELPWKFEAGTPNMAGAIGLATAVDYLEKIGMDAVEAHEQELIAYVYPKLQAIEGLTIYGSQDLAQRSGVIAFNLGDLHPHDLATALDYEGVAVRAGHHCAQPLLQYLEVPATARASFYIYNTKADCDKLVDALQKTKEFFNGTF

SEQ ID NO: 1675 - DNA, 438 bp, Streptococcus pneumoniae
atggcactttctaaactagatagcctttatatggcagtggtagcagaccattcgaaaaatccacatcaccaagggaagttagaagatgctgagcaaatcagtctcaacaatccgacttgtggggatgtcatcaacctctctgtcaagtttgatgcagaggaccgtttggaagatattgcttttctaaattcaggatgcacgatttcaactgcttctgctagtatgatgacagatgccgttttaggaaaaaccaaacaagaaattttagaactggcgactattttttctgaaatggttcaagggcaaaaagatgagcgtcaagaccaacttggagacgcggcattcttgtcaggtgttgccaaattccctcaaagaatcaagtgtgcaaccctagcttggaatgcccttaagaaaacaattgaaaatcaagaaaaacag

SEQ ID NO: 1676 - protein, 146 aa, Streptococcus pneumoniae
  NifU family protein; Cellular location: cytoplasm; Similar to strain R6 sequence 15902818 (2.E-79)
MALSKLDSLYMAVVADHSKNPHHQGKLEDAEQISLNNPTCGDVINLSVKFDAEDRLEDIAFLNSGCTISTASASMMTDAVLGKTKQEILELATIFSEMVQGQKDERQDQLGDAAFLSGVAKFPQRIKCATLAWNALKKTIENQEKQ

SEQ ID NO: 1677 - DNA, 1410 bp, Streptococcus pneumoniae
atggctgaagaaagagtagaaccaaaaccaattgaccttggtgaatataaatttggtttccatgacgatgtagagcctgtcttatcgacaggaaaaggactcaacgaaggtgttattcgtgaattatctgctgctaagggtgagcctgagtggatgttggagttccgtttgaagtcttatgaaaccttcaaaaaaatgcccatgcaaacttggggagcagacttgtcagagattgactttgatgacttaatctactaccaaaaaccatctgacaaaccagcccgttcttgggatgatgtacctgaaaagattaaagaaacctttgaacgtatcgggattccagaagctgaacgtgcttatttagcaggggcttctgcccagtacgagtcagaagtggtttaccacaacatgaaggaagagttccaaaaattaggtattatctttacagatacagattccgcactcaaggaatacccagacttatttaaacaatactttgcgaagttggtaccgccgacagataacaagttggcagccctcaactcagcagtatggtcgggtggaacttttatctacgtgccaaaaggtgtcaaggtagatattccacttcaaacttatttccgtatcaataacgaaaatataggtcagttcgaacgtaccttgattatcgttgatgagggagcaagcgtctactacgtagaaggatgtacagcaccaacatattcaagcaatagcttacacgctgccattgtagaaatttttgctttggacggagcttatatgcgttatacaactatccaaaactggtctgataacgtctataacttggtaacaaagcgtgctaaggctcaaaaggatgccactgttgagtggattgatggaaacttgggtgccaaaacgactatgaaatatccatctgtttaccttgatggagaaggagcgcgtggtaccatgctctctatcgcctttgctaatgcagggcaacaccaagacacgggtgctaagatgattcacaatgctccacataccagctcgtctattgtgtctaaatccatcgctaaaggtggaggaaaggttgactaccgtggacaagtcacctttaacaagaactctaagaaatctgtttcccacattgaatgtgataccattatcatggatgacttgtcagcatcagatactattccatttaatgaaattcacaactcgcaagtggctttggaacacgaagccaaagtatctaagatttcagaagagcaattgtattatctcatgagccgtggattgtcagaatctgaggcaactgaaatgattgtcatgggatttgtagaaccctttacaaaagaacttccaatggaatacgcagttgagctgaaccgcttgattagctatgaaatggagggatcagttgga

SEQ ID NO: 1678 - protein, 470 aa, Streptococcus pneumoniae
  conserved hypothetical intein-containing protein; Cellular location: cytoplasm; Similar to strain R6 sequence 15902819 (0.E+01)
MAEERVEPKPIDLGEYKFGFHDDVEPVLSTGKGLNEGVIRELSAAKGEPEWMLEFRLKSYETFKKMPMQTWGADLSEIDFDDLIYYQKPSDKPARSWDDVPEKIKETFERIGIPEAERAYLAGASAQYESEVVYHNMKEEFQKLGIIFTDTDSALKEYPDLFKQYFAKLVPPTDNKLAALNSAVWSGGTFIYVPKGVKVDIPLQTYFRINNENIGQFERTLIIVDEGASVYYVEGCTAPTYSSNSLHAAIVEIFALDGAYMRYTTIQNWSDNVYNLVTKRAKAQKDATVEWIDGNLGAKTTMKYPSVYLDGEGARGTMLSIAFANAGQHQDTGAKMIHNAPHTSSSIVSKSIAKGGGKVDYRGQVTFNKNSKKSVSHIECDTIIMDDLSASDTIPFNEIHNSQVALEHEAKVSKISEEQLYYLMSRGLSESEATEMIVMGFVEPFTKELPMEYAVELNRLISYEMEGSVG

SEQ ID NO: 1679 - DNA, 180 bp, Streptococcus pneumoniae
ttgattttatactcttcgaaaatctcttcaaaccacgtcagcatcgccttaccgtatgtatggttactgacttcgtcagtttcatctacaacctcaaaacagtgttttgagcaacctgcggctagcttcctagtttgttctttgattttgagtattagatttactcaaaatcaaggattt

SEQ ID NO: 1680 - protein, 60 aa, Streptococcus pneumoniae
  box element
MILYSSKISSNHVSIALPYVWLLTSSVSSTTSKQCFEQPAASFLVCSLILSIRFTQNQGF

SEQ ID NO: 1681 - DNA, 1239 bp, Streptococcus pneumoniae
atgaaaaaaatatttttaactttgttaactgtctctcttttagggggtgcttctactgctgttgctcaagattttaccattgccgctaaacatgcgattgctgttgaggcaaatactggtaaaattctctatgagaaggatgcaacgcaacctgtcgaaattgcttccataacaaaattgattactgtttatctggtctatgaagctttggaaaacggaagtattaccctctccactcctgtagatatttctgattatccttatcaattgacgacaaattctgaagccagtaatattcctatggaggcccgtaattatactgtcgaagagttgcttgaagcaactctggtatctagtgccaacagcgccgctattgccctagctgagaaaattgctggctcagaaaaagatttcgtcgatatgatgcgggcaaaactcttggaatggggaattcaggatgccactgttgtcaatacgacaggtcttaacaatgaaactctaggggataacatttacccaggttctaaaaaagatgaggaaaataagcttagtgcttatgatgtcgctatcgttgctcgcaacctcatcaaaaaatacccacaagtcttagaaatcaccaaaaaaccttcttctacttttgctgggatgacaatcacttcaaccaactacatgttagaaggtatgcctgcttaccgtggtggttttgatgggctaaaaacaggaacaacagataaggctggagagtcttttgttggtactactgtcgaaaaaggcatgagagtcatcacagttgttttaaatgcagatcatcaagacaataatccttacgctcgatttacagctacatcttccctaatggattatatttcttctacatttacacttcgcaaaatcgttcaacaaggcgatgcctatcaagatagcaaagcccctgtacaagatggaaaagaagatacagtaactgcagtggctccagaggatatctatctaatcgaacgtgttgggaatcaatcttcccaatctgttcaattcacacctgattccaaagcaatcccagcaccacttgaagctggaacagtggttggccatttgacttatgaagacaaggacttgattggtcaaggttacatcaccacagagcgccctagtttcgaaatggtagcagacaagaaaattgaaaaagccttcttcttaaaagtttggtggaatcagtttgtccgctttgttaacgagaaatta

SEQ ID NO: 1682 - protein, 413 aa, Streptococcus pneumoniae
  D-alanyl-D-alanine carboxypeptidase (dacA); Cellular location: outside; Similar to strain R6 sequence 15902820 (0.E+01)
MKKIFLTLLTVSLLGGASTAVAQDFTIAAKHAIAVEANTGKILYEKDATQPVEIASITKLITVYLVYEALENGSITLSTPVDISDYPYQLTTNSEASNIPMEARNYTVEELLEATLVSSANSAAIALAEKIAGSEKDFVDMMRAKLLEWGIQDATVVNTTGLNNETLGDNIYPGSKKDEENKLSAYDVAIVARNLIKKYPQVLEITKKPSSTFAGMTITSTNYMLEGMPAYRGGFDGLKTGTTDKAGESFVGTTVEKGMRVITVVLNADHQDNNPYARFTATSSLMDYISSTFTLRKIVQQGDAYQDSKAPVQDGKEDTVTAVAPEDIYLIERVGNQSSQSVQFTPDSKAIPAPLEAGTVVGHLTYEDKDLIGQGYITTERPSFEMVADKKIEKAFFLKVWWNQFVRFVNEKL

SEQ ID NO: 1683 - DNA, 102 bp, Streptococcus pneumoniae
atgatggttaagagtaaaatttctgtggtccaaaaaaataatttatttctacgaaacatgagttacctcccttactttattttaccatattttcaaaaagct

SEQ ID NO: 1684 - protein, 34 aa, Streptococcus pneumoniae
  hypothetical protein
MMVKSKISVVQKNNLFLRNMSYLPYFILPYFQKA

SEQ ID NO: 1685 - DNA, 1029 bp, Streptococcus pneumoniae
atggggtctttgattaacccttttgttagcgtgcttaatacaattatgattccatttttattagggggctttttttattatttgacaaaccctattgttactttcttaaataaagtctgtaaactcaatcgtttgcttggtattttaattaccttgtgtactttggtctggggaatggtcataggtgttgtctatctcttacctattttgattaatcagttatctagtttgattatatctagtcaaactatttatagtcgagtacaagacttaatcatagacttatctaattatcctgcgctccagaatttggatgtagaagctacaattcagcagttaaacttatcctatgttgatattcttcaaaatatcctaaatagcgtatcaaatagtgtggggagcgtcttgtcagctcttatcagtactgttttgattttgattatgactccagtttttttggtttatttcttattagatggacataaattcttgcccatgcttgaaagaacgattctaaagagggatcgcttgcatattgcaggcttattaaagaatttaaatgcgacgattgctcgctatattagtggagtttcgattgacgcaatcattataggttgtttggcttatattggctatagtattattggtttaaaatatgctttagtttttgccattttttctggtgtagccaatttaattccttatgtggggccaagtattggtttgattcctatgatcatcgcaaatatattcactgatccccatagactgctgattgcagtgatttatatgcttgttgttcagcaggtagatggcaatatcttatatcctcgaatcgtaggaagtgttatgaaggttcatccaatcacgattttagttttacttttgttgtcaagcaatatctatggtgtagttggaatgattgtcgcagtgccaacctattctatcttgaaagaaatttctaagttcttatcccatttgtatgaaaatcataaaataatgaaagaacgagaaagagaattagctaag

SEQ ID NO: 1686 - protein, 343 aa, Streptococcus pneumoniae
  membrane protein; Cellular location: membrane; Similar to strain R6 sequence 15902821 (0.E+01)
MGSLINPFVSVLNTIMIPFLLGGFFYYLTNPIVTFLNKVCKLNRLLGILITLCTLVWGMVIGVVYLLPILINQLSSLIISSQTIYSRVQDLIIDLSNYPALQNLDVEATIQQLNLSYVDILQNILNSVSNSVGSVLSALISTVLILIMTPVFLVYFLLDGHKFLPMLERTILKRDRLHIAGLLKNLNATIARYISGVSIDAIIIGCLAYIGYSIIGLKYALVFAIFSGVANLIPYVGPSIGLIPMIIANIFTDPHRLLIAVIYMLVVQQVDGNILYPRIVGSVMKVHPITILVLLLLSSNIYGVVGMIVAVPTYSILKEISKFLSHLYENHKIMKERERELAK

SEQ ID NO: 1687 - DNA, 105 bp, Streptococcus pneumoniae
gtgactccctttttagcaaaagaatgcaaaggaataccaaagataaaaataaaaaacgttgatttaacaacgttttaccaaggaatgcaaaagaatgcaaaggaa

SEQ ID NO: 1688 - protein, 35 aa, Streptococcus pneumoniae
  hypothetical protein; Cellular location: cytoplasm
MTPFLAKECKGIPKIKIKNVDLTTFYQGMQKNAKE

SEQ ID NO: 1689 - DNA, 738 bp, Streptococcus pneumoniae
gtgttaaaaacagaacgtaaacaactaattttagaggagttaaatcaacatcatgtagtttctctagaaaaattagttagtttgctagaaacgtcagaatcaacggttcgaagagacttggatgagttggaagcggaaaacaagcttcgtcgtgtgcatggtggagcagaactcccctactccttacaggaagaagaaaccattcaagaaaaatctgtcaaaaaccttcaagaaaagaaattgctggctcagaaagcagcctctctcattaaagaaaaagatgtcatctttatcgatgctggaacaacaactgcttttttgattcatgaattggtcaataagaatgttacagttgtgaccaactccattcaccatgccgctcagttggttgaaaagcagattccaactgtcatggttggaggaaacgtcaagacggcgacagatgctagtatcgggggcgttgctcttaaccagattaaccaattgcactttgaccgtgcctttatcggaataaatggtgttgacgatggctattatacgactcctgatatggaggagggagctgtgaaaagagctattttggagaatgccaagcagacctacgtcttggtggattcgtcaaaaattggacaaacttgctttgccaaggtagccccactcaaacgcgctatcgttatcactagtcaagggcatgagctcttgcaggttattaaggagaaaacggaggtaatagaagta

SEQ ID NO: 1690 - protein, 246 aa, Streptococcus pneumoniae
  lactose phosphotransferase system repressor (lacR); Cellular location: cytoplasm; Similar to strain R6 sequence 15902822 (e-133)
MLKTERKQLILEELNQHHVVSLEKLVSLLETSESTVRRDLDELEAENKLRRVHGGAELPYSLQEEETIQEKSVKNLQEKKLLAQKAASLIKEKDVIFIDAGTTTAFLIHELVNKNVTVVTNSIHHAAQLVEKQIPTVMVGGNVKTATDASIGGVALNQINQLHFDRAFIGINGVDDGYYTTPDMEEGAVKRAILENAKQTYVLVDSSKIGQTCFAKVAPLKRAIVITSQGHELLQVIKEKTEVIEV

SEQ ID NO: 1691 - DNA, 909 bp, Streptococcus pneumoniae
atgatttatacagtcacactcaatccatccattgactatatcgttcgtttggaccaagtcaaagttggtagtgtcaatcgtatggacagtgatgataagtttgctggtgggaaaggaatcaatgtcagccgtgtcttgaaacgtttgaatataccaaatacagcgacgggatttatcggtggctttactggtaaatttatcacagatactttagcagaggaagaaatcgagacacgttttgtccaggtggcagaagatactcgtatcaatgttaaaatcaaagcagaccaagaaacagaaatcaacggaacgggtccaactgttgaatcggttcagctagaagaattgaaagctattttatctagtctgacagcagaagatacagttgtctttgcaggttcaagtgctaaaaatctaggcaatgttatctataaggatttgatttccttgacgcgccagactggtgcgcaagtggtctgtgactttgaaggacagaccttaattgatagtttggactaccagcctcttcttgtaaaaccaaacaatcatgaacttggagcgatttttggggttaaactcgaaagtttagatgaaattgagaaatacgctcgtgagttactggctaagggtgctcaaaatgttattatctctatggctggtgatggtgcccttcttgtcacatctgagggagcttacttcgctaaaccaatcaaaggaacagtcaaaaattcagttggagctggtgattctatggttgctggattcacaggtgaatttgtcaaatcaaaagacgtagtagaagccttcaaatggggagtggcttgcggaacggcaactaccttctcagatgacttggcaacggcggaatttattaaagaaacatatggaaaagttgaggtagaaaaacga

SEQ ID NO: 1692 - protein, 303 aa, Streptococcus pneumoniae
  1-phosphofructokinase, putative; Cellular location: cytoplasm; Similar to strain R6 sequence 15902823 (e-168)
MIYTVTLNPSIDYIVRLDQVKVGSVNRMDSDDKFAGGKGINVSRVLKRLNIPNTATGFIGGFTGKFITDTLAEEEIETRFVQVAEDTRINVKIKADQETEINGTGPTVESVQLEELKAILSSLTAEDTVVFAGSSAKNLGNVIYKDLISLTRQTGAQVVCDFEGQTLIDSLDYQPLLVKPNNHELGAIFGVKLESLDEIEKYARELLAKGAQNVIISMAGDGALLVTSEGAYFAKPIKGTVKNSVGAGDSMVAGFTGEFVKSKDVVEAFKWGVACGTATTFSDDLATAEFIKETYGKVEVEKR

SEQ ID NO: 1693 - DNA, 1950 bp, Streptococcus pneumoniae
atgaaaattcaagacctattgagaaaagatgtcatgttgctagatttgcaggcaactgaaaaaacagctgtcatcgacgagatgattaaaaatttgacagaccacggttatgtaacagattttgaaacatttaaagaaggaattttggcgcgtgaagctttgacttctactggtttgggtgatggaatcgcaatgcctcacagcaaaaacgctgctgtcaaagaagcgacagttctatttgctaagtcaaataagggtgttgactacgagagcttggatggacaagcaactgacctcttcttcatgattgcagctccagaaggtgccaatgatactcacttggcagccttggcagaattgtctcaatacttgatgaaagacggttttgcagacaaacttcgtcaagcaacatctgcagaccaagttatcgaactttttgaccaagcttcagaaaaaactgaggaacttgttcaagcacctgctaatgactctggtgactttatcgtagctgttacagcttgtacaacaggtattgcccacacttacatggcccaagaagcccttcaaaaagtagctgctgaaatgggggttggtatcaaggtcgaaaccaacggtgctagcggtgttggaaatcaactaactgcagaagatatccgtaaggctaaagctattatcattgcagcagacaaggccgttgaaatggatcgatttgatggaaaaccattgatcaatcgtccagttgctgacggtatccgtaagacagaagagctaattaacttggctctttcaggagatactgaagtctaccgtgccgctaatggtgccaaagctgcaacagcctctaacgaaaaacaaagccttggtggtgccttgtacaaacacttgatgagtggtgtatctcaaatgttaccattcgttatcggtggtggtatcatgattgcccttgccttcttgattgacggtgctttgggtgttccaaatgaaaaccttggcaatcttggttcttaccatgagttagcttctatgttcatgaaaattggtggagctgcctttggtttgatgcttccagtctttgcgggttatgttgcctactctattgctgaaaaaccgggtttggtagcaggtttcgtggctggtgctattgccaaagaaggttttgcctttggtaaaattccttatgccgcaggtggtgaagcaacttcaactcttgcaggtgtctcatctggtttcctaggtgcccttgttggtggatttatcgcaggtgccttggttcttgccatcaagaaatacgttaaagttcctcgttcactcgaaggtgctaaatcaatccttctattgccacttcttggaacaatcttgacaggatttgttatgctagctgtgaatatcccaatggctgcaatcaacactgctatgaatgacttcctaggcggtcttggaggaggttcagctgtccttcttggtatcgtccttggtggaatgatggctgttgacatgggtggaccagttaataaagcagcttatgtctttggtacaggtacgcttgcagcaactgtttcttcaggtggttctgtagccatggcagcagttatggctggaggaatggtgccaccacttgcaatctttgtcgcaactcttcttttcaaagataaatttactaaggaagaacgtaactctggtttgacaaacatcatcatgggcttgtcatttatcactgagggagcgattccatttggtgccgctgacccagctcgtgcgattccaagcttcatccttggttcagcagtagcaggtggactcgttggtcttactggtatcaaactcatggcgccacacggaggaatcttcgttatcgcccttacttcaaatgctctcctttacctcgtttctgtcttggtaggagcaatcgtaagtggtgtggtttatggttacctacgcaaaccacaagca

SEQ ID NO: 1694 - protein, 650 aa, Streptococcus pneumoniae
  PTS system, fructose specific IIABC components; Cellular location: membrane; Similar to strain R6 sequence 15902824 (0.E+01)
MKIQDLLRKDVMLLDLQATEKTAVIDEMIKNLTDHGYVTDFETFKEGILAREALTSTGLGDGIAMPHSKNAAVKEATVLFAKSNKGVDYESLDGQATDLFFMIAAPEGANDTHLAALAELSQYLMKDGFADKLRQATSADQVIELFDQASEKTEELVQAPANDSGDFIVAVTACTTGIAHTYMAQEALQKVAAEMGVGIKVETNGASGVGNQLTAEDIRKAKAIIIAADKAVEMDRFDGKPLINRPVADGIRKTEELINLALSGDTEVYRAANGAKAATASNEKQSLGGALYKHLMSGVSQMLPFVIGGGIMIALAFLIDGALGVPNENLGNLGSYHELASMFMKIGGAAFGLMLPVFAGYVAYSIAEKPGLVAGFVAGAIAKEGFAFGKIPYAAGGEATSTLAGVSSGFLGALVGGFIAGALVLAIKKYVKVPRSLEGAKSILLLPLLGTILTGFVMLAVNIPMAAINTAMNDFLGGLGGGSAVLLGIVLGGMMAVDMGGPVNKAAYVFGTGTLAATVSSGGSVAMAAVMAGGMVPPLAIFVATLLFKDKFTKEERNSGLTNIIMGLSFITEGAIPFGAADPARAIPSFILGSAVAGGLVGLTGIKLMAPHGGIFVIALTSNALLYLVSVLVGAIVSGVVYGYLRKPQA

SEQ ID NO: 1695 - DNA, 156 bp, Streptococcus pneumoniae
atgaaaagattggaccgtttggtgcagtctttttctcttcccgaaatgcctgtgaaatatggtataatagaagaatggcaaacaagaatacaagtacaacaagacggagaccgtctaaagcagaactggaaagaaaagaagcgattcaacgaatgt

SEQ ID NO: 1696 - protein, 52 aa, Streptococcus pneumoniae
  hypothetical protein
MKRLDRLVQSFSLPEMPVKYGIIEEWQTRIQVQQDGDRLKQNWKEKKRFNEC

SEQ ID NO: 1697 - DNA, 2223 bp, Streptococcus pneumoniae
atgttgatttcgttaggaattgcgattttattgattttcgcagccttcaaattaggggctgcaggtataaccctttataatttaattcgcttgctagtgggtagcctagcttatctggcgatattcggcctattaatctatctcttctttttcaagtggatacgaaaacaggaaggactcttatctggctttttcaccatatttgctggcttactcttgatttttgaggcctacttggtttggaaatatggtttggacaagtccgttctaaaagggaccatggctcaggttgtgacagatctgactggttttcgaacgactagctttgctggagggggcttgatcggggtcgctctttatattccaacagcctttctcttttcaaatatcggaacttactttattggttctatcttgattttagtgggttctctcctagtcagcccttggtctgtttacgatattgctgaatttttcagtagaggctttgccaaatggtgggaagggcacgagcgtcgaaaagaggaacgctttgtcaaacaagaagaaaaagctcgccaaaaggctgagaaagaggctagattagaacaagaagagactgaaaaagccttactcgatttgcctcctgttgatatggaaacgggtgaaattctgacagaggaagctgttcaaaatcttccacctattccagaagaaaagtgggtggaaccagaaatcatcctgcctcaagctgaacttaaattccctgaacaggaagatgactcagatgacgaagatgttcaggtcgatttttcagccaaagaagcccttgaatacaaacttccaagcttacaactctttgcaccagataaaccaaaagatcagtctaaagagaagaaaattgtcagagaaaatatcaaaatcttagaagcaacctttgctagctttggtattaaggtaacagttgaacgggccgaaattgggccatcagtgaccaagtatgaagtcaagccggctgttggtgtaagggtcaaccgcatttccaatctatcagatgacctcgctctagccttggctgccaaagatgtccggattgaagcaccaatccctgggaaatccctaatcggaattgaagtgcccaactccgatattgccactgtatctttccgagaactatgggaacaatcgcaaacgaaagcagaaaatttcttggaaattcctttagggaaggctgttaatggaaccgcaagagcttttgacctttctaaaatgccccacttgctagttgcaggttcaacgggttcagggaagtcagtagcagttaacggcattattgctagcattctcatgaaggcgagaccagatcaagttaaatttatgatggtcgatcccaagatggttgagttatctgtttacaatgatattccccacctcttgattccagtcgtgaccaatccacgcaaagccagcaaggctctgcaaaaggttgtggatgaaatggaaaaccgttatgaactctttgccaaggtgggagttcggaatattgcaggttttaatgccaaggtagaagagttcaattcccagtctgagtacaagcaaattccgctaccattcattgtcgtgattgtggatgagttggctgacctcatgatggtggccagcaaggaagtggaagatgctatcatccgtcttgggcagaaggcgcgtgctgcaggtatccacatgattcttgcaactcagcgtccatctgttgatgtcatctctggtttgattaaggccaatgttccatctcgtgtagcatttgcggtttcatcaggaacagactcccgtacgattttggatgaaaatggagcagaaaaacttcttggtcgaggagacatgctctttaaaccgattgatgaaaatcatccagttcgtctccaaggctcctttatctcggatgacgatgttgagcgcattgtgaacttcatcaagactcaggcagatgcagactacgatgagagttttgatccaggtgaggtttctgaaaatgaaggagaattttcggatggagatgctggtggtgatccgctttttgaagaagctaagtctttggttatcgaaacacagaaagccagtgcgtctatgattcagcgtcgtttatcagttggatttaaccgtgcgacccgtctcatggaagaactggagatagcaggtgtcatcggtccagctgaaggtaccaaacctcgaaaagtgttacaacaa

SEQ ID NO: 1698 - protein, 741 aa, Streptococcus pneumoniae
  stage III sporulation protein E (spoE); Cellular location: membrane; Feature of note: RGD motif; Similar to strain R6 sequence 15902825 (0.E+01)
MLISLGIAILLIFAAFKLGAAGITLYNLIRLLVGSLAYLAIFGLLIYLFFFKWIRKQEGLLSGFFTIFAGLLLIFEAYLVWKYGLDKSVLKGTMAQVVTDLTGFRTTSFAGGGLIGVALYIPTAFLFSNIGTYFIGSILILVGSLLVSPWSVYDIAEFFSRGFAKWWEGHERRKEERFVKQEEKARQKAEKEARLEQEETEKALLDLPPVDMETGEILTEEAVQNLPPIPEEKWVEPEIILPQAELKFPEQEDDSDDEDVQVDFSAKEALEYKLPSLQLFAPDKPKDQSKEKKIVRENIKILEATFASFGIKVTVERAEIGPSVTKYEVKPAVGVRVNRISNLSDDLALALAAKDVRIEAPIPGKSLIGIEVPNSDIATVSFRELWEQSQTKAENFLEIPLGKAVNGTARAFDLSKMPHLLVAGSTGSGKSVAVNGIIASILMKARPDQVKFMMVDPKMVELSVYNDIPHLLIPVVTNPRKASKALQKVVDEMENRYELFAKVGVRNIAGFNAKVEEFNSQSEYKQIPLPFIVVIVDELADLMMVASKEVEDAIIRLGQKARAAGIHMILATQRPSVDVISGLIKANVPSRVAFAVSSGTDSRTILDENGAEKLLGRGDMLFKPIDENHPVRLQGSFISDDDVERIVNFIKTQADADYDESFDPGEVSENEGEFSDGDAGGDPLFEEAKSLVIETQKASASMIQRRLSVGFNRATRLMEELEIAGVIGPAEGTKPRKVLQQ

SEQ ID NO: 1699 - DNA, 531 bp, Streptococcus pneumoniae
ttgtatcatgaaacggagcttgcgacaagaaagggaaatttctctttttttaagatttttttaaagaaacagagtataataaatcataatcaaaggagagaatgtatgtctaactatcgtagaacttcaaaaccaaaaacagaacacatcaaaaaaggctttacagtctttcaaaaaaccgttgctacaatcgctagtatccttggcttgattaccgcaagtatcacgattatgaacgccttggataataacaaaaatattaaaaaagaacctacgacaagccagacgacaaccattgtcaaagaaatccaaaaggaatcccctaaggaaaacaccagtccaactaaagagactaacactagtcaagaaaaaacacagcaagaggaaacaccaaaatctagcgtcaaggaagagaaaaaagaagatcagaaaacagcaactcaggactcttctactcctgcttcaagtaaacctgctactgaaaacgaaaaacagtccaatgcgccaacttcagaaaataaaagcaatcaa

SEQ ID NO: 1700 - protein, 177 aa, Streptococcus pneumoniae
  hypothetical protein; Cellular location: membrane; Similar to strain R6 sequence 15902826 (4.E-98)
MYHETELATRKGNFSFFKIFLKKQSIINHNQRRECMSNYRRTSKPKTEHIKKGFTVFQKTVATIASILGLITASITIMNALDNNKNIKKEPTTSQTTTIVKEIQKESPKENTSPTKETNTSQEKTQQEETPKSSVKEEKKEDQKTATQDSSTPASSKPATENEKQSNAPTSENKSNQ

SEQ ID NO: 1701 - DNA, 1200 bp, Streptococcus pneumoniae
ttgtcgcaagctccgtttcatgatacaatagaggaagtgattttagaaagcgtgagaaacatgatttactttgataattcagcgacgaccaagccttatcctgaagcccttgaaacctatatgcaggtcgcttcaaaaattttaggaaacccatctagtctccatcgtttgggagaccaagcaacacgaatcttagatgcttctcgccaacagattgcagatttaatcggtaagaaaagcgatgaaatcttctttacctcgggtggaacagaaggggataactggcttatcaagggtgtggcctttgaaaaagctcagtttggcaagcacatcattgtttcagccattgaacatccagcagtcaaagagtcagccctctggttgaaaagtcaaggatttgaagtggattttgctccagttgataagaaaggcttggtcgatgttgaggcgttagcaggtttgatacggcatgatacaatcctcgtttccatcatggctgtgaacaatgaaatcggctctatccaacctattgaggctatttcagaattcttggcagacaagccgactatttccttccacgttgatgcggttcaggcgcttgccaaaattccgactgaaaagtatctgacagaacgggtggattgcgcgactttctctagtcacaagttccacggggttcgaggtgttggctttgtctatatcaaatctggcaagaagattacacctcttcttacaggtggtggccaggagcgagattatcgttcgacaactgaaaatgtggcagggattgcagcgacagccaaggccctccgtttgtctatggaaaagctagatatctttaggagcaagactgggcagatgaaggcagtgattcgccaagctcttctgaactatccggatatttttgtcttttcagatgaggaaaactttgcacctcatattctgacttttggaatcaaaggtgttcgaggtgaagtcatcgttcacgcctttgaagactatgatattttcatctcaacaacctcagcttgttcatctaaggcaggaaaaccagccggtaccttgattgccatgggagtggacaaagataaggccaagtcagctgtgcgtcttagcctagacttggaaaatgatatgagtcaggtcgagcagtttttgaccaagttaaaattgatttacaatcaaactagaaaagtaaga

SEQ ID NO: 1702 - protein, 400 aa, Streptococcus pneumoniae
  aminotransferase, class-V; Cellular location: cytoplasm; Similar to strain R6 sequence 15902827 (0.E+01)
MSQAPFHDTIEEVILESVRNMIYFDNSATTKPYPEALETYMQVASKILGNPSSLHRLGDQATRILDASRQQIADLIGKKSDEIFFTSGGTEGDNWLIKGVAFEKAQFGKHIIVSAIEHPAVKESALWLKSQGFEVDFAPVDKKGLVDVEALAGLIRHDTILVSIMAVNNEIGSIQPIEAISEFLADKPTISFHVDAVQALAKIPTEKYLTERVDCATFSSHKFHGVRGVGFVYIKSGKKITPLLTGGGQERDYRSTTENVAGIAATAKALRLSMEKLDIFRSKTGQMKAVIRQALLNYPDIFVFSDEENFAPHILTFGIKGVRGEVIVHAFEDYDIFISTTSACSSKAGKPAGTLIAMGVDKDKAKSAVRLSLDLENDMSQVEQFLTKLKLIYNQTRKVR

SEQ ID NO: 1703 - DNA, 1212 bp, Streptococcus pneumoniae
atgcagtattcagaaattatgattcgctacggagagttgtcaaccaagggtaaaaaccgtatgcgtttcatcaataaacttcgtaataatatttcggacgttttgtctatctatacccaagttaaggtaacagcagatcgcgaccgtgcccacgcttacctcaatggagctgattacacagcagttgcagaatctctcaaacaagtttttggaattcaaaacttttctcctgtttataaggttgaaaaatctgtagaagttttgaagtcttctgtccaagagattatgcgggacatctacaaggaaggtatgacctttaagatttctagcaagcgtagcgaccacaactttgaacttgatagtcgtgaactcaaccaaacacttggaggggctgtattcgaagccattccaaatgtgcaagttcaaatgaaaagtcctgacatcaatcttcaggtggagattcgtgaagaagcagcctatctttcttatgaaaccattcgtggggctggtggtttgccagttggaacttcaggtaaagggatgctcatgttgtcaggagggattgactcacctgtagcaggttatcttgctcttaagcgtggggtggatatcgaggcagttcactttgctagtccaccatatactagtcctggtgccctcaagaaagcgcaggacttgacccgtaaattgaccaagtttggcggaaatatccagtttatagaggtgcctttcacagagattcaagaggaaatcaaagccaaagcgccagaagcttatttgatgactctaactcgtcgctttatgatgcggattactgaccgtattcgtgaggtacgaaatggtttggttatcatcaatggggaaagtctaggtcaagtagccagccaaacccttgaaagtatgaaggctatcaatgctgttaccaacactcccatcattcgtcctgtggttaccatggacaagttggaaatcattgacatcgcccaggaaatcgatacctttgacatttcaatccaaccgtttgaagactgttgtaccatttttgcaccagatcgtccaaaaacaaatcctaaaattaagaatgcggagcagtacgaagcgcgtatggatgttgaaggcttggttgagcgagcagtggctggaatcatgattactgaaatcacacctcaagccgaaaaagatgaagttgatgacttgattgacaatctgctc

SEQ ID NO: 1704 - protein, 404 aa, Streptococcus pneumoniae
  thiazole biosynthesis protein ThiI (thiI); Cellular location: cytoplasm; Similar to strain R6 sequence 15902828 (0.E+01)
MQYSEIMIRYGELSTKGKNRMRFINKLRNNISDVLSIYTQVKVTADRDRAHAYLNGADYTAVAESLKQVFGIQNFSPVYKVEKSVEVLKSSVQEIMRDIYKEGMTFKISSKRSDHNFELDSRELNQTLGGAVFEAIPNVQVQMKSPDINLQVEIREEAAYLSYETIRGAGGLPVGTSGKGMLMLSGGIDSPVAGYLALKRGVDIEAVHFASPPYTSPGALKKAQDLTRKLTKFGGNIQFIEVPFTEIQEEIKAKAPEAYLMTLTRRFMMRITDRIREVRNGLVIINGESLGQVASQTLESMKAINAVTNTPIIRPVVTMDKLEIIDIAQEIDTFDISIQPFEDCCTIFAPDRPKTNPKIKNAEQYEARMDVEGLVERAVAGIMITEITPQAEKDEVDDLIDNLL

SEQ ID NO: 1705 - DNA, 822 bp, Streptococcus pneumoniae
atgaatcaatcctacttttatctaaaaatgaaagaacacaaactcaaggttccttatacaggtaaggagcgccgtgtacgtattcttcttcctaaagattatgagaaagatacagaccgttcctatcctgttgtatactttcatgacgggcaaaatgtttttaatagcaaagagtctttcattggacattcatggaagattatcccagctatcaaacgaaatccggatatcagtcgcatgattgtcgttgctattgacaatgatggtatggggcggatgaatgagtatgcggcttggaagttccaagaatctcctatcccagggcagcagtttggtggtaagggtgtggagtatgctgagtttgtcatggaggtggtcaagccttttatcgatgagacctatcgtacaaaagcagactgccagcatacggctatgattggttcctcactaggaggcaatattacccagtttatcggtttggaataccaagaccaaattggttgcttgggcgttttttcatctgcaaactggctccaccaagaagcctttaaccgctatttcgagtgccagaaactatcgcctgaccagcgcatcttcatctatgtaggaacagaagaagcagatgatacagacaagaccttgatggatggcaatatcaaacaagcctatatcgactcgtcgctttgctattaccatgatttgatagcagggggagtacatctggataatcttgtgctaaaagttcagtctggtgccatccatagtgaaatcccttggtcagaaaatctaccagattgtctgagattttttgcagaaaaatgg

SEQ ID NO: 1706 - protein, 274 aa, Streptococcus pneumoniae
  conserved hypothetical protein; Cellular location: cytoplasm; Similar to strain R6 sequence 15902829 (e-164)
MNQSYFYLKMKEHKLKVPYTGKERRVRILLPKDYEKDTDRSYPVVYFHDGQNVFNSKESFIGHSWKIIPAIKRNPDISRMIVVAIDNDGMGRMNEYAAWKFQESPIPGQQFGGKGVEYAEFVMEVVKPFIDETYRTKADCQHTAMIGSSLGGNITQFIGLEYQDQIGCLGVFSSANWLHQEAFNRYFECQKLSPDQRIFIYVGTEEADDTDKTLMDGNIKQAYIDSSLCYYHDLIAGGVHLDNLVLKVQSGAIHSEIPWSENLPDCLRFFAEKW

SEQ ID NO: 1707 - DNA, 333 bp, Streptococcus pneumoniae
atgcatattgaacatcttagccactggagtggtcatcttaaccgtgaaatgtaccttaaccgttatggacatggtgggattccagttgtggtctttgcttcatcaggtggtagtcacaacgaatactatgattttggcatgattgatgcctgtgcttcctttatcgaggaaggccttgtccagttctttaccctatctagtttggatagtgagagctggttggctacttggaaaaatgctcatgaccaagcggaaatgcaccgtgcctacgaacgttatgtgattgaggaggccattcttttatcaagcacaagacaggttggtttgatggca

SEQ ID NO: 1708 - protein, 111 aa, Streptococcus pneumoniae
  hypothetical protein; Cellular location: cytoplasm; Similar to strain R6 sequence 15902830 (2.E-63)
MHIEHLSHWSGHLNREMYLNRYGHGGIPVVVFASSGGSHNEYYDFGMIDACASFIEEGLVQFFTLSSLDSESWLATWKNAHDQAEMHRAYERYVIEEAILLSSTRQVGLMA

SEQ ID NO: 1709 - DNA, 429 bp, Streptococcus pneumoniae
ttgtttacgccaccattcccagtcatgggcgacatcatgtccccattcagcaaaccaggctggaatttgtttcttgtcaaaggcttctttgagcttgtaaaaggatggcaaaccatcttgttcccaggctccaagccccgtacacagcacaatctctgcctgacggtaacggtcaataaaccagccgtcgttttggttccaaatataatctactggcgagttttggtaaatagcatcatcgttgtagtaatcaccgacaaagaaacgtgcgtcgtaaacaccactgagagcaatcactttggtaaagacatctggatgctggaggaagaaattgagtgcatgataggctcccatagagcaacctgtcgtcatcatgccatcaaaccaacctgtcttgtgcttgataaaagaatggcctcctcaatcaca

SEQ ID NO: 1710 - protein, 143 aa, Streptococcus pneumoniae
  hypothetical protein
MFTPPFPVMGDIMSPFSKPGWNLFLVKGFFELVKGWQTILFPGSKPRTQHNLCLTVTVNKPAVVLVPNIIYWRVLVNSIIVVVITDKETCVVNTTESNHFGKDIWMLEEEIECMIGSHRATCRHHAIKPTCLVLDKRMASSIT

SEQ ID NO: 1711 - DNA, 405 bp, Streptococcus pneumoniae
atgatgacgacaggttgctctatgggagcctatcatgcactcaatttcttcctccagcatccagatgtctttaccaaagtgattgctctcagtggtgtttacgacgcacgtttctttgtcggtgattactacaacgatgatgctatttaccaaaactcgccagtagattatatttggaaccaaaacgacggctggtttattgaccgttaccgtcaggcagagattgtgctgtgtacggggcttggagcctgggaacaagatggtttgccatccttttacaagctcaaagaagcctttgacaagaaacaaattccagcctggtttgctgaatggggacatgatgtcgcccatgactgggaatggtggcgtaaacaaatgccttatttcctcggtaatctctattta

SEQ ID NO: 1712 - protein, 135 aa, Streptococcus pneumoniae
  hypothetical protein; Cellular location: cytoplasm; Similar to strain R6 sequence 15902832 (5.E-84)
MMTTGCSMGAYHALNFFLQHPDVFTKVIALSGVYDARFFVGDYYNDDAIYQNSPVDYIWNQNDGWFIDRYRQAEIVLCTGLGAWEQDGLPSFYKLKEAFDKKQIPAWFAEWGHDVAHDWEWWRKQMPYFLGNLYL

SEQ ID NO: 1713 - DNA, 1164 bp, Streptococcus pneumoniae
atgaattaccttgttatttctccctactatccacaaaactttcaacagtttaccatcgaactagctaataaaggcatcacagtcttgggaattggtcaagagtcttacgagcaattggatgagcccttgcgcaatagcttgaccgagtattttcgtgttgataatcttgagaacatagatgaagtcaaacgtgcagttgcttttctcttttataaacatggtccaattggccgcatcgagtctcacaatgaatactggcttgagctagacgcaacactcagagaacaattcaatgtttttggtgccaaaccagaggatctcaaaaagacgaaatataagtctgaaatgaagaaacttttcaaaaaagcaggtgttcctgtggtacctggagctgttatcaagacggaagcagatgttgatcaagcagtgaaagaaatcggtcttccaatgattgccaaacctgataatggagtgggagcagccgcaacctttaaacttgagacagaagacgatatcaatcacttcaagcaagaatgggaccattcaaccctttatttctttgaaaaatttgtcacttccagcgaaatctgtacctttgacgggctcgtggacaaggatggaaagattgtcttctcaacaacctttgactacgcctatacaccgcttgacctcatgatttataagatggacaattcttattatgtgctcaaggatatggatcctaaactgcgcaagtatggggaagcaattgtcaaagaatttggtatgaaagaacggtttttccatattgagttcttccgtgagggggacgattatattaccatcgagtacaataaccgccctgcaggtggttttaccattgatgtttataactttgctcattccttggacctttatcgtggctatgcagctattgtcgcaggagaggagttcccggcgtcagactttgaaactcagtattgtttggctacttctcgccgtgcaaatgctcactatgtttattcagaagaggatttgcttgccaaatatagccagcagttcaaggttaaaaaagtcatgccagctgccttcgcggaacttcaaggagattacctgtatatgctgaccactccgagtcgacaagaaatggagcagatgattgcagatttcggacaacgtcaagaa

SEQ ID NO: 1714 - protein, 388 aa, Streptococcus pneumoniae
  hypothetical protein; Cellular location: cytoplasm; Similar to strain R6 sequence 15902833 (0.E+01)
MNYLVISPYYPQNFQQFTIELANKGITVLGIGQESYEQLDEPLRNSLTEYFRVDNLENIDEVKRAVAFLFYKHGPIGRIESHNEYWLELDATLREQFNVFGAKPEDLKKTKYKSEMKKLFKKAGVPVVPGAVIKTEADVDQAVKEIGLPMIAKPDNGVGAAATFKLETEDDINHFKQEWDHSTLYFFEKFVTSSEICTFDGLVDKDGKIVFSTTFDYAYTPLDLMIYKMDNSYYVLKDMDPKLRKYGEAIVKEFGMKERFFHIEFFREGDDYITIEYNNRPAGGFTIDVYNFAHSLDLYRGYAAIVAGEEFPASDFETQYCLATSRRANAHYVYSEEDLLAKYSQQFKVKKVMPAAFAELQGDYLYMLTTPSRQEMEQMIADFGQRQE

SEQ ID NO: 1715 - DNA, 156 bp, Streptococcus pneumoniae
atgaaaatcaaagagcaaactaggaagctagccgcaggtttctcaaaacactgttttgaggttgtggatagaactgacagagtcagtatcatatactacggcaaggtgaagctgacgtggtttgaagagattttcgaagagtataaaatattcagg

SEQ ID NO: 1716 - protein, 52 aa, Streptococcus pneumoniae
  box element
MKIKEQTRKLAAGFSKHCFEVVDRTDRVSIIYYGKVKLTWFEEIFEEYKIFR

SEQ ID NO: 1717 - DNA, 1491 bp, Streptococcus pneumoniae
atgattacaggcgaattaaaaaataaaatcgatcagctgtgggaaattctttggacagaaggaaacgcaaatcctttaacaaatattgaacagttgacttatctcttatttatgaaagatttggatagtgtcgagcttggacgtgaaagtgatgctgaatttctagggattccttatgagggagtttttccaaaagataaacctgaataccgttggtcaacttttaaaaatataggagatgctcaggaagtttatcgtttaatgactcaggagatttttccgtttattaaaaatctcaagggggatacagatgatacagccttttcacgatatatgcgagaagctatttttcaaataaataaacctgctacgcttcaaaaggcaatttctatcttagatgtttttccaactaggggattagatgtagattttgataatgacaaacaaagtattactgatatcggagatatctatgaatatctgttatcaaaattgtcgaccgcaggtaaaaatggacagttccgtacacctcgtcacatcatcgatatgatggttgagttgatgcaaccgactatcaaagatatcatctcagatcccgctatgggttctgctggcttcttagtatctgctagccgttacttaaagcgtaagaaagatgaatgggaaaccaatacagataatatcaatcattttcataatcagatgtttcatggaaatgatacggatacgactatgttgagacttggggcgatgaacatgatgctacatggagtagaaaatccacaaatcagttaccttgactcgctgtctcaagataatgaagaagccgataaatatactttggttttagcaaatcctccttttaagggctcacttgactacaattcaacctctaatgaccttcttgcaaccgtaaaaaccaaaaaaacagaattactctttctttctcttttcttgcgaactttaaaaccaggtggacgagcagcagttatcgtacctgatggtgtcctttttggttcgtctaaagctcataaaggaattcgtcaggaaattgtagagaatcataagcttgatgctgtaatctcaatgcctagtggtgtgttcaagccttatgctggagtttcaactgccattctcatctttacaaaaactggtaatggtggtactgacaaagtctggttttacgatatgaaagcggatggtttaagtttggatgataagcgacaaccgattagcgacaatgatattccagatattatcgaacgctttcatcatcttgaaaaagaagcagaacgtcagagaacggatcaatctttctttgttccagttgctgagataaaggaaaatgattatgatttgtctatcaataaatataaagagattgagtatgaaaaagttgagtatgaaccaacagaagtcatattaaagaaaatcaatgatttagaaaaagaaattcaagctggcttggctgaattggaaaaattactcaag

SEQ ID NO: 1718 - protein, 497 aa, Streptococcus pneumoniae
  type I restriction-modification system, M subunit, putative; Cellular location: cytoplasm; Similar to strain R6 sequence 15902834 (0.E+01)
MITGELKNKIDQLWEILWTEGNANPLTNIEQLTYLLFMKDLDSVELGRESDAEFLGIPYEGVFPKDKPEYRWSTFKNIGDAQEVYRLMTQEIFPFIKNLKGDTDDTAFSRYMREAIFQINKPATLQKAISILDVFPTRGLDVDFDNDKQSITDIGDIYEYLLSKLSTAGKNGQFRTPRHIIDMMVELMQPTIKDIISDPAMGSAGFLVSASRYLKRKKDEWETNTDNINHFHNQMFHGNDTDTTMLRLGAMNMMLHGVENPQISYLDSLSQDNEEADKYTLVLANPPFKGSLDYNSTSNDLLATVKTKKTELLFLSLFLRTLKPGGRAAVIVPDGVLFGSSKAHKGIRQEIVENHKLDAVISMPSGVFKPYAGVSTAILIFTKTGNGGTDKVWFYDMKADGLSLDDKRQPISDNDIPDIIERFHHLEKEAERQRTDQSFFVPVAEIKENDYDLSINKYKEIEYEKVEYEPTEVILKKINDLEKEIQAGLAELEKLLK

SEQ ID NO: 1719 - DNA, 1119 bp, Streptococcus pneumoniae
atgaaaaaagtgaagttgggggaagtcttatctctaaaaaaaggcaagaaagccactgtacttgctgaacaaacaactctaagccaacgttatattcaaatagatgatttaagaaataataataatttaaaattcactgaaagtttaaatatgactgaagcactcccagatgatattctgatagcatgggatggagctaatgcaggaacagttggttatggattatcgggagctgttggtagtacaattacggtcttaaaaaagaatgagcgatacaaagaaaaaattatatcagattacttgggagtctttttggaaagtaaatcgcagtatttacgagatcattcaacaggtgcaacaattcctcatttaaacaagaatatattacttgatttacaattagaattgctaggtatcgaagaacaagagaacattatctgtattcttaatacgattaaaaggcttattactaaaagaaaatttcagttagatgaactaaacttgctcgtcaaatcccgatttaacgagatgtttggggaaaataaaatatttgaaagcattgataacttatttgatattatagatggtgataggggcaaaaattatcctaaatcagatgagttgtttagtgaggagtactgtttatttttaaatacaaagaatgttactaaaaacggattttcattcgatacaaagcaatttatcactaaaacaaaggataaattacttcgaaaaggcaaacttgagcgttatgatatagtcttgacaacaagaggtactgttggaaatgtagcgtactacgatgaattaataaaatataaacatttacgtataaattcaggtatggtaatattacgtcccaagacaccaaatctaaatcagaaatttattatccatgttttaaggaataataattatagtcgagtgatatcaggaagtgctcagcctcagttaccaattacaaaattaaaaaaaatacttctccccctccccccactagccctccaaaatgagttcgcagactttgtagtccaggtcgacaaatcacaattggcaatccaaaaatctctggaagaacttgaaactttgaagaaatctctgatgcaggagtattttggc

SEQ ID NO: 1720 - protein, 373 aa, Streptococcus pneumoniae
  type I restriction-modification system, S subunit, putative; Cellular location: cytoplasm; Similar to strain R6 sequence 15902835 (1.E-96)
MKKVKLGEVLSLKKGKKATVLAEQTTLSQRYIQIDDLRNNNNLKFTESLNMTEALPDDILIAWDGANAGTVGYGLSGAVGSTITVLKKNERYKEKIISDYLGVFLESKSQYLRDHSTGATIPHLNKNILLDLQLELLGIEEQENIICILNTIKRLITKRKFQLDELNLLVKSRFNEMFGENKIFESIDNLFDIIDGDRGKNYPKSDELFSEEYCLFLNTKNVTKNGFSFDTKQFITKTKDKLLRKGKLERYDIVLTTRGTVGNVAYYDELIKYKHLRINSGMVILRPKTPNLNQKFIIHVLRNNNYSRVISGSAQPQLPITKLKKILLPLPPLALQNEFADFVVQVDKSQLAIQKSLEELETLKKSLMQEYFG

SEQ ID NO: 1721 - DNA, 234 bp, Streptococcus pneumoniae
atggtagtaaaaacaagaaaacaaggaaattcaatcaccattacgattccaagtgaatttaatattccaagtggtgttaaatacgaagcgaaattgttaccaagtggtgagattatctttactcctgaagaattggggcagcaggtttcttatgtatctgatgatgcctttgacttaaatttagataaaatatttgacgaatacgacgatgttttcaaagctttggtggaaaaa

SEQ ID NO: 1722 - protein, 78 aa, Streptococcus pneumoniae
  hypothetical protein; Cellular location: cytoplasm
MVVKTRKQGNSITITIPSEFNIPSGVKYEAKLLPSGEIIFTPEELGQQVSYVSDDAFDLNLDKIFDEYDDVFKALVEK

SEQ ID NO: 1723 - DNA, 411 bp, Streptococcus pneumoniae
atgacaatctatttgacagaaaagcaaattgaaaaaataaatgctttagcaattcaacggtattctccaaatgagaaaattcaaacagttagtccttctgccttaaatatgattgtgaacttaccagaacaatttgtctttgggaagcctctttatccaacaatttttgataaagcaacgatactatttgtccaattgataaagaagcatgtttttgctaatgctaataaaagaactgctttcttcgttttggtcaaatttttacaattaaacggctatcgtttttctgtaacggtagaagaagcagtaaaaatgtgtgtaaccatcgcagtagaagctttaactgatgaaaaaatgacaagctactccaaatggatttctgaacattctgttagagaaaaggtcaaaaag

SEQ ID NO: 1724 - protein, 137 aa, Streptococcus pneumoniae
  hypothetical protein; Cellular location: cytoplasm
MTIYLTEKQIEKINALAIQRYSPNEKIQTVSPSALNMIVNLPEQFVFGKPLYPTIFDKATILFVQLIKKHVFANANKRTAFFVLVKFLQLNGYRFSVTVEEAVKMCVTIAVEALTDEKMTSYSKWISEHSVREKVKK

SEQ ID NO: 1725 - DNA, 963 bp, Streptococcus pneumoniae
atggaatcaaaagttacaattatcatgcaagaaatgttacctcttttaaataatgaacaattactagcgttgagagagagtttagaacatcatctagtagacggaaaaaagcagcagaagtattcgaataataacctgttgcaactatttattaccgccaagcaggtagagggctgtagctcaaaaacaattcgttattatcagaggacgattgaaaacttgtttaatgctattaaagagtctgtgacacaactcacaacagatgatttaaggagttatttagcaaattaccagtctgaaaaggattgtagtaaggcaaatttagacaatattaggcgtatattgtcttctttttttgcttggcttgagcaagaggaatatatcattaaaaatcccattcgacggataaagaaaattaagactgagcaaaatgtgaaggaaacttatactgatgaacatttggaaattatgcgtgataactgtgaaaatttgagagatttggcaataatagacctactagcatcgacaggtatgcgtgtaggggagcttgtacagttgaatcgttcagatattgattttgaaaacagagagtgtgttgtctttggtaaaggaaagaaggagagaccagtatattttgacgctcgtacgaaaattcatttaagaaattatcttaacgacagaaaagatagtcaccctgctctttttgtaacgctagttggaaaagtccagaggcttggaattgctggtgtagagattcgcttaagaaagttaggagacaaactcggcatacaaaaggttcacccacataagttcagaagaactttagcgactaaggcaattgataaaggtatgcctatcgaacaagtccaaaaactgctaggtcatagcaagattgacacaaccttggcctatgccatggtcaatcaaaataatgtcaagcattcacaccaaaaattcatctct

SEQ ID NO: 1726 - protein, 321 aa, Streptococcus pneumoniae
  integrase/recombinase, phage integrase family; Cellular location: cytoplasm; Similar to strain R6 sequence 15903090 (4.E-14)
MESKVTIIMQEMLPLLNNEQLLALRESLEHHLVDGKKQQKYSNNNLLQLFITAKQVEGCSSKTIRYYQRTIENLFNAIKESVTQLTTDDLRSYLANYQSEKDCSKANLDNIRRILSSFFAWLEQEEYIIKNPIRRIKKIKTEQNVKETYTDEHLEIMRDNCENLRDLAIIDLLASTGMRVGELVQLNRSDIDFENRECVVFGKGKKERPVYFDARTKIHLRNYLNDRKDSHPALFVTLVGKVQRLGIAGVEIRLRKLGDKLGIQKVHPHKFRRTLATKAIDKGMPIEQVQKLLGHSKIDTTLAYAMVNQNNVKHSHQKFIS

SEQ ID NO: 1727 - DNA, 657 bp, Streptococcus pneumoniae
atgccatggtcaatcaaaataatgtcaagcattcacaccaaaaattcatctcttaaaagcaaatcccgatttaacgagatgtttggggaaaataaaatatttgaaagcattgataacttatttgatattatagatggtgataggggcaaaaattatcctaaatcagatgagttgtttagtgaggagtactgtttatttttaaatacaaagaatgttactaaaaacggattttcattcgatacaaagcaatttatcactaaaacaaaggataaattacttcgaaaaggcaaacttgagcgttatgatatagtcttgacaacaagaggtactgttggaaatgtagcgtactacgatgaattaataaaatataaacatttacgtataaattcaggtatggtaatattacgtcccaagacaccaaatctaaatcagaaatttattatccatgttttaaggaataataattatagtcgagtgatatcaggaagtgctcagcctcagttaccaattacaaaattaaaaaaaatacttctccccctccccccactagccctccaaaatgagttcgcagactttgtagtccaggtcgacaaatcacaatttgcttgtgagatagctataaaagtgtggagaaatagcttgaaatttagtataata

SEQ ID NO: 1728 - protein, 219 aa, Streptococcus pneumoniae
  type I restriction-modification system, S subunit, putative; Cellular location: cytoplasm; Similar to strain R6 sequence 15902492 (9.E-07)
MPWSIKIMSSIHTKNSSLKSKSRFNEMFGENKIFESIDNLFDIIDGDRGKNYPKSDELFSEEYCLFLNTKNVTKNGFSFDTKQFITKTKDKLLRKGKLERYDIVLTTRGTVGNVAYYDELIKYKHLRINSGMVILRPKTPNLNQKFIIHVLRNNNYSRVISGSAQPQLPITKLKKILLPLPPLALQNEFADFVVQVDKSQFACEIAIKVWRNSLKFSII

SEQ ID NO: 1729 - DNA, 3348 bp, Streptococcus pneumoniae
atgggaaattttagctttcttttaaaaaatgacgaatatgaatctttttcaaaaccttgcattgaagctgagaatatgattgctacatcaactgtggctactgcctttatggcgcgtcgtgctttagagcaggctgtccattggatatatagtcacgattcatatttagaagctccctatcgtgctactctatcttctttagtatgggatgatgattttagggatatcgtagattctgaactccacaagcagatagttctgttgattcggtggggaaaccatgctgctcatggtggtgaaattaaggaacgagaagcgattttagctttgcatcatttgtatcagtttgttaattttatcgattattgttacagcaatgagtttgtggagcgttattttgatgagaagtgcttaccactttcagcaaacatcaaataccgagaaactccacaatctatgataaagttacaagacagtttaccagaactgcctgattttcatgaacagatggctgctcagtccgtagaagttcaagagacttatactgaaaaacgtgagactgcagcgcaacggcaagatgtgcctttccatattgatcaattatctgaggcagagacaagaaagctctttattgatatcgatctccgtttagcaggatggatatttgaagaaaactgtcgtgttgagatagccgttgatggtctcaagcacggttcaggaattggttactgtgactatgtactttatggtaaaaatgggaaaattttagcgattgtggaggctaaaaaagcctctgtcaatccagaagtaggggaagtacaggtcaaagaatatgctgaagctttggagaaacatatcggctatcagccaatttgctttattacaaatgggttgaagcactatatacttgatggtccgaaccgccgccagattgcaggcttttactctcaagaagaattgcaattagtgatggatagacgtcatcttcaaaaaccgcttgaggatatttctagtaaaattagggacgatatttccgggcgtcactaccaaaaacatgccattgcaagcgtttgtgaagctttctctgatcatcgtagacaggcacttttggttatggcaactggggcggggaaaactcgtacagcagtttctctagttgatatcttatcacgtcataactgggtaaaaaacgttctcttcttagccgatagaacttccttggttaagcaagcatatgattcgtttagaaaattactcccagatctttccgtttgtaacttcttagaagataaagaaggagctcaatcaagtcgcatggtcttttcaacttatccgaccatgattggagcgattagtggtcaagaagaagtaaatcaacgccctttcactgttgggcattttgaccttatcataattgacgaatctcaccgttctatttatcagaaatacaagtccatttttgattattttgatgcaagaattgtaggcttaacagctactccgcgtcaagatttagataaaaacacctatggattctttaatttggagaatggggttccaacatatgcatatgatttggaagaggctgttaaagacggatatttagtagcctatcattctatcgaaaccaaactgaaactacctacggatggtctacattatgatgatttgtccgaagaagaaaaggaacattttgatagcaaatttgaagacaatagctgtgaaaaagatattgatgggagtgtatttaattcctttattttcaataaaagtacagtagaaattgttttaaatgaactcatgacaagaggaattcagacagcctcgggtgatgaaattggtaaaactattatttttgctaaaaatcatgatcatgcggaatatatcagaggtatttttaacaaccgctatcctgaaaaagggagcgactatgctcaggtgattgattatagtattaagcattatcagaccttgattgatgattttaaaattaaggagaagtatcctcaaattgcgatttctgtcgatatgttagatacaggtattgatgtaccagaggttgttaatttagtcttcttcaagaaagtacgctctaaaactaagttttggcagatgattggtcgaggaacccgtctatgtaaagatttatttggacctgagcaggataaggaaaacttcttggtatttgattatggggacaattttgattattttcgtgcagatccaagagatggagagggtcgtcacattgtttcgctgactcagcgtttatttaatatcaaagtggacttgattcgagaacttcagggactccaataccaagaagatcagtttgcgagagcataccgtcagcagcttgtctcggaacttcaaggtcgtatagagagcttaaatgagttggacttcagggttcgtatggttttagatacagtttatagctataggaaattggaaagttggcagaatctaactgctgttacaagtgaaaccattcaaaaaaatctctctccgcttttatttgatgaagataaagaagatgagatggcgaggagatttgatttgtggttgcttcatattcagttggggcaactgacagctaaatcttccactgttcatatttcccaagtgatgaagacggctagagctctttctgctattggcaatatcccgcaggtttttgagcaggctgaaattatcaggaaagtacaggagcctgaattttggaaagaagttaacttgtctgatttggaaaaaattcgtcttgctattcgagatttattacagtttttggataaaacagaccgtaaaccctactatgttaactttgaagatcgtatactctccactgttcacgagaccacagcatttttgcaggtcaacgatcttcggtcttacaatgaaaaagttgagcattatttgaaaactcatctggatgaggagtccatttctaagctataccataataaaaagttgacatctgatgatatgcttgcacttgaaaaattgctttgggaaaaattaggtagtaaagcagactaccaaagtcattatgaaaataaggcaattccgagattggttcgtgagattattggcttagatagagagtctgccaatcgtattttttctaaatttttgtcggatgagaatcttaatgccaggcagatttcatttgtaaaattgattgtagactacattgtagaaaatggttttttagagacgaaagtgttaacgcaagagccgtttaaatcttatggttctgttcaactactcttccaacaccaactaccagtacttcgtaatattgttcaaatcattgaacttatcaataatcgagctggagaagcggct

SEQ ID NO: 1730 - protein, 1116 aa, Streptococcus pneumoniae
  type I restriction-modification system, R subunit, putative; Cellular location: cytoplasm; Similar to strain R6 sequence 15902836 (0.E+01)
MGNFSFLLKNDEYESFSKPCIEAENMIATSTVATAFMARRALEQAVHWIYSHDSYLEAPYRATLSSLVWDDDFRDIVDSELHKQIVLLIRWGNHAAHGGEIKEREAILALHHLYQFVNFIDYCYSNEFVERYFDEKCLPLSANIKYRETPQSMIKLQDSLPELPDFHEQMAAQSVEVQETYTEKRETAAQRQDVPFHIDQLSEAETRKLFIDIDLRLAGWIFEENCRVEIAVDGLKHGSGIGYCDYVLYGKNGKILAIVEAKKASVNPEVGEVQVKEYAEALEKHIGYQPICFITNGLKHYILDGPNRRQIAGFYSQEELQLVMDRRHLQKPLEDISSKIRDDISGRHYQKHAIASVCEAFSDHRRQALLVMATGAGKTRTAVSLVDILSRHNWVKNVLFLADRTSLVKQAYDSFRKLLPDLSVCNFLEDKEGAQSSRMVFSTYPTMIGAISGQEEVNQRPFTVGHFDLIIIDESHRSIYQKYKSIFDYFDARIVGLTATPRQDLDKNTYGFFNLENGVPTYAYDLEEAVKDGYLVAYHSIETKLKLPTDGLHYDDLSEEEKEHFDSKFEDNSCEKDIDGSVFNSFIFNKSTVEIVLNELMTRGIQTASGDEIGKTIIFAKNHDHAEYIRGIFNNRYPEKGSDYAQVIDYSIKHYQTLIDDFKIKEKYPQIAISVDMLDTGIDVPEVVNLVFFKKVRSKTKFWQMIGRGTRLCKDLFGPEQDKENFLVFDYGDNFDYFRADPRDGEGRHIVSLTQRLFNIKVDLIRELQGLQYQEDQFARAYRQQLVSELQGRIESLNELDFRVRMVLDTVYSYRKLESWQNLTAVTSETIQKNLSPLLFDEDKEDEMARRFDLWLLHIQLGQLTAKSSTVHISQVMKTARALSAIGNIPQVFEQAEIIRKVQEPEFWKEVNLSDLEKIRLAIRDLLQFLDKTDRKPYYVNFEDRILSTVHETTAFLQVNDLRSYNEKVEHYLKTHLDEESISKLYHNKKLTSDDMLALEKLLWEKLGSKADYQSHYENKAIPRLVREIIGLDRESANRIFSKFLSDENLNARQISFVKLIVDYIVENGFLETKVLTQEPFKSYGSVQLLFQHQLPVLRNIVQIIELINNRAGEAA

SEQ ID NO: 1731 - DNA, 468 bp, Streptococcus pneumoniae
atgaataaatcagaacaccgccaccaacttatacgcgctcttatcacaaaaaacaagattcatacacaggctgagttgcaagcccttcttgctgagaacgacattcaagtaacccaggcaaccctctcacgcgacatcaaaaatatgaacctatcaaaagtccgcgaagaagatagcgcttattatgttcttaacaatggttccatctcaaaatgggaaaaacgtctcgaactctacatggaagacgcccttgtctggatgcgcccagttcaacaccaagtcctactaaaaacccttcctggactggctcaatcctttggttctatcattgatactttgagcttccctgacgctatcgctaccctttgtggtaatgatgtctgtcttatcatctgtgaagatgcagatactgctcaaaagtgctttgaagaactgaaaaaattcgccccaccatttttctttgaagaa

SEQ ID NO: 1732 - protein, 156 aa, Streptococcus pneumoniae
  transcriptional repressor, putative; Cellular location: cytoplasm; Similar to strain R6 sequence 15902837 (3.E-87)
MNKSEHRHQLIRALITKNKIHTQAELQALLAENDIQVTQATLSRDIKNMNLSKVREEDSAYYVLNNGSISKWEKRLELYMEDALVWMRPVQHQVLLKTLPGLAQSFGSIIDTLSFPDAIATLCGNDVCLIICEDADTAQKCFEELKKFAPPFFFEE

SEQ ID NO: 1733 - DNA, 2271 bp, Streptococcus pneumoniae
atgcgttttaatcaatatagttatatcaattttccaaaagaaaatgtcttatctgaactaaaaaaatgtggctttgatttacaaaatacagccaatcacaaagactcacttgaaacctttttacgtcgtttctttttcacttatcaagacaccaactacccactttctatcctagcagctgataaaaaaacagacctgctgacattttttcaatcagaagatgaactgacagcagatattttttatactgttgcttttcaacttttaggcttttcttatttggttgacttcgaagatagtgacgtttttcgtaaagaaactggatttcccattatatatggtgacttgattgaaaatctctatcagttactcaatactcgcaccaaaaaaggaaatactcttatcgaccaacttgttagtgatggtcttattccggaggataatgactaccactactttaacggcaagagtttggctactttttctaaccaggatgtcattcgtgaagtcgtttacgttgagtctcgtgtcgatactgaccaaaaagggctatcagacctagtaaaggttagcattattcgccctcgttttgatggaaaaatccctgccatcatgacagccagcccttatcatcagggaaccaatgacaaggctagtgacaaggctctctacaagatggagggcgagcttgaggttaagcttcctcacaagattgagctagagaaacctcaactaaatctcgtccaaccccaaggtaaagctgagcttatagcagaggctgaggaaaagctaactcacatcaactctagctatacactaaacgactacttccttccgagaggctttgccaatctctatgtctcaggtgttggtaccaaagactcgacaggtttcatgactaatggagactaccagcaaatcgaggcttataaaaatgtcatcgattggcttaacggtcgttgccgtgcctttactgatcacacgcgccagcgtcaagtcaaggctgattggtcaaacggaaaagttgctacaacaggactttcctatctaggtaccatgtccaatggtcttgcgactacaggagtcgatggtttagaagttatcattgccgaggcaggaatttcatcatggtacaactactaccgtgaaaacggtctggtgactagcccaggtggttatccaggtgaggactttgactcccttgctgagttaacctattctcgtaatctcttagctggcgactatatccgtggcaatgaagctcaccaagctgacttagaaaaagtgaaagctcagctagaccgaaaaactggggactacaatcagttttggcatgaccgcaattatctgctcaatgcccataaagtaaaggcagaggttgtctttactcatggttctcaggattggaatgtcaaaccacttcatgtttaccagatgttccatgctcttcctactcatatacacaagcatctctttttccataatggtgcccatgtttacatgaacaattggcaatcaattgacttccgtgagtccataaatgccttattgaccaagaaattactaggacaggaaacagactttcaacttcctactgttatctggcaggacaatacagctccacagacttggttatcacttgataacttcggtgggcaagaaaactgtgaaaccttctcacttggtcaagaagagcaagctattcaaaaccagtacccagataaggattttgagcgctatggtaagacataccaaaccttcaatacagagctctatcaagggaaagccaatcagattactattaaccttcctgtgactaaagatctccacctaaacggtcgcgctcagctcaatcttcgtatcaaatccagtacaaacaaggggctcttatctgcccaactgctagaatttgggcaaaagaaatacctacaaccttatccagctattttaagtgctagaaccattgacaacggtcgctatcacatgttggaaaatctctgtgaattgccatttagaccagaggcacaacgagtcgtgacaaaaggttaccttaatttacaaaatagaaatgatttactgttagtagaggatattactgcagatgaatggatggacgttcaatttgaactgcagccaactatttacaagctaaaagaaggagacactctccgtttagtcctctatactactgactttgaaatcaccatccgtgacaatacagactaccacttgactgtcgacctcgctcagtccatgcttaccttaccttgc

SEQ ID NO: 1734 - protein, 757 aa, Streptococcus pneumoniae
  X-pro dipeptidyl-peptidase (pepX); Cellular location: cytoplasm; Similar to strain R6 sequence 15902838 (0.E+01)
MRFNQYSYINFPKENVLSELKKCGFDLQNTANHKDSLETFLRRFFFTYQDTNYPLSILAADKKTDLLTFFQSEDELTADIFYTVAFQLLGFSYLVDFEDSDVFRKETGFPIIYGDLIENLYQLLNTRTKKGNTLIDQLVSDGLIPEDNDYHYFNGKSLATFSNQDVIREVVYVESRVDTDQKGLSDLVKVSIIRPRFDGKIPAIMTASPYHQGTNDKASDKALYKMEGELEVKLPHKIELEKPQLNLVQPQGKAELIAEAEEKLTHINSSYTLNDYFLPRGFANLYVSGVGTKDSTGFMTNGDYQQIEAYKNVIDWLNGRCRAFTDHTRQRQVKADWSNGKVATTGLSYLGTMSNGLATTGVDGLEVIIAEAGISSWYNYYRENGLVTSPGGYPGEDFDSLAELTYSRNLLAGDYIRGNEAHQADLEKVKAQLDRKTGDYNQFWHDRNYLLNAHKVKAEVVFTHGSQDWNVKPLHVYQMFHALPTHIHKHLFFHNGAHVYMNNWQSIDFRESINALLTKKLLGQETDFQLPTVIWQDNTAPQTWLSLDNFGGQENCETFSLGQEEQAIQNQYPDKDFERYGKTYQTFNTELYQGKANQITINLPVTKDLHLNGRAQLNLRIKSSTNKGLLSAQLLEFGQKKYLQPYPAILSARTIDNGRYHMLENLCELPFRPEAQRVVTKGYLNLQNRNDLLLVEDITADEWMDVQFELQPTIYKLKEGDTLRLVLYTTDFEITIRDNTDYHLTVDLAQSMLTLPC

SEQ ID NO: 1735 - DNA, 3126 bp, Streptococcus pneumoniae
gtgagaaggatagaggagaagtgtaaattgatcgcacaactagatacaaaaacagtctatagttttatggaaagcgtcatttcgatcgaaaagtatgtgagagcagctaaagaatacggctacactcatttggctatgatggatattgacaatctttatggcgctttcgactttctagagattacaaaaaaatacggcattcatcctttgctagggcttgaaatgacagtgtttgtagatgatcagggagtgaatttgcgctttttagctctatctagtgtgggctatcagcagttgatgaagctttcgacagccaagatgcagggggagaaaacttggtcagtcctgtcccagtacctggaggatatcgcggtcattgtgccttattttgatagagttgagtcgttagaactaggctgtgattactatataggggtttatccagaaacactagcaagcgaatttcatcatcctatcttacctctttatcgggtcaacgcttttgaaagcagggatagagaagttcttcaagttttaacagcgattaaagaaaatctaccgctcagagaagttcccttgcgttcgagacaagatgtctttatatcagcaagttctttagagaaactattccaagagcgttttccgcaagctttggacaatttagaaaagcttatttcaggcatttcttacgacttggatactagtctgaaactgcctcgttttaatccagctagaccagcagtagaggagttgagagagcgtgctgaactggggcttgttcagaaggggttgactagtaaagaatatcaagatagactagaccaagaattgtctgttattcatgatatgggctttgatgattatttcttggttgtttgggatttgttgcgttttggacaatcgaatggctattatatgggaatgggaaggggttctgcagtaggcagtttggtttcttatgccttagacatcacggggattgacccagtagagaaaaatctgatttttgaacgctttcttaatcgtgaacgctataccatgcctgatattgatattgatatcccagatatttatcgtccagattttatcagatatgttggtaataaatatggtagtaaacatgcggcacaaatcgttactttttcaacctttggagccaagcaagctcttcgagatgtcttgaaacgctttggtgtgccagagtatgaattatctgcaattactaagaaaatcagttttcgtgacaatcttaagtcggcctatgagggaaatctccagtttcgtcagcaaatcaatagtaagttagaataccaaaaagcttttgagattgcttgcaagatagagggctatccaaggcaaacctctgtccatgcggctggtgttgtaattagtgaccaagatttaaccaactacattcctctaaagtatggtgatgaaattccactgactcagtatgatgctcatggagttgaggctagcggacttttgaagatggactttctgggactacgaaatttgacctttgtccagaagatgcaagagttgcttgctgaaacagaaggtattcatctgaaaattgaagaaatcgatttagaagacaaagaaacgttagctttatttgcctctggtaatacaaaaggtatctttcaatttgagcaaccaggtgccattcgtctgcttaagcgtgtgcaaccagtctgttttgaagatgtcgtcgcgactacttctctaaatcgaccgggtgctagtgactatatcaataattttgtggcaagaaagcatgggcaggaagaagtgactgttctggatccagtactggaggatattttggctccaacctacggcataatgctctatcaggagcaggttatgcaggttgcccagcgacttgccggatttagtcttgggaaagccgatattttgcgtcgggctatggggaaaaaggatgcctctgccatgcatgagatgagggcttcctttattcaaggttcattagaagctggtcatactgtggaaaaagcagagcaggtctttgatgttatggagaagtttgcaggttatggttttaacaggtcacacgcctatgcctactcagccttggccttccagttggcttatttcaaaacgcattatccagccattttttatcaggtcatgttaaattcttccaacagtgattacttaatagatgcacttgaagcaggttttgaagtagcctctctatccatcaacaccattccctatcacgataaaattgccaacaaggccatctatctaggtttgaaatccattaaaggagtcagtaatgatttagctctctggattattgaaaatagaccttattctaacattgaagattttatagctaaattacctgagaattatctgaaacttcctctgctagaacctttggtaaaagttggtcttttcgattcatttgaaaaaaatcgtcaaaaagtatttaataacttagctaatctatttgaatttgtgaaagagttgggaagtttgtttggagatgctatttatagttggcaggaatcggaagattggacggaacaagaaaaattttatatggaacaagagcttttagggataggtgtcagcaaacatccactacaagctattgcaagtaaggctatttacccgattaccccaatcggaaatttgtcagaaaatagctatgctattatcttggttgaagttcagaaaataaaagtgattcgtaccaaaaagggtgaaaatatggccttcttacaggcagatgatagtaagaaaaaattggatgtcactctcttttcagacttatatcgtcaggttggacaggaaataaaagagggagccttctactatgtaaaaggaaaaatacaatcacgtgatggccgtctgcaaatgattgcacaagaaataagagaagcagttgctgaacgcttttggatacaggtgaaaaatcatgaatcggatcaagaaatttcacgcattttagaacaatttaaaggcccaatcccagtcatcatccggtatgaagaggaacagaaaaccatcgtttctccccatcattttgtagctaaatccaatgaattagaggagaaattgaatgaaatcgttatgaaaacgatttatcgc

SEQ ID NO: 1736 - protein, 1042 aa, Streptococcus pneumoniae
  DNA polymerase III, alpha subunit (dnaE); Cellular location: cytoplasm; Similar to strain R6 sequence 15902839 (0.E+01)
MRRIEEKCKLIAQLDTKTVYSFMESVISIEKYVRAAKEYGYTHLAMMDIDNLYGAFDFLEITKKYGIHPLLGLEMTVFVDDQGVNLRFLALSSVGYQQLMKLSTAKMQGEKTWSVLSQYLEDIAVIVPYFDRVESLELGCDYYIGVYPETLASEFHHPILPLYRVNAFESRDREVLQVLTAIKENLPLREVPLRSRQDVFISASSLEKLFQERFPQALDNLEKLISGISYDLDTSLKLPRFNPARPAVEELRERAELGLVQKGLTSKEYQDRLDQELSVIHDMGFDDYFLVVWDLLRFGQSNGYYMGMGRGSAVGSLVSYALDITGIDPVEKNLIFERFLNRERYTMPDIDIDIPDIYRPDFIRYVGNKYGSKHAAQIVTFSTFGAKQALRDVLKRFGVPEYELSAITKKISFRDNLKSAYEGNLQFRQQINSKLEYQKAFEIACKIEGYPRQTSVHAAGVVISDQDLTNYIPLKYGDEIPLTQYDAHGVEASGLLKMDFLGLRNLTFVQKMQELLAETEGIHLKIEEIDLEDKETLALFASGNTKGIFQFEQPGAIRLLKRVQPVCFEDVVATTSLNRPGASDYINNFVARKHGQEEVTVLDPVLEDILAPTYGIMLYQEQVMQVAQRLAGFSLGKADILRRAMGKKDASAMHEMRASFIQGSLEAGHTVEKAEQVFDVMEKFAGYGFNRSHAYAYSALAFQLAYFKTHYPAIFYQVMLNSSNSDYLIDALEAGFEVASLSINTIPYHDKIANKAIYLGLKSIKGVSNDLALWIIENRPYSNIEDFIAKLPENYLKLPLLEPLVKVGLFDSFEKNRQKVFNNLANLFEFVKELGSLFGDAIYSWQESEDWTEQEKFYMEQELLGIGVSKHPLQAIASKAIYPITPIGNLSENSYAIILVEVQKIKVIRTKKGENMAFLQADDSKKKLDVTLFSDLYRQVGQEIKEGAFYYVKGKIQSRDGRLQMIAQEIREAVAERFWIQVKNHESDQEISRILEQFKGPIPVIIRYEEEQKTIVSPHHFVAKSNELEEKLNEIVMKTIYR

SEQ ID NO: 1737 - DNA, 1005 bp, Streptococcus pneumoniae
atgaaacgtattgctgttttgactagtggtggagacgcccctggtatgaacgctgccatccgtgcagttgttcgtcaagcaatttcagaaggaatggaagtttttggtatctatgacggatatgctggtatggttgccggtgaaattcatcccctagatgcagcttcagtaggggacatcatttctcgtggtggtactttccttcactcagctcgttacccagagttcgctcaacttgaagggcaacttaaagggattgagcaattgaaaaaacacggaattgaaggtgtagttgttatcggtggtgacggatcttaccacggcgctatgcgtttgactgaacatggcttcccagctattggtcttccaggtacaatcgataacgatatcgttggtactgactttacaatcggttttgacacagcggttactactgccatggacgctatcgataagattcgtgatacatcatcaagtcaccgtcgtacttttgtaatcgaagttatgggacgtaacgctggtgatatcgctctttgggctggtattgcaactggtgctgatgaaatcatcatccctgaagcaggcttcaagatggaagatatcgtagcaagcatcaaagctggttatgaatgtggtaaaaaacacaatattatcgtcttagctgaaggtgtgatgtcagcggctgaatttggtcaaaaacttaaagaagctggagatacaagcgaccttcgtgtaacagaacttggacatattcaacgtggtggttctccaactgcgcgtgaccgtgttttggcgtcacgtatgggtgcacatgctgttaaacttcttaaagaaggtatcggtggtgttgcggttggtattcgtaacgaaaaaatggttgaaaatccaattcttggtactgcagaagaaggggcattgtttagccttactgcagaaggtaagattgtggttaacaacccacacaaagccgatattgagctatctagcttgaataagagcttgtca

SEQ ID NO: 1738 - protein, 335 aa, Streptococcus pneumoniae
  6-phosphofructokinase (pfk); Cellular location: cytoplasm; Similar to strain R6 sequence 15902840 (0.E+01)
MKRIAVLTSGGDAPGMNAAIRAVVRQAISEGMEVFGIYDGYAGMVAGEIHPLDAASVGDIISRGGTFLHSARYPEFAQLEGQLKGIEQLKKHGIEGVVVIGGDGSYHGAMRLTEHGFPAIGLPGTIDNDIVGTDFTIGFDTAVTTAMDAIDKIRDTSSSHRRTFVIEVMGRNAGDIALWAGIATGADEIIIPEAGFKMEDIVASIKAGYECGKKHNIIVLAEGVMSAAEFGQKLKEAGDTSDLRVTELGHIQRGGSPTARDRVLASRMGAHAVKLLKEGIGGVAVGIRNEKMVENPILGTAEEGALFSLTAEGKIVVNNPHKADIELSSLNKSLS

SEQ ID NO: 1739 - DNA, 1503 bp, Streptococcus pneumoniae
atgaacaaacgtgtaaaaatcgttgcaactttgggtcctgcggtagaaatccgtggtggtaaaaaattcggtgaggacggatactggggtgaaaaacttgatgttgaagcttcagctaaaaacattgctaaattgattgaagctggtgctaacacattccgattcaacttctcacacggcgaccaccaagaacaaggtgagcgtatggcaactgttaaacttgcggaaaaaattgcaggtaaaaaagttggtttccttcttgatacaaaaggacctgaaatccgtacagaattgttcgaaggtgaagctaaagaatattcatacaaaactggtgaaaaaattcgtgttgcaactaaacaaggaatcaaatcaactcgtgaagtgattgcgttgaacgttgctggtgctcttgatatctatgatgatgttgaagttggtcgtcaagttttggttgacgatggtaaacttggtcttcgtgtggttgctaaagatgatgcaactcgtgaatttgaagttgaagttgaaaacgatggtatcatcgctaaacaaaaaggtgtgaacatccctaacactaaaattcctttcccagctcttgctgaacgcgataacgacgatatccgtttcggtcttgaacaaggtatcaacttcatcgcaatttcattcgtacgtactgcaaaagatgtgaacgaagttcgtgcaatctgtgaagaaactggaaacggacatgttcaattgttcgctaaaatcgaaaaccaacaaggtatcgataacttagatgaaatcatcgaagcagctgatggtattatgattgctcgtggtgatatgggtatcgaagtaccgttcgaaatggttccagtttatcaaaaaatgattatcaagaaagtcaatgctgcaggtaaagttgttatcactgcaacaaacatgcttgaaacaatgactgaaaaaccacgtgcaactcgttcagaagtatcagatgtattcaacgctgttatcgacggaactgacgctacaatgttgtcaggcgagtctgcaaacggtaaatacccactcgagtcagtaactacaatggctacaatcgacaagaacgctcaagctcttcttaatgaatacggacgtcttgattcagattcatttgagcgtaactctaagacagaagtaatggcttctgctgttaaagatgctactagctcaatggatatcaaattggttgtaactcttactaagacaggtcatactgcacgtttgatttctaaataccgtccaaatgctgacatcttagcattgacatttgacgaattgacagaacgtggcttgatgttgaactggggtgttatcccaatgttgacagatgctccatcttcaactgacgatatgttcgaaatcgctgaacgtaaagcggtagaagcaggtctcgttgagtcaggcgatgatatcgttatcgttgctggtgtgccagtaggagaagctgttcgcacaaacacaatgcgtatccgcacagtacgt

SEQ ID NO: 1740 - protein, 501 aa, Streptococcus pneumoniae
  pyruvate kinase (pyk); Cellular location: cytoplasm; Feature of note: RGD motif; Similar to strain R6 sequence 15902841 (0.E+01)
MNKRVKIVATLGPAVEIRGGKKFGEDGYWGEKLDVEASAKNIAKLIEAGANTFRFNFSHGDHQEQGERMATVKLAEKIAGKKVGFLLDTKGPEIRTELFEGEAKEYSYKTGEKIRVATKQGIKSTREVIALNVAGALDIYDDVEVGRQVLVDDGKLGLRVVAKDDATREFEVEVENDGIIAKQKGVNIPNTKIPFPALAERDNDDIRFGLEQGINFIAISFVRTAKDVNEVRAICEETGNGHVQLFAKIENQQGIDNLDEIIEAADGIMIARGDMGIEVPFEMVPVYQKMIIKKVNAAGKVVITATNMLETMTEKPRATRSEVSDVFNAVIDGTDATMLSGESANGKYPLESVTTMATIDKNAQALLNEYGRLDSDSFERNSKTEVMASAVKDATSSMDIKLVVTLTKTGHTARLISKYRPNADILALTFDELTERGLMLNWGVIPMLTDAPSSTDDMFEIAERKAVEAGLVESGDDIVIVAGVPVGEAVRTNTMRIRTVR

SEQ ID NO: 1741 - DNA, 177 bp, Streptococcus pneumoniae
ttgatactcttcgaaaatctcttcaaaccacgtcagcgtcgccttaccgtatatatgttactgacttcgtcagttctatctacaacctcaaagcagtgctttgagcaacctgcggctagcttcctagtttgctctttgattttcattgagtatgaaataagatatgcacaaattgat

SEQ ID NO: 1742 - protein, 59 aa, Streptococcus pneumoniae
  box element
MILFENLFKPRQRRLTVYMLLTSSVLSTTSKQCFEQPAASFLVCSLIFIEYEIRYAQID

SEQ ID NO: 1743 - DNA, 252 bp, Streptococcus pneumoniae
ttgggtactaagataggtataagtaaaaacaccattagaaattatgaaaaaagggttaggtctactaagaaaaatactatatttgacttagttaaagtattcagtagcttgatcgatgccctctttcctccagttcaaaaggattctcctagcgatatccaatctatctacgaccaacgggaaccacccagacaaggtaaagttctgacctatgccgagaggcaactgtatgatcagaaaaacgaagtatcg

SEQ ID NO: 1744 - protein, 84 aa, Streptococcus pneumoniae
  transcriptional repressor, degenerate
MGTKIGISKNTIRNYEKRVRSTKKNTIFDLVKVFSSLIDALFPPVQKDSPSDIQSIYDQREPPRQGKVLTYAERQLYDQKNEVS

SEQ ID NO: 1745 - DNA, 870 bp, Streptococcus pneumoniae
atgaagaaatcaagaaaattagccacattaggaatctgttcagccttgtttttaggcttggctgcttgtcaacaacaacatgctacttctgaggggacgaatcaaaggcaaagcagttcagcgaaagttccatggaaagcttcatacaccaacctaaacaaccaggtaagtacagaagaggtcaaatctctcttatcagctcacttggatccaaatagtgttgatgcattttttaatctcgttaatgactataataccattgtcggctcaactggcttatcaggagatttcacttcctttactcacaccgaatacgatgttgagaaaatcagtcatctctggaatcaaaagaagggcgattttgttgggaccaactgccgtatcaatagttattgtcttttgaaaaattcagtcaccattccaaagcttgaaaagaatgaccagttgcttttcctagataatgatgcgattgataaaggaaaggtctttgattcacaagataaggaagagtttgatattctattttcgagagttccaactgagtcaactacagatgtcaaggttcacgctgaaaagatggaagcattcttctcacaatttcaattcaatgaaaaagctcgaatgctgtctgtagtcttgcacgacaatttggatggcgagtatctgtttgtaggccacgttggggtcttagtacctgctgatgacggtttcttatttgtagagaaattgactttcgaagagccctaccaagcgattaaatttgctagtaaggaagattgctacaagtatttgggcaccaagtatgcggattatacaggcgagggactggctaagccttttatcatggataatgataagtgggttaaactt

SEQ ID NO: 1746 - protein, 290 aa, Streptococcus pneumoniae
  conserved hypothetical protein; Cellular location: lipoprotein; Similar to strain R6 sequence 15902843 (e-169)
MKKSRKLATLGICSALFLGLAACQQQHATSEGTNQRQSSSAKVPWKASYTNLNNQVSTEEVKSLLSAHLDPNSVDAFFNLVNDYNTIVGSTGLSGDFTSFTHTEYDVEKISHLWNQKKGDFVGTNCRINSYCLLKNSVTIPKLEKNDQLLFLDNDAIDKGKVFDSQDKEEFDILFSRVPTESTTDVKVHAEKMEAFFSQFQFNEKARMLSVVLHDNLDGEYLFVGHVGVLVPADDGFLFVEKLTFEEPYQAIKFASKEDCYKYLGTKYADYTGEGLAKPFIMDNDKWVKL

SEQ ID NO: 1747 - DNA, 162 bp, Streptococcus pneumoniae
atgacagtaatcttaggatttttatttctatttttgataagttggtgggttatttcaatcgttaatagccagaaaccacgcaaaaatgaaacatttattggctatgtccaaagatacgatattgatgggaatggctatcaatcattaccgtgtcctcagaac

SEQ ID NO: 1748 - protein, 54 aa, Streptococcus pneumoniae
  hypothetical protein
MTVILGFLFLFLISWWVISIVNSQKPRKNETFIGYVQRYDIDGNGYQSLPCPQN

SEQ ID NO: 1749 - DNA, 90 bp, Streptococcus pneumoniae
atgaaacatttattggctatgtccaaagatacgatattgatgggaatggctatcaatcattaccgtgtcctcagaactgagaggagttct

SEQ ID NO: 1750 - protein, 30 aa, Streptococcus pneumoniae
  hypothetical protein, fusion
MKHLLAMSKDTILMGMAINHYRVLRTERSS

SEQ ID NO: 1751 - DNA, 267 bp, Streptococcus pneumoniae
atgaattatgaagcaagtaaacaactaactgatgcacgatttaaacgtcttgttggtgttcagcgcacgacttttgaagagatattagctgtattaaaaacagcttatcaacttaaacacgcaaaaggtggacgaaaacctaaattaagcctagaagaccttcttatggccactcttcaatatgtgcgagaataccgcacttatgaagaaattgcggctgattttggtattcacgaaagcaacttaatccgtcggagccaatgggtt

SEQ ID NO: 1752 - protein, 89 aa, Streptococcus pneumoniae
  IS1381, transposase OrfA, truncation POINT MUTATION; Cellular location: cytoplasm; Similar to strain R6 sequence 15903122 (7.E-46)
MNYEASKQLTDARFKRLVGVQRTTFEEILAVLKTAYQLKHAKGGRKPKLSLEDLLMATLQYVREYRTYEEIAADFGIHESNLIRRSQWV

SEQ ID NO: 1753 - DNA, 309 bp, Streptococcus pneumoniae
atggaattaaaagattttacagaaaaagaacaggaaatgattaagaaaaggcttacaatgtctaatattagtgacaaagaaactactgagaagattctggcgctagtcccacaagacttgattaagcgaatcccgttttttgtcagaaaacatgctacaacacgtacgattaaacgcatttcaattgaataccctgaactctacgctgtagctcaaacaagtggtgagattccagaaaaaaaacgcgaagaattgcgtcagattatcacaactatctttgaacaaaagatgaataagcatagtattaag

SEQ ID NO: 1754 - protein, 103 aa, Streptococcus pneumoniae
  hypothetical protein; Cellular location: cytoplasm; Similar to strain R6 sequence 15902846 (2.E-53)
MELKDFTEKEQEMIKKRLTMSNISDKETTEKILALVPQDLIKRIPFFVRKHATTRTIKRISIEYPELYAVAQTSGEIPEKKREELRQIITTIFEQKMNKHSIK

SEQ ID NO: 1755 - DNA, 594 bp, Streptococcus pneumoniae
atgaaaaaatattttattggcggtttgggaagcaatgcctatcatagcaaggattttcttcaagaactagattcgcaggtctattttctaaatccatatgaaaagcatcttcgagatgaaacagaattgaaatcatggtttaaaaatgaaattgtagaggaagaatctatctgtctgataggccattctcttggaggagatttagctcgttatttcgcatcggaatttgaagaagtaaagaaactgattcttttggatggtggctatctagatttagataagattttacctttggatacagagttagaggaaactaaaaattatatcaaatctcaaattgtttcggacttagatgttcttacttctaaagaaaaatctgaagcaaagcattggtcagaaaatatggagaaagctgtaagacagtcttatcactggaatgttgagtataatagatatgagttggctataaattatgaaaatatagaagcgatactccgctacggagaaaaatacaagcttttaagagagaagtgggagataccttgtttattagtcctcgctatcctaatgaagctacatggagagaggaagccc

SEQ ID NO: 1756 - protein, 198 aa, Streptococcus pneumoniae
  hypothetical protein; Cellular location: cytoplasm; Similar to strain R6 sequence 15902847 (4.E-92)
MKKYFIGGLGSNAYHSKDFLQELDSQVYFLNPYEKHLRDETELKSWFKNEIVEEESICLIGHSLGGDLARYFASEFEEVKKLILLDGGYLDLDKILPLDTELEETKNYIKSQIVSDLDVLTSKEKSEAKHWSENMEKAVRQSYHWNVEYNRYELAINYENIEAILRYGEKYKLLREKWEIPCLLVLAILMKLHGERKP

SEQ ID NO: 1757 - DNA, 183 bp, Streptococcus pneumoniae
gtgggagataccttgtttattagtcctcgctatcctaatgaagctacatggagagaggaagccctaaaagaattgccagactattttgatactatttttttagaaaactttggccatgagctttatactcaagcacctaaagaaatcgctagtctaatgaatgagtggctcgcttattttcta

SEQ ID NO: 1758 - protein, 61 aa, Streptococcus pneumoniae
  hypothetical protein; Cellular location: cytoplasm; Similar to strain R6 sequence 15902847 (2.E-31)
MGDTLFISPRYPNEATWREEALKELPDYFDTIFLENFGHELYTQAPKEIASLMNEWLAYFL

SEQ ID NO: 1759 - DNA, 813 bp, Streptococcus pneumoniae
atgattcgatttttagttttagctggctattttgaactgactatttacctccatctgtcgggcaaactaaaccagtacatcaacatgcactattcctatctggcctatatctccatggtgctttcttttatcttggctatcgttcaattgtatatctggatgaagcaagtcaaaacccacagtcatctgaacagccgattagccaagataacgagtatttctcttctggctattccacttgtcatcggcttaactttcccaactgttagcttggattctcagactgtttctgctaaaggttatcatttccccctatcggaaggaacggatctagccattcagacaagcgaagggacgacaagccaatatttgaaaccagataccagttcttatttttcaaaatcagcctatgaaaaggaaatgcgaacggcggcggataaatacttatcccaagatagtattcagatcactaatgaaaactatatggaagtcatggaggctatctacgactatccagatgagtttgagggcaagacaatccagtttacaggctttgtctataacgaccccagtcatgccaatagtcaatttctgttccgattcggcattatccactgtatcgcagattctggtgtctatggattgctgaccaagggcaatacccggcagtatgaaaacaacacttggataacagccaaaggaaaactggtcaatcactaccataaagaactcaaacaaaaccttccaaccttggaaatcgacagctttaccaaagtcgataaaccagaaaatccctatgtatatagagctttt

SEQ ID NO: 1760 - protein, 271 aa, Streptococcus pneumoniae
  conserved hypothetical protein; Cellular location: membrane; Similar to strain R6 sequence 15902848 (e-157)
MIRFLVLAGYFELTIYLHLSGKLNQYINMHYSYLAYISMVLSFILAIVQLYIWMKQVKTHSHLNSRLAKITSISLLAIPLVIGLTFPTVSLDSQTVSAKGYHFPLSEGTDLAIQTSEGTTSQYLKPDTSSYFSKSAYEKEMRTAADKYLSQDSIQITNENYMEVMEAIYDYPDEFEGKTIQFTGFVYNDPSHANSQFLFRFGIIHCIADSGVYGLLTKGNTRQYENNTWITAKGKLVNHYHKELKQNLPTLEIDSFTKVDKPENPYVYRAF

SEQ ID NO: 1761 - DNA, 903 bp, Streptococcus pneumoniae
atgactgcttttcaacaactcccatctagtgtacttcaaactggagccatttttctctccattatcattgaagcccttcccttcgttctgataggaagcattgtctcagggctgattgaagtttatatcacacctgacaaggtttatcattttctccctcgaaatcgttgggggagaatcttttttgggacctttgtcggtatacttttcccttcttgtgaatgtggaatcgtccccatcatcaatcgttttctggaaaaaaaggttccaagttacacggccgttccttttcttgtgacagcacctgttatcaatcccattgttctttttgcgacctattctgcctttggcaactccttccatgtcgccctattacgagctctgggttccattcttgtggctgtaatactaggaatttttctaggatttttctggcaagaaccgattcagaaagaaaatcgtctggcttgtcatgagcatgatttttcttacttgagttctgcaaaaaaagtttttcaagtctttgtgcaggccattgatgaattttttgatacggggcgttatttggtatttggctgcctctttgcttctataatacaggtctacgttccgactcggattctgacctctatcagtgcgacccctctttttgccatcctgctcttgatgattttagcctttcttctttcgctctgtagtgaggcggatgcctttataggtgcttctcttctctcgagtttcggtttggcaccagttctggcctttctcgtcattggtccaatgctggatatcaaaaatattctcatgatgaaaaattacttgaaagcacgatttatcagtcacttcataacaattgtaactcttgtcgtcttagtctattctctcttgattggagttatccta

SEQ ID NO: 1762 - protein, 301 aa, Streptococcus pneumoniae
  conserved hypothetical protein; Cellular location: membrane; Similar to strain R6 sequence 15902849 (e-168)
MTAFQQLPSSVLQTGAIFLSIIIEALPFVLIGSIVSGLIEVYITPDKVYHFLPRNRWGRIFFGTFVGILFPSCECGIVPIINRFLEKKVPSYTAVPFLVTAPVINPIVLFATYSAFGNSFHVALLRALGSILVAVILGIFLGFFWQEPIQKENRLACHEHDFSYLSSAKKVFQVFVQAIDEFFDTGRYLVFGCLFASIIQVYVPTRILTSISATPLFAILLLMILAFLLSLCSEADAFIGASLLSSFGLAPVLAFLVIGPMLDIKNILMMKNYLKARFISHFITIVTLVVLVYSLLIGVIL

SEQ ID NO: 1763 - DNA, 129 bp, Streptococcus pneumoniae
atggctgtcaaatttacaaaacgagacgacttggacaagatgtttgaagagtttgctaaactccctgatttgaaacaagttactttccctgatgacaaagagaaaaaagtcaaagcagaaaagaaaaac

SEQ ID NO: 1764 - protein, 43 aa, Streptococcus pneumoniae
  hypothetical protein; Cellular location: cytoplasm
MAVKFTKRDDLDKMFEEFAKLPDLKQVTFPDDKEKKVKAEKKN

SEQ ID NO: 1765 - DNA, 1365 bp, Streptococcus pneumoniae
ttgttacatcaaggagataaaaatagtttattagagtctttgtcaatagtggagagacaaacattaaaagatatagaagttattattgtaaatcaatctacagaggagatagcttccattagccaacagatgaatctatcatttaatattaagattatagatgagaattcttttgctgagttgtctgatatgattacaggagattatattacgtttctatcttcaaatgattcattatttgattggacatttgaaaagatgtatcatgcgataaaattatccgattctgatgttgttcttggtcattttgctgatttggttgatggagtattttacttttatcctttttggggggataattggttgacagaaaatttaacgaatgttcaagttttacaaaagatggatgatacagatcatcgaattagaaaacaatatcgctcattatttggaaaattattcaatagtaagcttttacgaaaaataaatcaatttgatataaacaaccttatttggagactttatattcactctaaaactgcaacctatattaatttcccgacatatatctataaacctgttatagatgctaaacctctaaaagactcctacaaaatcatattagaaaattatgaaaatagaatcaaagattgcgccgtcttagaaaactatgatatagaaagagcgaaaaaacaatatattcaagaattggcaaattttagtgcttggttaaaaaatgacggtgaatatttagattctgatattgtttatcataagttaatagctgcagagaaaggaattttcccttttcttgagcttgatagattagattttacgattataagtaataattgtgttggaggattaatttataaacagcttggttttcaatatagaacaccttttgttggtttatttattcttcctgatgattattataaacttacaaagcattttcgttattatatggaacaagaacttgttttcgaagaggaacttatttcaccgagctggactcatgaagtttatcctttggggcacttaggagatatagatattcattttctacattattctagtattgaagaagcacgaactaagtgggaaaaaagaaaaaaacgcataaattggaataatctttattttaaatttgataataaagattcagctagtgaagaaattttaaataagatggataatcttccttattctaataaattaattttagtcaatcgtccatataaaaatttgaaaagtcaatgtgttattccaggtcaggaacatcttccagaactggctattatgtctgatccattaaatacttttgatatcatggcttggttaaaaaaaggtggcaatgctctt

SEQ ID NO: 1766 - protein, 455 aa, Streptococcus pneumoniae
  capsular polysaccharide biosynthesis protein, putative; Cellular location: cytoplasm; Similar to strain R6 sequence 15902851 (0.E+01)
MLHQGDKNSLLESLSIVERQTLKDIEVIIVNQSTEEIASISQQMNLSFNIKIIDENSFAELSDMITGDYITFLSSNDSLFDWTFEKMYHAIKLSDSDVVLGHFADLVDGVFYFYPFWGDNWLTENLTNVQVLQKMDDTDHRIRKQYRSLFGKLFNSKLLRKINQFDINNLIWRLYIHSKTATYINFPTYIYKPVIDAKPLKDSYKIILENYENRIKDCAVLENYDIERAKKQYIQELANFSAWLKNDGEYLDSDIVYHKLIAAEKGIFPFLELDRLDFTIISNNCVGGLIYKQLGFQYRTPFVGLFILPDDYYKLTKHFRYYMEQELVFEEELISPSWTHEVYPLGHLGDIDIHFLHYSSIEEARTKWEKRKKRINWNNLYFKFDNKDSASEEILNKMDNLPYSNKLILVNRPYKNLKSQCVIPGQEHLPELAIMSDPLNTFDIMAWLKKGGNAL

SEQ ID NO: 1767 - DNA, 2145 bp, Streptococcus pneumoniae
ttgtggtataatagatttatggataaaaaatatgaaaaaatctctcaggatttgggagtgacgttaaagcaaattgataccgttctaagtttgacagctgaaggggcgactattccctttatcgcgcgttatcgcaaggacatgactggtagtctggatgaggtggcgattaaggctattattgatttggataaaagtctgacaaatctcaatgaccgtaaggaagctgtcttagctaagattcaagaacaaggtaagttgaccaaggaattggaagaagctatcttagttgccgaaaaattagcagacgttgaagaactctatcttccttataaggaaaagcgtcgtaccaaggcaaccattgcccgtgaagctggactctttcctcttgctcgcttgattttgcagaatatagttgacttagagaaagaagctgaaaagttcgtctgtgaaggatttgcgactggcaaggaagccttgaccggtgcagttgatattttggtcgaagccttatcggaagatgtgaccttgcgttctatgacttatcaggaagtgctgagacactctaaacttacttctcaagccaaggatgaaagtcttgatgaaaagcaggtttttcagatttattatgatttttcagagacagttggaactatgcaaggctatcgtaccttggctctcaatcgtggggagaaacttggtgtcttgaagatcggttttgaacatgcgacggaccgtattcttgccttctttgctactcgtttcaaggtgaaaaatgcttatattgatgaagttgttcagcaatccgttaagaaaaaggtcttgcctgctatcgagcgtcgtattcggacagaattaactgagaaagctgaagaaggagctatccaacttttttctgacaatctgcgcaatctcctcttggttgctccactgaaagggcgcgtggttcttggatttgacccagcctttcgtacaggtgccaagctagctgtcgtggatgcaacaggaaaaatgctgacaactcaggttatttatcctgttaaaccagcatcagctcgtcaaatcgaagaagccaagaaagatttagcagatttaattggtcaatacggtgtagagattattgccattggaaatggaacggccagtcgtgaaagtgaagcttttgtagcggaagttctgaaagatttccctgaagtcagctatgttatcgttaatgaaagtggtgcttctgtctattctgccagcgaacttgctcgtcaggagtttccagacttgaccgttgaaaaacgctctgccatttctatcgcccgtcgtttgcaagatcctcttgcggaattggtcaaaatcgatcctaagtcaattggtgtcggtcaataccaacacgatgtcagtcagaagaaactatctgagagtctggactttgttgtcgatacagtggttaaccaagttggtgtcaatgtcaatacagctagcccagctcttctttcacacgtagctggactcaacaaaactatctctgaaaatattgtcaaataccgcgaggaagaaggaaaaatcacttcacgcgcccaaatcaagaaagttcctcgtctgggagccaaggcctttgagcaggctgctggtttccttcgtatccctgaaagtagcaatatccttgataatacaggagttcacccagagaattacactgcagttaaggaactcttcaaacgtttagatattaaagacctaaacgaagaagcccaaagcaaactcaagtcgctttcagtcaaggaaatggcgcaagagttagaccttggtccagaaactcttaaagatatcattgcagatcttctcaaaccaggtcgagatttccgtgattcctttgacgcacctgtgcttcgccaagatgtcctagatatcaaggacttagtggttggacaaaagctagaaggagtggtgcgtaacgttgttgatttcggtgcttttgttgatatcggaattcatgaggacggtctcatccatatttcccatatgagtcgcaagtttatcaaacaccctagtcaagtggtggcagttggagatttggtgagcgtttgggttaagaaaattgatactgaacgtgaaaaagttaatctgtctctcctagctccaaatgaaactgac

SEQ ID NO: 1768 - protein, 715 aa, Streptococcus pneumoniae
  transcriptional regulator, putative; Cellular location: cytoplasm; Similar to strain R6 sequence 15902852 (0.E+01)
MWYNRFMDKKYEKISQDLGVTLKQIDTVLSLTAEGATIPFIARYRKDMTGSLDEVAIKAIIDLDKSLTNLNDRKEAVLAKIQEQGKLTKELEEAILVAEKLADVEELYLPYKEKRRTKATIAREAGLFPLARLILQNIVDLEKEAEKFVCEGFATGKEALTGAVDILVEALSEDVTLRSMTYQEVLRHSKLTSQAKDESLDEKQVFQIYYDFSETVGTMQGYRTLALNRGEKLGVLKIGFEHATDRILAFFATRFKVKNAYIDEVVQQSVKKKVLPAIERRIRTELTEKAEEGAIQLFSDNLRNLLLVAPLKGRVVLGFDPAFRTGAKLAVVDATGKMLTTQVIYPVKPASARQIEEAKKDLADLIGQYGVEIIAIGNGTASRESEAFVAEVLKDFPEVSYVIVNESGASVYSASELARQEFPDLTVEKRSAISIARRLQDPLAELVKIDPKSIGVGQYQHDVSQKKLSESLDFVVDTVVNQVGVNVNTASPALLSHVAGLNKTISENIVKYREEEGKITSRAQIKKVPRLGAKAFEQAAGFLRIPESSNILDNTGVHPENYTAVKELFKRLDIKDLNEEAQSKLKSLSVKEMAQELDLGPETLKDIIADLLKPGRDFRDSFDAPVLRQDVLDIKDLVVGQKLEGVVRNVVDFGAFVDIGIHEDGLIHISHMSRKFIKHPSQVVAVGDLVSVWVKKIDTEREKVNLSLLAPNETD

SEQ ID NO: 1769 - DNA, 150 bp, Streptococcus pneumoniae
atggattacggtttgtaccatccttgcccaatagtaactccaagccaatcaagctctatcgttgccaatcctgccagcaaaggtatcagcgtaagcgtaggattgatacccaacgctatcgctgtggactttgtcgaggaaagttgctat

SEQ ID NO: 1770 - protein, 50 aa, Streptococcus pneumoniae
  hypothetical protein
MDYGLYHPCPIVTPSQSSSIVANPASKGISVSVGLIPNAIAVDFVEESCY

SEQ ID NO: 1771 - DNA, 447 bp, Streptococcus pneumoniae
atgaaactgactgattacgtcaagcaggtttcactagaagacttcggcagaccttttatccatcatgtccagtggaataggcgtctacgttcgacaggtgggcgatttttccccaaagatgggcatttggattttaatcccaaggtttatcaggaactggggttggacgtttttaggaaaattgtccgacatgaactctgtcattatcacctctattttcaagggaaaggctatcaacacaaggatcgggattttaaggaactgttgaaagcagtggatggattacggtttgtaccatccttgcccaatagtaactccaagccaatcaagctctatcgttgccaatcctgccagcaaaggtatcagcgtaagcgtaggattgatacccaacgctatcgctgtggactttgtcgaggaaagttgctattagtaaatcagcctgaggac

SEQ ID NO: 1772 - protein, 149 aa, Streptococcus pneumoniae
  conserved hypothetical protein; Cellular location: cytoplasm; Similar to strain R6 sequence 15902853 (2.E-86)
MKLTDYVKQVSLEDFGRPFIHHVQWNRRLRSTGGRFFPKDGHLDFNPKVYQELGLDVFRKIVRHELCHYHLYFQGKGYQHKDRDFKELLKAVDGLRFVPSLPNSNSKPIKLYRCQSCQQRYQRKRRIDTQRYRCGLCRGKLLLVNQPED

SEQ ID NO: 1773 - DNA, 270 bp, Streptococcus pneumoniae
atgaacagtaagttttataaaatgagacgaaatcgcatgatttcaggagttttagcaggtctgtcagacaagtggaactttgatgttacccttgtacgttttctgtttgccatttttacagtcgcaaactttggacttggggtgattatctatatcatcctagcttctatcatgccaaccaaggaagaaatcgaagcagaaatgtacggaacaggcccacgtaaacgcaaagaagctcaagccattgacgataatgaaggctggttttgg

SEQ ID NO: 1774 - protein, 90 aa, Streptococcus pneumoniae
  conserved hypothetical protein; Cellular location: membrane; Similar to strain R6 sequence 15902854 (4.E-49)
MNSKFYKMRRNRMISGVLAGLSDKWNFDVTLVRFLFAIFTVANFGLGVIIYIILASIMPTKEEIEAEMYGTGPRKRKEAQAIDDNEGWFW

SEQ ID NO: 1775 - DNA, 162 bp, Streptococcus pneumoniae
gtggatgaagctggcgaaatattattaatactattcaaaaatcaaagtgcaaactatatcaacttcacattgccgactaaattacagcctgcggctggcttcctagtttgcactttgatttttattgagtataaaagtaaaaaagctttaaatcaagcagtt

SEQ ID NO: 1776 - protein, 54 aa, Streptococcus pneumoniae
  box element
MDEAGEILLILFKNQSANYINFTLPTKLQPAAGFLVCTLIFIEYKSKKALNQAV

SEQ ID NO: 1777 - DNA, 189 bp, Streptococcus pneumoniae
atgaaacacaaagaacatatactcatcggacttctctatctgctctctccattcatcggtcagctcttagttgaacacacacactttatcagtacagaatttaccggcactgcttatgttatttgctggttatcagttgttatcagcatccaccatttttccaaaaatgtattgtctcaacagcaaaaa

SEQ ID NO: 1778 - protein, 63 aa, Streptococcus pneumoniae
  hypothetical protein; Cellular location: membrane; Similar to strain R6 sequence 15902855 (1.E-32)
MKHKEHILIGLLYLLSPFIGQLLVEHTHFISTEFTGTAYVICWLSVVISIHHFSKNVLSQQQK

SEQ ID NO: 1779 - DNA, 813 bp, Streptococcus pneumoniae
atgcactatgatgcaagctacatttcatttgatgggatattaagaaaggagattttcatgacacttttagatgtaaaacacgttcaaaaaatttataaaacacgttttcagggcaaccaagtagaagccctcaaggatattcactttaccgtagaaaagggtgactacgttgccatcatgggtgagtctggttctggtaaatcaactcttctcaatattctagctatgttggataaaccaagtcgtggtcaggtttacttgaatggaactgacaccgcaactattaaaaattcacaggcttctagtttccggcgtgaaaagctaggatttgtcttccaagactttaacttgctagatactctgtctgttaaggacaatatcttgcttccgcttgtcttgtcaagaagacctataacggagatgatgaagaaattggtggtgacagctgagaatctgggtattaaccaattgcaagagaagtacccttacgagatttctggtggtcagaaacagcgtgtagcagtagcccgcgccatcatcacagaacctgaaattctccttgcggacgagccaacaggagcccttgattccaagtcatctgcagccttacttgatgtctttaatgaaatcaatgagcgtgggcaaaccatcctcatggtaacccactcaacagcagctgctagcagggccaagcgtgttctctttatcaaagacggcattctttacaaccaaatctaccgtggagagaagacagagcgtcagatgttccaagaaatctctgataccttgactgtcatggcaagcgaggtgaat

SEQ ID NO: 1780 - protein, 271 aa, Streptococcus pneumoniae
  ABC transporter, ATP-binding protein; Cellular location: cytoplasm; Similar to strain R6 sequence 15902856 (e-138)
MHYDASYISFDGILRKEIFMTLLDVKHVQKIYKTRFQGNQVEALKDIHFTVEKGDYVAIMGESGSGKSTLLNILAMLDKPSRGQVYLNGTDTATIKNSQASSFRREKLGFVFQDFNLLDTLSVKDNILLPLVLSRRPITEMMKKLVVTAENLGINQLQEKYPYEISGGQKQRVAVARAIITEPEILLADEPTGALDSKSSAALLDVFNEINERGQTILMVTHSTAAASRAKRVLFIKDGILYNQIYRGEKTERQMFQEISDTLTVMASEVN

SEQ ID NO: 1781 - DNA, 1986 bp, Streptococcus pneumoniae
atgtttcgattaaccaataagttagcggtatcgaacttgattaaaaaccgcaaactctactatccctttgcactggctgttctcttggcagtcaccatcacctatctcttttactccctaaccttcaatccaaagattgcggaaatccgtggaggaaccaccattcaagcaacacttggatttggtatgtttgtcgttacccttgcgtcagccattatcgtcctctatgccaatagttttgtcatgaaaaaccgttccaaggaactgggtatatatggcatgttaggcttggagaagcgccatctaatcagtatgacctttaaggagttagtggtatttgggattctaactgttggagcgggtatcggtattggagccttgtttgacaagttaattttcgctttcctgctcaaactaatgaaactgaaggttgagctggttgctaccttccaaatgaatgttgtcattgcagtacttgttgtctttggattgattttcctaggcctcatgttcctgaatgctcttcgaatcgcccgtatgaatgccctccagctctcgcgtgagaaagcaagcggagagaaaagaggtcgcttcctacctctccaaacgattcttggttccataagtttagggattggctattatcttgcccttacggtaaccgatcctcttacagccctaacaactttcttcctagctgttttgctggttatctttggtacttatctattgtttaatgcagggattacagtcttcctacaaatcttaaagaaaaacaagaaatactattaccaacctaataacctcatatctgtttccaacttgattttccgtatgaagaaaaatgcggttggactagcaaccatcgctattttgtcaacaatggttttggtaaccatgtcagcagcgacaagcattttcaattccgcagaaagctttaaaaaagttctaaatcctcatgattttggggtttcagggcaaaatgttgaaaaagaagatttggacaaactcttgagccagtttgcaagtgacaaaggttatagtgtcaaagagaaagaagtacttcgttacagtaactttggtattgcaaatcaagaaggaaccaagttaactatttttgaaaaaggacaaaaccgtgtccaacccacaacagttttcatggtatttgaccaaaaagattatgaaaatatgactggtcaaaaactgtctctatcaggaaatgaggtcggtctctttgccaaaaatgacggactgaaaggacagaaagctctaactctaaatgatcatcaattttctgtcaaagaagaatttaataaagatttcattgtgaaccatgttccaaataagtttaatatcttgactactgattacaattaccttgttgttcctgatttacaagcctttttggatcaattcccagattcggctatctataatcagttttacggtggtatgaatgtaaatgtcagtgaagaagaacaactcaaggtcgctgaggagtatgaaaactacctcaatcaatttaatgctcaattagacacagaaggtagctatgtttatggtagcaatctagcagatgctagttctcagatgagtgccctctttggtggtgtcttctttatcggtattttcctatccattatctttatggtcggaactgttctggtcatctactacaaacaaatttctgaaggctacgaagaccgtgaacgctttattatcttgcagaaagtcggtttggaccaaaagcaaatcaagcaaaccatcaacaaacaggttttaactgttttcttccttcctttgctctttgccttcatacatctcgcctttgcctaccatatgcttagcctgattttaaaagtgattggtgtactggatacgactatgatgttgattgtgaccttgtctatctgcgctatcttcctcatcgcctatgtgctgattttcatgattacttcaagaagttatcgcaagattgtgcaaatg

SEQ ID NO: 1782 - protein, 662 aa, Streptococcus pneumoniae
  ABC transporter, permease protein, putative; Cellular location: membrane; Similar to strain R6 sequence 15902857 (0.E+01)
MFRLTNKLAVSNLIKNRKLYYPFALAVLLAVTITYLFYSLTFNPKIAEIRGGTTIQATLGFGMFVVTLASAIIVLYANSFVMKNRSKELGIYGMLGLEKRHLISMTFKELVVFGILTVGAGIGIGALFDKLIFAFLLKLMKLKVELVATFQMNVVIAVLVVFGLIFLGLMFLNALRIARMNALQLSREKASGEKRGRFLPLQTILGSISLGIGYYLALTVTDPLTALTTFFLAVLLVIFGTYLLFNAGITVFLQILKKNKKYYYQPNNLISVSNLIFRMKKNAVGLATIAILSTMVLVTMSAATSIFNSAESFKKVLNPHDFGVSGQNVEKEDLDKLLSQFASDKGYSVKEKEVLRYSNFGIANQEGTKLTIFEKGQNRVQPTTVFMVFDQKDYENMTGQKLSLSGNEVGLFAKNDGLKGQKALTLNDHQFSVKEEFNKDFIVNHVPNKFNILTTDYNYLVVPDLQAFLDQFPDSAIYNQFYGGMNVNVSEEEQLKVAEEYENYLNQFNAQLDTEGSYVYGSNLADASSQMSALFGGVFFIGIFLSIIFMVGTVLVIYYKQISEGYEDRERFIILQKVGLDQKQIKQTINKQVLTVFFLPLLFAFIHLAFAYHMLSLILKVIGVLDTTMMLIVTLSICAIFLIAYVLIFMITSRSYRKIVQM

SEQ ID NO: 1783 - DNA, 588 bp, Streptococcus pneumoniae
gtggttatcggagttgccagtgccacgaccaatatctggattatctttttatcaggttttacggctatcttagctggtgccttttcaatggctggtggagaatatgtatccgtttcaactccaaaagataccgaggaagctgccgtttcgcgagaaaaactcttgctagaccaagatagggaactagccaaaaaatccctctatgctgcttatatccaaaatggagaattcaaaacttctgcccaactcttgaccaataagatctttcttaaaaatccactcaaggctctggtagaggaaaaatatgggattgagtatgaagaatttaccaatccttggcacgctgccatttctagcttcgttgcctttttccttagaagtttgcctccaatgctgtcagtgaccatttttccaagtgattaccgcatccctgctaccgtccttattgtcggtgtggcccttcttctcactggttacacaagtgctagacttggaaaagccccaaccaaaacagctatgattcggaaccttgctattggtctcttgaccatgggagttaccttcctgctcggacaacttttcagcatt

SEQ ID NO: 1784 - protein, 196 aa, Streptococcus pneumoniae
  nodulin-related protein, truncation; Cellular location: membrane; Similar to strain R6 sequence 15902858 (e-105)
MVIGVASATTNIWIIFLSGFTAILAGAFSMAGGEYVSVSTPKDTEEAAVSREKLLLDQDRELAKKSLYAAYIQNGEFKTSAQLLTNKIFLKNPLKALVEEKYGIEYEEFTNPWHAAISSFVAFFLRSLPPMLSVTIFPSDYRIPATVLIVGVALLLTGYTSARLGKAPTKTAMIRNLAIGLLTMGVTFLLGQLFSI

SEQ ID NO: 1785 - DNA, 993 bp, Streptococcus pneumoniae
atgcaaaaccattatactacaaaaggcgaacatttgacaatcgatagccgtcgcttaatcgaaagatggaaaaaagaagggaaatcaaatagagaaattgcctctctgcttggaaaagttcctcaaactatccacactgaaatcaagcgtgggacagtccgacaatgtcttggaaaagggcgcttcaaagaggtttattctgccgactatgctcaacagtcttatgaaaacaatcgcaagcgctcggtcaagaaatcaagcttgaccaaggaactaaaggaaaagattctccactatcataaccaaaaattttcgcctgaaatgatggtgatggctaaaggggttaacgtgggaatttcaaccatttactattggattcatcatggaaaattggggttaagcaaacaggatctgctttaccctagaaaaggaaaagcgcttaagaaacaggccagcaccaactttaaacctgctggtcaatccatcgaacagcggcttgaagctatcaattttcgcttggagaatgggcattatgagattgatacagttctacttacgagagcgaaaaactactgcttgcttgtcttgacggatcgaaaaagtagacatcagatcatccgattgattccaaataaaagtgctgatgtggtcaatcaggctctaaaactcatcttaaaacaacacaagattctttccatcacggcagataatggaacggaattcaatcgcttgtctaatgtattttctgaggagcacatttattatgcacatccctatgcctcttgggaaaggggaactaatgagaatcacaacaggctcattcgtagatggttacctaagggaaccaagaaaatgactcccaaagaagtcgcattcatcgaaaagtggattaacaactatcctaaaaaatgcttggactacaagtcacccagagaagacttcttgatggctaacttgaacttgaaatttagcgtcagaaacaaatcacgaaat

SEQ ID NO: 1786 - protein, 331 aa, Streptococcus pneumoniae
  IS1239, transposase, putative; Cellular location: cytoplasm; Similar to strain R6 sequence 15903410 (0.E+01)
MQNHYTTKGEHLTIDSRRLIERWKKEGKSNREIASLLGKVPQTIHTEIKRGTVRQCLGKGRFKEVYSADYAQQSYENNRKRSVKKSSLTKELKEKILHYHNQKFSPEMMVMAKGVNVGISTIYYWIHHGKLGLSKQDLLYPRKGKALKKQASTNFKPAGQSIEQRLEAINFRLENGHYEIDTVLLTRAKNYCLLVLTDRKSRHQIIRLIPNKSADVVNQALKLILKQHKILSITADNGTEFNRLSNVFSEEHIYYAHPYASWERGTNENHNRLIRRWLPKGTKKMTPKEVAFIEKWINNYPKKCLDYKSPREDFLMANLNLKFSVRNKSRN

SEQ ID NO: 1787 - DNA, 1473 bp, Streptococcus pneumoniae
ttgaaagagttagatcaaaaccaagccccaatttatgaggccttggtgaagttacgcaagaaaaggattgttccctttgatgttccaggtcacaagcgtggacggggaaatccagaacttgtcgaactcttaggagaaaaatgtgtaggcattgatgtcaattcgatgaaacctttggataatttaggccatcctatttcgattattcgtgatgcagaggagctggctgcagatgcttttggagctagccatgcctttctaatgattggtggaacaacttcatcggtgcagactatgattctggcaacctgcaaggcaggagataagattattctgccacgaaatgtccataaatctgctatcaatgcgttggttctatgtggtgccattcccatctatatcgagatgagtgtagatcctaagattggtatcgctttaggtcttgaaaatgaccgagtagcacaggccataaaggaccatccagatgctaaggctatcctaatcaacaatcctacttactacggcatctgttcagacctaaaggggttgacagaaatggctcatgaagctggcatgatggttttagtagatgaagcccacggagcgcatttgcatttcactgataaacttccaatttctgctatggatgcaggggctgatatggcagcagtttccatgcataagtctggtgggagtttgacccaaagctccattttacttatcggggagcagatgaattctgaatacgttcgtcagataattaacctgacccagtctacatctgcctcttacttgttgatggctagtttggatatttcacgtcgcaacttggcccttcgtggtaaagagtcgtttgagaaagtcattgagctatctgagtatgcccgccgtgaaatcaatgctatcggtggctactatgcctactcaaaagagttaatagacggtgtttcggtttgcgattttgacgtaactaagctgtcagtttacactcagggtattggcttaacaggtatcgaggtttatgacctcttgcgagacgaatacgacattcagatcgagtttggtgatatcggcaatatcttggcctatatttccatcggcgaccgcatccaagacatcgagcgcttggttggtgctctggctgatattaagagactctattcaagagatggaaaagatttgatagcaggagaatatattcagcccgagttagtgctgtctccgcaagaagccttctattcagaaagaaaaagtttaactttggatgattctgttggacaggtctgtggagaatttgttatgtgttaccctccaggtattcctatcttggctcctggtgaacgcattacacgagaaattgtcgactatatccaattcgccaaggaacgtggttgctccctccaagggacggaagatccagaggtcaatcatatcaacgttattaagagaaagacaaactataagaaaagtcaa

SEQ ID NO: 1788 - protein, 491 aa, Streptococcus pneumoniae
  lysine decarboxylase (cad); Cellular location: membrane; Similar to strain R6 sequence 15902860 (0.E+01)
MKELDQNQAPIYEALVKLRKKRIVPFDVPGHKRGRGNPELVELLGEKCVGIDVNSMKPLDNLGHPISIIRDAEELAADAFGASHAFLMIGGTTSSVQTMILATCKAGDKIILPRNVHKSAINALVLCGAIPIYIEMSVDPKIGIALGLENDRVAQAIKDHPDAKAILINNPTYYGICSDLKGLTEMAHEAGMMVLVDEAHGAHLHFTDKLPISAMDAGADMAAVSMHKSGGSLTQSSILLIGEQMNSEYVRQIINLTQSTSASYLLMASLDISRRNLALRGKESFEKVIELSEYARREINAIGGYYAYSKELIDGVSVCDFDVTKLSVYTQGIGLTGIEVYDLLRDEYDIQIEFGDIGNILAYISIGDRIQDIERLVGALADIKRLYSRDGKDLIAGEYIQPELVLSPQEAFYSERKSLTLDDSVGQVCGEFVMCYPPGIPILAPGERITREIVDYIQFAKERGCSLQGTEDPEVNHINVIKRKTNYKKSQ

SEQ ID NO: 1789 - DNA, 714 bp, Streptococcus pneumoniae
atgctttatgtgggcattgatgtcgctaaaaataaacacgatgttacagccttgaatgttccaggaaaaactgttcttaaaccactcactttttcaaataataaagctggttttgaactcttagatctgtctcttcgacagctcaaccaagactgtctcatcgctcttgaaaataccggacattatgcctttaatctactgaacttcctgcatgaacaaggatataaagtttacacctacaatcctttgctcatcaagaaatttgccaaatcattatcacttcgcaaaactaaaacggataagaaagacgctcatggcatcgctcttaaacttctttctgaccccaatcgtgaacaatttcaacacgataatcggcaagtagaactaaaaatactggctagacatattcatcgtctcaagaaaaaacagtctgattggaaagtacaatacactcgttgtcttgatatcatctttcctgagttggataaaatcgttggaaagcattcagaatatacctaccaactcttgacacgctaccctaatcctcagaaaaggcttgaggcaggatttgataagctgatagaaattaagcgattgaccgcttctaattcaagggctttttgccgtgctctaaaatcatcgccaaatcatcaaattgaaataagaaatagtttagataaaactattgacttttcttatagtttgtctttctct

SEQ ID NO: 1790 - protein, 238 aa, Streptococcus pneumoniae
  pilin gene inverting-related protein; Cellular location: cytoplasm; Similar to strain R6 sequence 15902862 (5.E-78)
MLYVGIDVAKNKHDVTALNVPGKTVLKPLTFSNNKAGFELLDLSLRQLNQDCLIALENTGHYAFNLLNFLHEQGYKVYTYNPLLIKKFAKSLSLRKTKTDKKDAHGIALKLLSDPNREQFQHDNRQVELKILARHIHRLKKKQSDWKVQYTRCLDIIFPELDKIVGKHSEYTYQLLTRYPNPQKRLEAGFDKLIEIKRLTASNSRAFCRALKSSPNHQIEIRNSLDKTIDFSYSLSFS

SEQ ID NO: 1791 - DNA, 858 bp, Streptococcus pneumoniae
atggatttatggttttctgaagttcatactccagatgtcaaattgtctctgagaacagccaagcaactttacgctggaaaaagtgaatggcaggatatcgaagtcttggatacgccagcttttgggaaaatactgattttaaatggccatgtcttgttctcagatgcggatgatttcgtctacaatgaaatgaccgttcacgttcccatggctgtccacccaaatccaaagaaagtattggttattgggggtggtgacggcggtgttgcccaagtattaaccctctatcctgaactggagcaaattgatattgtggaaccggatgagatgttggtcgaggtctgtcgtgagtatttcccagactttgctgcagggctagatgatcctcgtgttaccatttactaccaaaatgggctacgctttttgcgaaactgcgaagatgattacgatattatcatcaacgatgcgacagatccatttggccatacggaaggactctttaccaaggaattctacggcaatagttatcgagctctgaaggaagacggcatcatgatttaccagcatgggagtcccttctttgacgaggatgagtcggcctgccgaagcatgcaccgcaaggtcaatcaagcctttccaatcagtcgggtttatcaggcccatattccaactagcccagctggctattggttgtttggatttgcatcgaaaaaataccaccctgtcaaagattttgacaaggaaggctggaaaaaacgccagcttttcacagaatactacactgcaaacttacacgtgggagcctttatgttgcccaagtatgttgaggacattttagaagaagaggaaggaaaaaaa

SEQ ID NO: 1792 - protein, 286 aa, Streptococcus pneumoniae
  spermidine synthase (speE); Cellular location: cytoplasm; Similar to strain R6 sequence 15902863 (e-173)
MDLWFSEVHTPDVKLSLRTAKQLYAGKSEWQDIEVLDTPAFGKILILNGHVLFSDADDFVYNEMTVHVPMAVHPNPKKVLVIGGGDGGVAQVLTLYPELEQIDIVEPDEMLVEVCREYFPDFAAGLDDPRVTIYYQNGLRFLRNCEDDYDIIINDATDPFGHTEGLFTKEFYGNSYRALKEDGIMIYQHGSPFFDEDESACRSMHRKVNQAFPISRVYQAHIPTSPAGYWLFGFASKKYHPVKDFDKEGWKKRQLFTEYYTANLHVGAFMLPKYVEDILEEEEGKK

SEQ ID NO: 1793 - DNA, 1257 bp, Streptococcus pneumoniae
atgagtcgtttactagttattggttgtgggggcgttgcccaagttgctatttcaaagatttgtcaagatagcgaaacatttacagagattatgattgctagccgtaccaagtcaaaatgcgatgacttgaaagcgaagctagaaggcaaaacaagtactaaaattgaaactgcagcacttgatgctgacaaggttgaagaagtgattgccctgattgaaagctacaaaccagaagctgttttgaatgtagctctgccttatcaagatttaaccattatggatgcttgtttggcaacaggtgttcactatatcgatacagccaactacgaagcagaagacacagaagaccctgagtggcgtgctatctacgaaaaacgttgtaaggaacttggttttacagcctactttgactactcatggcagtgggcttatcaagagaaattcaaagaagcaggcttgactgctcttcttggttctggttttgacccaggtgtaactagtgtcttttcagcttatgccctcaaacactattttgatgaaatccattatatcgacattttagactgtaatggcggtgaccacggttatccatttgcaaccaactttaatccagaaattaatctccgtgaggtttctgcgccaggttcttactgggaagatgggaaatgggtcgaagtcgaagctatgtctatcaagcgtgagtatgatttccctcaagttggacaaaaagatatgtatctccttcaccatgaagaaatcgaatcattggccaagaacattccaggtgtcaaacgcattcgtttctttatgacttttggtcaatcttacttgacgcacatgaaatgtcttgaaaatgttggactccttcgtacggataccattaactttaacggccaagaaattgttccaattcaatttttgaaagccttgcttccagatcctgccagtcttgggccacgtacagtcggaaaaaccaatattggatgtatctttacaggtgtcaaagacggtgtcaaaaagactatctatatctacaatgtctgcgaccatcaggaatgttacgcagaggttggttcgcaagctatttcttatacgacaggagttccagccatgattgggacaaaattagtcatgaacggaacttggaaacaagctggagtgtataaccttgaggagttagatccagatccattcatggaagctttgaatgagtatggtttgccatgggttgtggttgaaaatccacaaatggtggac

SEQ ID NO: 1794 - protein, 419 aa, Streptococcus pneumoniae
  conserved hypothetical protein; Cellular location: outside; Similar to strain R6 sequence 15902864 (0.E+01)
MSRLLVIGCGGVAQVAISKICQDSETFTEIMIASRTKSKCDDLKAKLEGKTSTKIETAALDADKVEEVIALIESYKPEAVLNVALPYQDLTIMDACLATGVHYIDTANYEAEDTEDPEWRAIYEKRCKELGFTAYFDYSWQWAYQEKFKEAGLTALLGSGFDPGVTSVFSAYALKHYFDEIHYIDILDCNGGDHGYPFATNFNPEINLREVSAPGSYWEDGKWVEVEAMSIKREYDFPQVGQKDMYLLHHEEIESLAKNIPGVKRIRFFMTFGQSYLTHMKCLENVGLLRTDTINFNGQEIVPIQFLKALLPDPASLGPRTVGKTNIGCIFTGVKDGVKKTIYIYNVCDHQECYAEVGSQAISYTTGVPAMIGTKLVMNGTWKQAGVYNLEELDPDPFMEALNEYGLPWVVVENPQMVD

SEQ ID NO: 1795 - DNA, 1125 bp, Streptococcus pneumoniae
atgaagttagaacaagtaccaacaccagcctatgttattgacttggccaagttagaagctaattgccgcattctacaatatgtacaagaagaggccggttgcaaggtcttgcttgcccagaaggcatattccctctacaaaacttatcccttgattagccagtatctatcaggtacgacagctagtggactctatgaggccaaattggcaagggaagaatttcctggtgaagtccatgtatttgcgcctgctttcaaggatgcagacttggaggaattgctagagataatggaccatatagtctttaactcagagagacagttgcgtaaacacggtccgcgttgtcgagaggctggtgtcagtgttggtttgcgcctcaaccctcagtgttcaactcaaggagatcacgcgctctatgacccttgtgcaccaggttctcgctttggagttactatagacaagattccgagtgatttgctagatttggttgacggacttcattttcataccctttgcgagcagggagcagatgatttacaaacaactttgaaagcagtagaagaacagtttggtccctacttacatgaggtaaaatggctcaatatgggtggtggtcatcatattacaagagaaggttacgatgtggatttgctgatttcagaaatcaagcgtatccgaaaaacttacaatcttgaaatctatatcgagcctggtgaagccattgcgcttaatgcgggttatttagcaactgaggtattagatattgtagaaaacggtatggaaatcttggttttagacgcctctgcgacctgccatatgcctgatgtacttgagatgccctatcgtccacctttgagaaatggctttgagtcacaggaaaaagcccatacctacagactttcttctaatacctgtctgacgggcgatgtgattggtgattatagttttgaaaatccagtccaaatcggagacagactttattttcaagacatggccatttattcttttgtcaaaaataatacctttaatggtattggattgccaagtctctatctcatggacgaacagggagactgtagcttactcaaagcttttggctatcaagactttaaagggagattatca

SEQ ID NO: 1796 - protein, 375 aa, Streptococcus pneumoniae
  carboxynorspermidine decarboxylase (nspC); Cellular location: cytoplasm; Similar to strain R6 sequence 15902865 (0.E+01)
MKLEQVPTPAYVIDLAKLEANCRILQYVQEEAGCKVLLAQKAYSLYKTYPLISQYLSGTTASGLYEAKLAREEFPGEVHVFAPAFKDADLEELLEIMDHIVFNSERQLRKHGPRCREAGVSVGLRLNPQCSTQGDHALYDPCAPGSRFGVTIDKIPSDLLDLVDGLHFHTLCEQGADDLQTTLKAVEEQFGPYLHEVKWLNMGGGHHITREGYDVDLLISEIKRIRKTYNLEIYIEPGEAIALNAGYLATEVLDIVENGMEILVLDASATCHMPDVLEMPYRPPLRNGFESQEKAHTYRLSSNTCLTGDVIGDYSFENPVQIGDRLYFQDMAIYSFVKNNTFNGIGLPSLYLMDEQGDCSLLKAFGYQDFKGRLS

SEQ ID NO: 1797 - DNA, 1083 bp, Streptococcus pneumoniae
atgatggacagtccaaaaaaattaggctatcacatgccagcagagtacgaaccccatcatggtaccctcatgatatggccgactcgaccaggatcatggccttttcaaggaaaggctgctaaaagagcatttactcagattatcgagaccatagcagaaggggaaagagtctatcttttggtggagcaggcctatctatctgaagcccaatcctatcttggagacaaggttgtttatttagacattcccaccaatgatgcctgggcgcgtgatactggcccaaccattctcgtcaatgataaaggtaagaaattagccgtggattgggccttcaatgcttggggaggcacctatgatggtctttatcaagattatgaagaggatgaccaagtagccagtcgttttgctgaggccttggaaaggcctgtctatgatgctaaaccttttgtactggaaggaggcgcaatccatagcgatggtcaaggaactattctcgtaactgaaagttgcttgcttagtcctggtcgcaatcctaacttgactaaagaggagattgaaaacacattattagaaagtcttggtgctgaaaaagttatttggcttccttatggtatttatcaggatgaaaccaatgaacacgtcgataatgttgctgcctttgttggtcctgctgagcttgttttggcttggacagatgacgaaaatgatccccagtatgccatgtcaaaagcagatctcgaactcttagaacaggaaacagatgcaaaaggttgtcacttcaccattcataaattgcctatccctgcagttcgacaagttgtgacagaagaagatttgccaggctacatctatgaagaaggagaagaaaagcgatacgcaggtgaacgactagcagcttcctacgtaaacttttatatcgccaacaaggctgtcttggttccacagtttgaggatgtaaacgaccaagtggccttagatatcctcagcaagtgtttcccagaccgtaaagttgtcggaataccagccagagatattctcttaggtggtggcaatatccactgtatcacccaacaaattccagaa

SEQ ID NO: 1798 - protein, 361 aa, Streptococcus pneumoniae
  conserved hypothetical protein; Cellular location: cytoplasm; Similar to strain R6 sequence 15902866 (0.E+01)
MMDSPKKLGYHMPAEYEPHHGTLMIWPTRPGSWPFQGKAAKRAFTQIIETIAEGERVYLLVEQAYLSEAQSYLGDKVVYLDIPTNDAWARDTGPTILVNDKGKKLAVDWAFNAWGGTYDGLYQDYEEDDQVASRFAEALERPVYDAKPFVLEGGAIHSDGQGTILVTESCLLSPGRNPNLTKEEIENTLLESLGAEKVIWLPYGIYQDETNEHVDNVAAFVGPAELVLAWTDDENDPQYAMSKADLELLEQETDAKGCHFTIHKLPIPAVRQVVTEEDLPGYIYEEGEEKRYAGERLAASYVNFYIANKAVLVPQFEDVNDQVALDILSKCFPDRKVVGIPARDILLGGGNIHCITQQIPE

SEQ ID NO: 1799 - DNA, 873 bp, Streptococcus pneumoniae
atgagaaatgtaagagttgcaaccattcagatgcaatgcgctaaggatgtggcaacaaatatccaaaccgcagagcgtttagtacgtcaggctgctgagcaaggagcccaaattattctcttgcccgagttgtttgaacatccctatttctgtcaggaacgtcagtatgactactaccagtatgcccaatctgtagcggaaaatactgccattcagcattttaaggtgattgctaaggaactacaagttgttttaccaatcagtttctatgaaaaagatggtaatgtcttgtataactctattgccgtcattgatgcagatggggaagtgctgggcgtttatcgaaagacccatataccagatgaccattattatcaagaaaaattctatttcacgcctggtaacactggtttcaaggtctggaatactcgctatgctaagattggtatcggtatctgttgggatcaatggttccctgaaacagcgcgctgtcttgcattgaatggtgctgaattgctcttttatcctacagctatcggttcagagccaattttggatacagatagttgtggtcactggcaacgtactatgcaagggcacgcagcagcgaatattgttccagtcatcgcagccaatcgttatggtttagaggaggttactcctagtgaggaaaatggcggacagagctccagtcttgacttctacggttcctcctttatgacggatgaaacaggagctattctagaacgagctgaaagacaagaagaagctgttctgttagctacttatgacctagacaagggagcaagtgaacgcctaaactggggcttgtttcgagatagaagaccagaaatgtatagacaaattacagat

SEQ ID NO: 1800 - protein, 291 aa, Streptococcus pneumoniae
  carbon-nitrogen hydrolase family protein; Cellular location: cytoplasm; Similar to strain R6 sequence 15902867 (e-172)
MRNVRVATIQMQCAKDVATNIQTAERLVRQAAEQGAQIILLPELFEHPYFCQERQYDYYQYAQSVAENTAIQHFKVIAKELQVVLPISFYEKDGNVLYNSIAVIDADGEVLGVYRKTHIPDDHYYQEKFYFTPGNTGFKVWNTRYAKIGIGICWDQWFPETARCLALNGAELLFYPTAIGSEPILDTDSCGHWQRTMQGHAAANIVPVIAANRYGLEEVTPSEENGGQSSSLDFYGSSFMTDETGAILERAERQEEAVLLATYDLDKGASERLNWGLFRDRRPEMYRQITD

SEQ ID NO: 1801 - DNA, 807 bp, Streptococcus pneumoniae
atgattaaactactagccttggatatggacggcaccctcctcaatgaagccaaggaaatcccacaagctcacattactgctattcacaaagccattgaaaaaggtgtcaaactggttctctgtacgggtcgcccccttttcggtgtcctcccctactacaaaaaactggagcttgacctccagaacgaatatattattgttaacaacggttgttcaactcaccagaccagtgattggagtctagttgactggaaagaactgagtccagctgacatcgaatacctctatgaccttgctgaaaagagtgatgttcagttgacactttttgacgagtcacattattttgttctcggtgacaagcccaatcaagttattgaaaatgatgctaaactagtattttcagacctgactgaaatttctcttgaagaagcgactagtggaaagttccggatgttccaaggtatgtttttaggaacaaaagaacaaacagacgattttgagcagcgttttgctgaagagctttgccaacgattcagtggagttcgttcgcagcctgtcatttatgaagcaatgccgcttggaacgacaaaggctactgctctttcacgactagctgagattttgaagattgattcctcagagattatggccatgggcgatgctaataacgatatcgaaatgctccagtttgcagggcttgggattgcaatgggaaatgccagcgattatatcaaatctcttgcggatgccgttacctcaagcaacgaagaagacggcgttgcgcgtgctattgagaaatatattcta

SEQ ID NO: 1802 - protein, 269 aa, Streptococcus pneumoniae
  Cof family protein; Cellular location: cytoplasm; Similar to strain R6 sequence 15902868 (e-149)
MIKLLALDMDGTLLNEAKEIPQAHITAIHKAIEKGVKLVLCTGRPLFGVLPYYKKLELDLQNEYIIVNNGCSTHQTSDWSLVDWKELSPADIEYLYDLAEKSDVQLTLFDESHYFVLGDKPNQVIENDAKLVFSDLTEISLEEATSGKFRMFQGMFLGTKEQTDDFEQRFAEELCQRFSGVRSQPVIYEAMPLGTTKATALSRLAEILKIDSSEIMAMGDANNDIEMLQFAGLGIAMGNASDYIKSLADAVTSSNEEDGVARAIEKYIL

SEQ ID NO: 1803 - DNA, 219 bp, Streptococcus pneumoniae
atgattttaatgacaaaaaatataaatctaacaaatgaagaattagagctgatacaaggtggagcagatccatatggtaaaaatcctaatggtaggtacgattgggaaatagaaccagtattaactctgctggttcatggattttgtcccagaggcacctatgattcaggatatattggaggaggtaatcatctttgcaaaggaagtgctgcgagattt

SEQ ID NO: 1804 - protein, 73 aa, Streptococcus pneumoniae
  hypothetical protein; Cellular location: cytoplasm; Similar to strain R6 sequence 15902869 (5.E-39)
MILMTKNINLTNEELELIQGGADPYGKNPNGRYDWEIEPVLTLLVHGFCPRGTYDSGYIGGGNHLCKGSAARF

SEQ ID NO: 1805 - DNA, 669 bp, Streptococcus pneumoniae
atgaaaaaacgagctattcaaattttactagcattgtccttaattttttacaaatcaacttggttttggaggcttttcaattatctcgcaaagccctatctaccagcaagtcgtgaattttttcagattctgcttttgatggagagcggagttcttttcttagcggtcatctatctactggtttttgcaggaaagaaaatttttcatttcaagtggcagctgaggtacttcatctaccttttactgggctacatcatttcatatatgtctgacttcctcttttcgtatttcatatccctgtcttcaaatcagatttctttgaatgaaacggtagaaatgatggggagacaggagttcccttatttcttgctcatcgtttgcttcatcgcccctattgctgaggaattgatttatcgaggtgtgcttatgacaacctttttcaaaaactcaccttggtacggagatgttttgctttctgctattattttcggttatattcatatcaattttgctttaactcctcttgcttttttcatttatgctagtggaggtcttattttagctctattgtatcgcatgactaaaaatctctactatccaatactagttcatattctcattaatatcactgccttctgggatgtgtggttgctcctattttcaggaagt

SEQ ID NO: 1806 - protein, 223 aa, Streptococcus pneumoniae
  conserved hypothetical protein; Cellular location: membrane; Similar to strain R6 sequence 15902870 (e-126)
MKKRAIQILLALSLIFYKSTWFWRLFNYLAKPYLPASREFFQILLLMESGVLFLAVIYLLVFAGKKIFHFKWQLRYFIYLLLGYIISYMSDFLFSYFISLSSNQISLNETVEMMGRQEFPYFLLIVCFIAPIAEELIYRGVLMTTFFKNSPWYGDVLLSAIIFGYIHINFALTPLAFFIYASGGLILALLYRMTKNLYYPILVHILINITAFWDVWLLLFSGS

SEQ ID NO: 1807 - DNA, 195 bp, Streptococcus pneumoniae
atgttcatcttctacccccaacttctttatcttttcattataccatattttagaagttttccaaaaaggaaaaaagaacatcctattcttcttaactatcttcactatctgcctttctcaagtcaaccttattttcaaaatcaattcaaaaaaataactggatacacaccactacaatatcgaaaagaaaaacgt

SEQ ID NO: 1808 - protein, 65 aa, Streptococcus pneumoniae
  hypothetical protein; Similar to strain R6 sequence 15902871 (4.E-34)
MFIFYPQLLYLFIIPYFRSFPKRKKEHPILLNYLHYLPFSSQPYFQNQFKKITGYTPLQYRKEKR

SEQ ID NO: 1809 - DNA, 906 bp, Streptococcus pneumoniae
atgaacattcaacaattacgctatgttgtggctattgccaatagtggtacttttcgtgaagctgctgaaaagatgtatgttagtcagccgagtctgtctatttctgttcgtgatttggaaaaagagttgggctttaagattttccgtcggaccagctcagggactttcttgacccgtcgtgggatggaattttatgaaaaatcgcaagaattggttaaaggatttgatatttttcaaaatcagtatgccaatcctgaagaagaaaaagatgaattttctgttgctagccagcactatgacttcttgccaccaactattacggccttttcagagcgctatcctgactataagaacttccgtatttttgaatcaactactgttcaaatattagatgaagtggcgcaagggcatagtgagattgggattatctacctcaacaatcaaaataaaaaggggattatgcaacgggttgaaaaattaggtctggaggtcatcgaattgattcctttccatacccatatttatctccgtgagggtcatcctttagcccagaaagaggaattagtcatggaggatttagcggatttaccaacggttcgtttcactcaagagaaagacgagtacctttattattcagagaactttgtcgataccagcgctagctcacagatgtttaatgtgacagaccgtgccaccttgaatggtattttggagcggacggacgcctatgcgacaggttctggatttttagatagtgacagtgttaatggcattacagttattcgtctcaaggataacctagataaccgcatggtctatgttaaacgtgaagaagtggagcttagtcaagctgggactctcttcgtagaagtcatgcaagaatattttgatcaaaagaggaaatca

SEQ ID NO: 1810 - protein, 302 aa, Streptococcus pneumoniae
  transcriptional regulator, LysR family; Cellular location: cytoplasm; Similar to strain R6 sequence 15902872 (e-170)
MNIQQLRYVVAIANSGTFREAAEKMYVSQPSLSISVRDLEKELGFKIFRRTSSGTFLTRRGMEFYEKSQELVKGFDIFQNQYANPEEEKDEFSVASQHYDFLPPTITAFSERYPDYKNFRIFESTTVQILDEVAQGHSEIGIIYLNNQNKKGIMQRVEKLGLEVIELIPFHTHIYLREGHPLAQKEELVMEDLADLPTVRFTQEKDEYLYYSENFVDTSASSQMFNVTDRATLNGILERTDAYATGSGFLDSDSVNGITVIRLKDNLDNRMVYVKREEVELSQAGTLFVEVMQEYFDQKRKS

SEQ ID NO: 1811 - DNA, 459 bp, Streptococcus pneumoniae
atgaaaaaaagagcaatagtggcagtcattgtactgcttttgattgggctggatcagttggtcaaatcctatatcgtccagcagattccactgggtgaagtgcgctcctggatccccaatttcgttagcttgacctacctgcaaaatcgaggtgcagccttttctatcttacaagatcagcagctgttattcgctgtcattactctggttgtcgtgataggtgccatttggtatttacataaacacatggaggactcattctggatggtcttgggtttgactctaataatcgcgggtggtcttggaaactttattgacagggtcagtcagggctttgttgtggatatgttccaccttgactttatcaactttgcaattttcaatgtggcagatagctatctgacggttggagtgattattttattgattgcaatgctaaaagaggaaataaatggaaat

SEQ ID NO: 1812 - protein, 153 aa, Streptococcus pneumoniae
  lipoprotein signal peptidase (lspA); Cellular location: membrane; Similar to strain R6 sequence 15902873 (8.E-83)
MKKRAIVAVIVLLLIGLDQLVKSYIVQQIPLGEVRSWIPNFVSLTYLQNRGAAFSILQDQQLLFAVITLVVVIGAIWYLHKHMEDSFWMVLGLTLIIAGGLGNFIDRVSQGFVVDMFHLDFINFAIFNVADSYLTVGVIILLIAMLKEEINGN

SEQ ID NO: 1813 - DNA, 885 bp, Streptococcus pneumoniae
atggaaattaaaattgaaactggtggtctgcgtttggataaggctttgtcagatttgtcagaattatcacgtagtctcgcgaatgaacaaattaaatcaggccaggtcttggtcaatggtcaagtcaagaaagctaaatacacagtccaagagggtgatgtcgtcacttaccatgtgccagaaccagaggtattagagtatgtggctgaggatcttccgctagaaatagtctaccaagatgaggatgtggctgtcgttaacaaacctcagggaatggttgtgcacccgagtgctggtcataccagtggaaccctagtaaatgccctcatgtatcatattaaggacttgtcgggtatcaatggggttctgcgtccagggattgttcaccgtattgataaggatacgtcaggtcttctcatgattgctaaaaacgatgatgcgcatctagcacttgcccaagaactcaaggataaaaagtctctccgcaaatattgggcgattgttcatggaaatctacctaatgatcgtggtgtaattgaagcgccgattggccggagtgaaaaagaccgtaagaaacaggctgtaactgctaaagggaagcctgcagtgacgcgttttcacgtcttggaacgctttggcgattatagcttagtagagttgcaactggagacagggcgcactcatcaaatccgtgtccacatggcttatatcggccatccagtcgctggtgatgaggtctatggtcctcgcaagactttgaaaggacatggacaatttcttcatgccaagactttaggttttactcatccgagaacaggtaagaccttggaatttaaagcagatatcccagagatttttaaggaaaccttggagagattgagaaag

SEQ ID NO: 1814 - protein, 295 aa, Streptococcus pneumoniae
  ribosomal large subunit pseudouridine synthase D (rluD); Cellular location: cytoplasm; Similar to strain R6 sequence 15902874 (e-169)
MEIKIETGGLRLDKALSDLSELSRSLANEQIKSGQVLVNGQVKKAKYTVQEGDVVTYHVPEPEVLEYVAEDLPLEIVYQDEDVAVVNKPQGMVVHPSAGHTSGTLVNALMYHIKDLSGINGVLRPGIVHRIDKDTSGLLMIAKNDDAHLALAQELKDKKSLRKYWAIVHGNLPNDRGVIEAPIGRSEKDRKKQAVTAKGKPAVTRFHVLERFGDYSLVELQLETGRTHQIRVHMAYIGHPVAGDEVYGPRKTLKGHGQFLHAKTLGFTHPRTGKTLEFKADIPEIFKETLERLRK

SEQ ID NO: 1815 - DNA, 1881 bp, Streptococcus pneumoniae
atgaaaaagaaattaactagtttagcacttgtaggcgcttttttaggtttgtcatggtatgggaatgttcaggctcaagaaagttcaggaaataaaatccactttatcaatgttcaagaaggtggcagtgatgcgattattcttgaaagcaatggacattttgccatggtggatacaggagaagattatgatttcccagatggaagtgattctcgctatccatggagagaaggaattgaaacgtcttataagcatgttctaacagaccgtgtctttcgtcgtttgaaggaattgggtgtccaaaaacttgattttattttggtgacccatacccacagtgatcatattggaaatgttgatgaattactgtctacctatccagttgaccgagtctatcttaagaaatatagtgatagtcgtattactaattctgaacgtctatgggataatctgtatggctatgataaggttttacagactgctgcagaaaaaggtgtttcagttattcaaaatatcacacaaggggatgctcattttcagtttggggacatggatattcagctctataattatgaaaatgaaactgattcatcgggtgaattaaagaaaatttgggatgacaattccaattccttgattagcgtggtgaaagtcaatggcaagaaaatttaccttgggggcgatttagataatgttcatggagcagaagacaagtatggtcctctcattggaaaagttgatttgatgaagtttaatcatcaccatgataccaacaaatcaaataccaaggatttcattaaaaatttgagtccgagtttgattgttcaaacttcggatagtctaccttggaaaaatggtgttgatagtgagtatgttaattggctcaaagaacgaggaattgagagaatcaacgcagccagcaaagactatgatgcaacagtttttgatattcgaaaagacggttttgtcaatatttcaacatcctacaagccgattccaagttttcaagctggttggcataagagtgcatatgggaactggtggtatcaagcgcctgattctacaggagagtatgctgtcggttggaatgaaatcgaaggtgaatggtattactttaaccaaacgggtatcttgttacagaatcaatggaaaaaatggaacaatcattggttctatttgacagactctggtgcttctgctaaaaattggaagaaaatcgctggaatctggtattattttaacaaagaaaaccagatggaaattggttggattcaagataaagagcagtggtattatttggatgttgatggttctatgaagacaggatggcttcaatatatggggcaatggtattactttgctccatcaggggaaatgaaaatgggctgggtaaaagataaagaaacctggtactatatggattctactggtgtcatgaagacaggtgagatagaagttgctggtcaacattattatctggaagattcaggagctatgaagcaaggctggcataaaaaggcaaatgattggtatttctacaagacagacggttcacgagctgtgggttggatcaaggacaaggataaatggtacttcttgaaagaaaatggtcaattacttgtgaacggtaagacaccagaaggttatactgtggattcaagtggtgcctggttagtggatgtttcgatcgagaaatctgctacaattaaaactacaagtcattcagaaataaaagaatccaaagaagtagtgaaaaaggatcttgaaaataaagaaacgagtcaacatgaaagtgttacaaatttttcaactagtcaagatttgacatcctcaacttcacaaagctctgaaacgagtgtaaacaaatcggaatcagaacag

SEQ ID NO: 1816 - protein, 627 aa, Streptococcus pneumoniae
  choline binding protein E (cbpE); Cellular location: outside; Feature of note: WYY motif; Similar to strain R6 sequence 15902875 (0.E+01)
MKKKLTSLALVGAFLGLSWYGNVQAQESSGNKIHFINVQEGGSDAIILESNGHFAMVDTGEDYDFPDGSDSRYPWREGIETSYKHVLTDRVFRRLKELGVQKLDFILVTHTHSDHIGNVDELLSTYPVDRVYLKKYSDSRITNSERLWDNLYGYDKVLQTAAEKGVSVIQNITQGDAHFQFGDMDIQLYNYENETDSSGELKKIWDDNSNSLISVVKVNGKKIYLGGDLDNVHGAEDKYGPLIGKVDLMKFNHHHDTNKSNTKDFIKNLSPSLIVQTSDSLPWKNGVDSEYVNWLKERGIERINAASKDYDATVFDIRKDGFVNISTSYKPIPSFQAGWHKSAYGNWWYQAPDSTGEYAVGWNEIEGEWYYFNQTGILLQNQWKKWNNHWFYLTDSGASAKNWKKIAGIWYYFNKENQMEIGWIQDKEQWYYLDVDGSMKTGWLQYMGQWYYFAPSGEMKMGWVKDKETWYYMDSTGVMKTGEIEVAGQHYYLEDSGAMKQGWHKKANDWYFYKTDGSRAVGWIKDKDKWYFLKENGQLLVNGKTPEGYTVDSSGAWLVDVSIEKSATIKTTSHSEIKESKEVVKKDLENKETSQHESVTNFSTSQDLTSSTSQSSETSVNKSESEQ

SEQ ID NO: 1817 - DNA, 1107 bp, Streptococcus pneumoniae
atgaaatacaaacggattgtctttaaggtgggtacttcttctctgacaaatgaggatggaagtttatcacgtagtaaggtaaaggatattacccagcagttggctatgctgcacgaggctggtcatgagttgattttggtgtcttcaggtgccattgcggctggttttggagccttaggatttaaaaagcgtccgactaagattgctgataaacaggcttcagcagcggtagggcaggggcttttgttggaagaatatacaaccaatcttctcttgcgtcaaatcgtttctgcacaaatcttgctgacccaagatgactttgtggataagcgtcgttataaaaatgcccatcaggctttgtcggttttgctcaaccgtggggcaattcctatcatcaatgagaatgatagtgtcgttattgatgagctcaaggttggggacaatgacactctaagtgctcaagtagcggcgatggtccaagcagaccttttagttttcttgacagatgtggacggtctctatactggaaatcctaattcagatccaagagccaaacgcttggagagaatcgagaccatcaatcgtgagattattgatatggctggtggagctggttcgtcaaacggaactgggggtatgttaaccaaaatcaaggctgcaactatcgcgacggaatcaggagttcctgtttatatctgctcatccttgaaatcagattccatgattgaggcggcagaggagaccgaggatggttcttactttgttgctcaagagaaggggcttcgtacccagaaacaatggcttgccttctatgctcagagtcaaggttctatttgggttgataaaggggctgcggaagctctctctcaatatggaaagagtcttctcttatctggtatcgttgaagcagaaggagtcttttcttacggtgatatcgtgacagtatttgacaaggaaagtggaaaatcacttggaaaaggacgcgtgcaatttggagcatctgctttggaggatatgttgcgttctcaaaaagccaagggtgtcttgatttaccgtgacgactggatttccattactcctgaaatccaactactttttacagaattt

SEQ ID NO: 1818 - protein, 369 aa, Streptococcus pneumoniae
  glutamate 5-kinase (proB); Cellular location: membrane; Similar to strain R6 sequence 15902876 (0.E+01)
MKYKRIVFKVGTSSLTNEDGSLSRSKVKDITQQLAMLHEAGHELILVSSGAIAAGFGALGFKKRPTKIADKQASAAVGQGLLLEEYTTNLLLRQIVSAQILLTQDDFVDKRRYKNAHQALSVLLNRGAIPIINENDSVVIDELKVGDNDTLSAQVAAMVQADLLVFLTDVDGLYTGNPNSDPRAKRLERIETINREIIDMAGGAGSSNGTGGMLTKIKAATIATESGVPVYICSSLKSDSMIEAAEETEDGSYFVAQEKGLRTQKQWLAFYAQSQGSIWVDKGAAEALSQYGKSLLLSGIVEAEGVFSYGDIVTVFDKESGKSLGKGRVQFGASALEDMLRSQKAKGVLIYRDDWISITPEIQLLFTEF

SEQ ID NO: 1819 - DNA, 1260 bp, Streptococcus pneumoniae
atggtgagtagacaagaacaatttgaacaggtacaggctgttaaaaaatcgattaacacagctagtgaagaagtgaaaaaccaagccttgctagccatggctgatcacttagtggctgctactgaggaaattttagcggctaatgccctcgatatggcagcggctaaggggaaaatctcagatgtgatgttggatcgtctttatttggatgcagatcgtatagaagcgatggcaagaggaattcgtgaagtggttgccttaccagatccaatcggtgaagttttagaaacaagtcagcttgaaaatggtttggttatcacaaaaaaacgtgtagctatgggtgtcatcggtattatctatgaaagccgtccaaatgtgacgtctgatgcggctgctttgactcttaagagtggaaatgcggttgttcttcgtagtggtaaggatgcctatcaaacaacccatgccattgtcacagccttgaagaagggcttggagacgactactattcatccaaatgtgattcaactggtggaggatactagccgtgaaagtagttatgctatgatgaaggccaagggctatctagaccttctcattcctcgtggaggagctggcttgatcaatgcagtggttgagaatgcgattgtacctgttatcgagacagggactgggattgtccatgtctatgtggataaggatgcagacgaagacaaggcgctgtctatcatcaacaatgctaaaaccagtcgtccttctgtttgtaatgccatggaggttctgctggttcatgaaaacaaggcagcaagcttccttcctcgcttggagcaagtgttggttgcagagcgtaaggaagctggactggaaccaattcaattccgcctagatagcaaagcaagccagtttgtttcaggtcaagcagctgagacccaagactttgacaccgagtttttagactatgtccttgctgttaaggttgtgagcagtttagaagaagcggttgcgcacattgaatcccacagcacccatcattcggatgctattgtgacggaaaatgctgaagctgcagcatactttacagatcaagtggactctgcagcggtgtatgttaatgcctcaactcgtttcacagatggaggacaatttggtcttggttgtgaaatggggatttctactcagaaattgcacgcgcgtggtcccatgggcttgaaagagttgaccagctacaagtatgtggttgccggtgatgggcagataagggag

SEQ ID NO: 1820 - protein, 420 aa, Streptococcus pneumoniae [sequence omitted]

SEQ ID NO: 1821 - DNA, 795 bp, Streptococcus pneumoniae
atgaagattggatttatcggtttggggaatatgggtgctagcttggcaaaatctgtcttgcagactaggacgtcagatgagattctccttgccaatcgtagtcaagctaaggtagatgctttcattgcagactttggtggtcaggcttccagcaatgaagaaatgtttgcagaagcagatgtgatttttctaggagttaagcctgctcagttttctgaactgctttctcaataccagaccatccttgaaaaaagagaaagtcttcttttgatttcgatggcagctggattgaccttagaaaaactagcaagtcttatcccaagtcaacaccgaattattcgtatgatgcctaatacccctgcttctatcgggcaaggagtgattagttatgccttgtctcctaattgcagggctgaggacagtgagctcttttatcagcttttagccaaggctggtctcttggttgaactaggagaaagtttaatcgatgcagcgacaggtcttgcaggttgtggaccagcctttgtctatctttttatcgaggccttggcagatgcaggtgttcagacaggattaccacgagaaatagcattgaaaatggcagcacaaactgtggtaggagctgggcaattggtccttgaaagtcagcaacatcctggagtattgaaagaccaagtctgtagcccaggcggttcgactatcgctggtgtagcaagcctagaagcgcatgctttccgaggaacagtcatggatgcagttcatcaagcctacaaacgaacacaagaactaggtaaa

SEQ ID NO: 1822 - protein, 265 aa, Streptococcus pneumoniae
  pyrroline-5-carboxylate reductase (proC); Cellular location: membrane; Similar to strain R6 sequence 15902878 (e-141)
MKIGFIGLGNMGASLAKSVLQTRTSDEILLANRSQAKVDAFIADFGGQASSNEEMFAEADVIFLGVKPAQFSELLSQYQTILEKRESLLLISMAAGLTLEKLASLIPSQHRIIRMMPNTPASIGQGVISYALSPNCRAEDSELFYQLLAKAGLLVELGESLIDAATGLAGCGPAFVYLFIEALADAGVQTGLPREIALKMAAQTVVGAGQLVLESQQHPGVLKDQVCSPGGSTIAGVASLEAHAFRGTVMDAVHQAYKRTQELGK

SEQ ID NO: 1823 - DNA, 96 bp, Streptococcus pneumoniae
ttgactgcctcttttatggtggctgaaatgagaagacacaaaaagattgtcacaaacccctatttttttgatagaatagaagtagtaaaaaagaaa

SEQ ID NO: 1824 - protein, 32 aa, Streptococcus pneumoniae
  hypothetical protein; Cellular location: cytoplasm
MTASFMVAEMRRHKKIVTNPYFFDRIEVVKKK

SEQ ID NO: 1825 - DNA, 636 bp, Streptococcus pneumoniae
atgtcaaaaggatttttagtctctcttgagggaccagagggagcaggcaagaccagtgttttagaggctctgctaccaattttagaggaaaaaggagtagaggtgttgacgacccgtgaacctggcggagtcttgattggggagaagattcgggaagtgattttggatccaagtcatactcagatggatgctaaaacagagctacttctctatattgccagtcgcagacagcatttggtggaaaaagttcttccagcccttgaagctggcaagttggtcatcatggatcgttttatcgatagttctgttgcctatcagggatttggtcgtggcttagatattgaagccattgactggctcaatcagtttgcgacagatggcctcaaacccgatttgacactctattttgacatcgaggtggaagaagggctggctcgtattgctgctaatagtgaccgcgaggttaatcgtttggatttggaagggttggacttgcataaaaaagttcgtcaaggctacctttctcttctggataaagagggaaatcgcattgtcaagattgatgctagtctccctttggagcaagttgtggaaactaccaaggctgtcttgtttgacggaatgggcttggccaaa

SEQ ID NO: 1826 - protein, 212 aa, Streptococcus pneumoniae [sequence omitted]

SEQ ID NO: 1827 - DNA, 249 bp, Streptococcus pneumoniae
ttgctccaaagggagactagcatcaatcttgacaatgcgatttccctctttatccagaagagaaaggtagccttgacgaacttttttatgcaagtccaacccttccaaatccaaacgattaacctcgcggtcactattagcagcaatacgagccagcccttcttccacctcgatgtcaaaatagagtgtcaaatcgggtttgaggccatctgtcgcaaactgattgagccagtcaatggcttcaatatc

SEQ ID NO: 1828 - protein, 83 aa, Streptococcus pneumoniae
  hypothetical protein
MLQRETSINLDNAISLFIQKRKVALTNFFMQVQPFQIQTINLAVTISSNTSQPFFHLDVKIECQIGFEAICRKLIEPVNGFNI

SEQ ID NO: 1829 - DNA, 888 bp, Streptococcus pneumoniae
atgaaacaagatcaactaaaggcttggcaaccagctcagtttgaccgttttgtccgtatcttagaacaagaccagctcaatcacgcctatctcttttcaggtttctttgaaagcttggaaatggcgcaatttttagctaagagcctcttttgtacggataaagttggcgtcttaccatgtgagaaatgccgaagttgcaagctgattgaacagggagaatttcccgatgtcaccttgattaaaccagttaatcaggtcattaagacggaacgcattcgagaattggtgggtcagttttctcaagcagggattgaaagccagcaacaggtctttatcatcgagcaagcggataaaatgcatcccaacgcagccaattctctgctcaaggtcatcgaagaaccccagagtgaagtttatattttcttcttgactagcgatgaggaaaagatgttaccgacaatccgaagtcggactcagatcttccactttaaaaagcaagaagaaaaacttatcttactcttagaacaaatgggacttgttaagaaaaaagcgactcttttagctaagtttagtcaatcgcgagctgaagcagaaaagttggctaatcaggcaagtttttggaccttggtcgatgaaagtgaacgcctgctgacttggttagtagctaagaaaaaagaaagttatctacaggttgccaaattagccaacttggcagatgataaggaaaaacaggatcaggttttacggattcttgaagttctctgtgggcaggacctcttgcaggtaagagtaagagtgattctacaagatttactagaagctagaaaaatgtggcaagctaatgtcagctttcaaaatgccatggaatatctggtcttgaaagaaata

SEQ ID NO: 1830 - protein, 296 aa, Streptococcus pneumoniae
  DNA polymerase III, delta prime subunit (holB); Cellular location: cytoplasm; Similar to strain R6 sequence 15902880 (e-164)
MKQDQLKAWQPAQFDRFVRILEQDQLNHAYLFSGFFESLEMAQFLAKSLFCTDKVGVLPCEKCRSCKLIEQGEFPDVTLIKPVNQVIKTERIRELVGQFSQAGIESQQQVFIIEQADKMHPNAANSLLKVIEEPQSEVYIFFLTSDEEKMLPTIRSRTQIFHFKKQEEKLILLLEQMGLVKKKATLLAKFSQSRAEAEKLANQASFWTLVDESERLLTWLVAKKKESYLQVAKLANLADDKEKQDQVLRILEVLCGQDLLQVRVRVILQDLLEARKMWQANVSFQNAMEYLVLKEI

SEQ ID NO: 1831 - DNA, 315 bp, Streptococcus pneumoniae
atggacaaaaaagaattatttgacgcgctggatgatttttcccaacaattattggtaaccttagccgatgtggaagccatcaagaaaaatctcaagagcctggtagaggaaaatacagctcttcgcttggaaaatagtaagttgcgagaacgcttgggtgaggtggaagcagatgctcctgtcaaggccaagcatgttcgtgaaagtgtccgtcgcatttaccgtgatggatttcacgtatgtaatgatttttatggacaacgtcgagagcaggacgaggaatgtatgttttgtgacgagttgctatacagggag

SEQ ID NO: 1832 - protein, 105 aa, Streptococcus pneumoniae
  conserved hypothetical protein; Cellular location: cytoplasm; Similar to strain R6 sequence 15902881 (4.E-57)
MDKKELFDALDDFSQQLLVTLADVEAIKKNLKSLVEENTALRLENSKLRERLGEVEADAPVKAKHVRESVRRIYRDGFHVCNDFYGQRREQDEECMFCDELLYRE

SEQ ID NO: 1833 - DNA, 867 bp, Streptococcus pneumoniae
atgcagattcaaaaaagttttaaggggcagtctccctatggcaagctgtatctagtggcaacgccgattggcaatctagatgatatgacttttcgtgctatccagaccttgaaagaagtggactggattgctgctgaggatacgcgcaatacagggcttttgctcaagcattttgacatttccaccaagcagatcagttttcatgagcacaatgccaaggaaaaaattcctgatttgattggtttcttgaaagcagggcaaagtattgctcaggtctctgatgccggtttgcctagcatttcagaccctggtcatgatttagttaaggcagctattgaggaagaaattgcagttgtgacagttccaggtgcctctgcaggaatttctgccttgattgccagtggtttagcgccacagccacatatcttttacggttttttaccgagaaaatcaggtcagcagaagcaattttttggcttgaaaaaagattatcctgaaacacagattttttatgaatcacctcatcgtgtagcagacacgttggaaaatatgttagaagtctacggtgaccgctccgttgtcttggtcagggaattgaccaaaatctatgaagaataccaacgaggtactatctctgagttattagaaagcattgctgaaacgccactcaagggcgaatgtcttctcattgttgagggtgccagtcagggtgtggaggaaaaggacgaggaagacttgttcgtagaaattcaaacccgcatccagcaaggtgtgaagaaaaaccaagctatcaaggaagtcgctaagatttaccagtggaataaaagtcagctctacgctgcctaccacgactgggaagaaaaacaa

SEQ ID NO: 1834 - protein, 289 aa, Streptococcus pneumoniae
  tetrapyrrole methylase family protein; Cellular location: membrane; Similar to strain R6 sequence 15902882 (e-165)
MQIQKSFKGQSPYGKLYLVATPIGNLDDMTFRAIQTLKEVDWIAAEDTRNTGLLLKHFDISTKQISFHEHNAKEKIPDLIGFLKAGQSIAQVSDAGLPSISDPGHDLVKAAIEEEIAVVTVPGASAGISALIASGLAPQPHIFYGFLPRKSGQQKQFFGLKKDYPETQIFYESPHRVADTLENMLEVYGDRSVVLVRELTKIYEEYQRGTISELLESIAETPLKGECLLIVEGASQGVEEKDEEDLFVEIQTRIQQGVKKNQAIKEVAKIYQWNKSQLYAAYHDWEEKQ

SEQ ID NO: 1835 - DNA, 516 bp, Streptococcus pneumoniae
ttgcgaacatacgaaaataaagaagaactaaaagctgagatagagaaaacatttgagaaatatattttagaatttgataatattccagaaaatttaaaagataagagagctgatgaagttgacagaactccagcagaaaaccttgcttatcaggttggttggaccaacttggttcttaaatgggaagaagatgaaagaaaggggcttcaagtaaaaacaccatcggataaatttaaatggaatcaacttggtgaattatatcagtggttcacagatacctacgctcatttatctctgcaagagttgaaagcaaaattaaatgaaaatattaattctatctctgcaatgattgattcgttgagtgaggaagaattatttgaaccgcatatgagaaagtgggctgatgaagcgactaaaacagcgacttgggaagtgtataagtttattcatgtaaatacggttgcaccttttggaactttcagaactaaaatcagaaaatggaagaagatagtatta

SEQ ID NO: 1836 - protein, 172 aa, Streptococcus pneumoniae
  conserved hypothetical protein; Cellular location: cytoplasm; Similar to strain R6 sequence 15902883 (e-100)
MRTYENKEELKAEIEKTFEKYILEFDNIPENLKDKRADEVDRTPAENLAYQVGWTNLVLKWEEDERKGLQVKTPSDKFKWNQLGELYQWFTDTYAHLSLQELKAKLNENINSISAMIDSLSEEELFEPHMRKWADEATKTATWEVYKFIHVNTVAPFGTFRTKIRKWKKIVL

SEQ ID NO: 1837 - DNA, 114 bp, Streptococcus pneumoniae
ttggtaaccatttttatgaaattttttaaagttaaaaatataatttataatactatcttcttccattttctgattttagttctgaaagttccaaaaggtgcaaccgtatttaca

SEQ ID NO: 1838 - protein, 38 aa, Streptococcus pneumoniae
  hypothetical protein
MVTIFMKFFKVKNIIYNTIFFHFLILVLKVPKGATVFT

SEQ ID NO: 1839 - DNA, 282 bp, Streptococcus pneumoniae
atggactttgaatatttttataacagagaagcggaaagatttaacttcttaaaagtaccggagatattagttgatagagaagaatttcggggcttatcagcagaagcaattatcctttattccatacttcttaaacagacaggaatgtcatttaagaataactggatagacaaggaaggcagagtatttatctattttactgtcgaagaaattatgaaaagaagaaatatctcaaagccaactgccataaaaacattagatgagcttgatgtaaaaaaggaa

SEQ ID NO: 1840 - protein, 94 aa, Streptococcus pneumoniae
  replication initiator protein, truncation FRAMESHIFT
MDFEYFYNREAERFNFLKVPEILVDREEFRGLSAEAIILYSILLKQTGMSFKNNWIDKEGRVFIYFTVEEIMKRRNISKPTAIKTLDELDVKKE

SEQ ID NO: 1841 - DNA, 297 bp, Streptococcus pneumoniae
atgagtatatttcaggtaaaagaaaatgacttacagaagtcaaaaaacttaacttcagaagtaaaagattttaacctcagaagtaaagaaaatgaacttcaagaggttaagaaccttgactctaactatatagagaataataagagtaagtatagtaagagagaatatagttttggtgaaaacggacttggaacatttcaaaatgtgtttttagctgctgaagatatatcggatttacaaatcataatgaactcacagcttgagaattacattagacttcctgcaaaactagaatcc

SEQ ID NO: 1842 - protein, 99 aa, Streptococcus pneumoniae
  hypothetical protein
MSIFQVKENDLQKSKNLTSEVKDFNLRSKENELQEVKNLDSNYIENNKSKYSKREYSFGENGLGTFQNVFLAAEDISDLQIIMNSQLENYIRLPAKLES

SEQ ID NO: 1843 - DNA, 387 bp, Streptococcus pneumoniae
atgaaggctcaagcgattgtcacaagtcaagggagaattgtttctttggatatcgctgtgaactattgtcgtgatatgaagttgttcaaaatgagtcgcagaaatatcggacaagctggtaaaatcttgtctgacagtggttatcaagggctcatgaagatatatcctcaagtacaaactccacgtaaatccagcaaactcaagccgctaacagctgaagataaagcctgtaaccatgcgctatccaaggagagaagcaagattgagaacatctttgccaaagtaaaaacgtttaaaatgttttcaacaatctatcgaaatcatcgtaaacgcttcggattacgaatgaatttgattgctggcattatcaatcatgaactaggattc

SEQ ID NO: 1844 - protein, 129 aa, Streptococcus pneumoniae
  IS1381, transposase OrfB FRAMESHIFT; Cellular location: cytoplasm; Similar to strain R6 sequence 15903038 (3.E-66)
MKAQAIVTSQGRIVSLDIAVNYCRDMKLFKMSRRNIGQAGKILSDSGYQGLMKIYPQVQTPRKSSKLKPLTAEDKACNHALSKERSKIENIFAKVKTFKMFSTIYRNHRKRFGLRMNLIAGIINHELGF

SEQ ID NO: 1845 - DNA, 396 bp, Streptococcus pneumoniae
atgaatgatgaagcaagtaaacaactaactgatgcacgatttaagcgtcttgttggtgttcagcgcacgacttttgaagagatattagctgtattaaaaacagcttatcaacttaaacacgcaaaaggtggacgaaaacctaaattaagcctagaagaccttcttatggccactcttcaatatgtgcgagaatatcgaacttatgaacaaattgcggctgattttggtattcacgaaagcaacttaatccgtcggagccaatgggttgaagtaactcttgttcaaagtggtgttacgatttcaagaactcctctcagttctgaggacacggtaatgattgatgcgacggaagtaaaaatcaatcgccctaaaaaaagaattagcgaatcattctgg

SEQ ID NO: 1846 - protein, 132 aa, Streptococcus pneumoniae
  IS1381, transposase OrfA FRAMESHIFT; Cellular location: cytoplasm; Similar to strain R6 sequence 15902886 (4.E-67)
MNDEASKQLTDARFKRLVGVQRTTFEEILAVLKTAYQLKHAKGGRKPKLSLEDLLMATLQYVREYRTYEQIAADFGIHESNLIRRSQWVEVTLVQSGVTISRTPLSSEDTVMIDATEVKINRPKKRISESFW

SEQ ID NO: 1847 - DNA, 270 bp, Streptococcus pneumoniae
ttgtttacttgcttcatcattcatagaactactataccatattttgtttcgcaggaagtctattggaaagtaagaaatattgaagctgaggctattagaagaaattgtgagcgtggtgctattttttcaggtaaaataaaatatcacgaagattcacagtttaaaggagatcactatgttgaatgttatgctgttttagataatacggttatagcaagagatagaataacagtccctatcgatccgttatgtggaaaagattttatagag

SEQ ID NO: 1848 - protein, 90 aa, Streptococcus pneumoniae
  hypothetical protein, fusion
MFTCFIIHRTTIPYFVSQEVYWKVRNIEAEAIRRNCERGAIFSGKIKYHEDSQFKGDHYVECYAVLDNTVIARDRITVPIDPLCGKDFIE

SEQ ID NO: 1849 - DNA, 1404 bp, Streptococcus pneumoniae
ttgtgggtgtcaaacagcccagtggggtgttttaatatggacttaggtcccacccaaagaggtattagtgtcgtgtctcaatcttatatcaatgttatcggtgctggtttggcaggttctgaagcagcttaccaaatcgcagagcgtggtattccagttaaactatatgaaatgcgtggtgtcaagtctacaccccagcataaaacagacaattttgctgagttggtttgttccaattctttgcgtggggatgctttgacaaatgcagttggtcttctcaaggaagaaatgcgtcgcttgggttctgttatcttggaatctgctgaggctacacgtgttcctgcaggtggtgcccttgcagtggaccgtgatggtttctctcaaatggtgaccgaaaaagttgccaaccaccccttgattgaagtggttcgtgatgaaattacagaattgccgacagatgttattacggttatcgctactggtcctttgacaagtgatgccttggctgaaaagattcatgctcttaatgacggtgctggtttttatttctacgatgcggcagcgcctattatcgatgtcaacactatcgatatgagcaaggtctacctcaaatcacgttatgataagggagaagcggcctacctcaatgcccctatgaccaagcaagaatttatggatttccatgaagctttggtcaatgcagaagaagcaccgcttagttcttttgaaaaagaaaagtactttgaaggatgtatgcctatcgaagtcatggccaaacgtggcattaaaactatgctttatggccctatgaagccagtcggtcttgagtacccagacgactatacaggacctcgtgatggagaatttaaaacaccttatgcggttgtgcaacttcgtcaggataatgcagctggtagcctctacaatattgttggtttccagacccacctcaaatggggagaacaaaagcgtgtcttccaaatgattccgggtcttgaaaatgcggagtttgtccgttatggtgtgatgcatcgcaattcttacatggattcaccaaatcttcttgagcagacttaccgttctaagaaacaaccaaatctcttctttgctggtcaaatgacgggtgtggaaggctatgttgagtcggcggcttcaggcttagttgcgggaattaacgcagctcgtctcttcaaggaagaaagcgaggctattttccccgagacgacagcgattggaagcttagctcattacattacccatgccgacagcaaacatttccaaccaatgaatgtcaattttgggatcatcaaggagttggaaggcgagcgtatccgtgataagaaggctcgttatgaaaaaattgcagagcgtgcccttgccgacttagaggaatttttgactgtc

SEQ ID NO: 1850 - protein, 468 aa, Streptococcus pneumoniae
  Gid protein (gid); Cellular location: cytoplasm; Feature of note: RGD motif; Similar to strain R6 sequence 15902888 (0.E+01)
MWVSNSPVGCFNMDLGPTQRGISVVSQSYINVIGAGLAGSEAAYQIAERGIPVKLYEMRGVKSTPQHKTDNFAELVCSNSLRGDALTNAVGLLKEEMRRLGSVILESAEATRVPAGGALAVDRDGFSQMVTEKVANHPLIEVVRDEITELPTDVITVIATGPLTSDALAEKIHALNDGAGFYFYDAAAPIIDVNTIDMSKVYLKSRYDKGEAAYLNAPMTKQEFMDFHEALVNAEEAPLSSFEKEKYFEGCMPIEVMAKRGIKTMLYGPMKPVGLEYPDDYTGPRDGEFKTPYAVVQLRQDNAAGSLYNIVGFQTHLKWGEQKRVFQMIPGLENAEFVRYGVMHRNSYMDSPNLLEQTYRSKKQPNLFFAGQMTGVEGYVESAASGLVAGINAARLFKEESEAIFPETTAIGSLAHYITHADSKHFQPMNVNFGIIKELEGERIRDKKARYEKIAERALADLEEFLTV

SEQ ID NO: 1851 - DNA, 741 bp, Streptococcus pneumoniae
gtgaaaatggcgaatcccaagtataaacgtattttaatcaagttatcaggtgaagcccttgccggtgaacgtggcgtagggattgatatccaaacagttcaaacaatcgcaaaagagattcaagaagttcatagcttaggtatcgaaattgcccttgttatcggtggaggaaatctctggcgtggagaacctgcagcagaagcaggtatggaccgtgttcaggcagattacacaggaatgcttgggactgttatgaatgctcttgtgatggcagattcattgcaacaagttggggttgatacgcgtgtacaaacagctattgccatgcaacaagtggcagagccttatgtccgtggacgtgcccttcgtcaccttgaaaaaggccgtatcgttatctttggtgctggaattggttcaccttacttctcgacagatacaacagcggcccttcgtgcagctgaaatcgaagcagatgccatcctcatggctaaaaatggtgtcgatggtgtttacaatgccgatcctaagaaagataagacagctgttaagtttgaagaattgacccaccgtgacgttatcaataaaggtcttcgtatcatggactcaacagcttcaaccctctcaatggacaacgacattgacttggttgtattcaacatgaaccaaccaggcaacatcaaacgtgtcgtatttggtgaaaatatcggaacaacagtttcaaataatatcgaagaaaaggaa

SEQ ID NO: 1852 - protein, 247 aa, Streptococcus pneumoniae
  uridylate kinase (pyrH); Cellular location: cytoplasm; Similar to strain R6 sequence 15902889 (e-136)
MKMANPKYKRILIKLSGEALAGERGVGIDIQTVQTIAKEIQEVHSLGIEIALVIGGGNLWRGEPAAEAGMDRVQADYTGMLGTVMNALVMADSLQQVGVDTRVQTAIAMQQVAEPYVRGRALRHLEKGRIVIFGAGIGSPYFSTDTTAALRAAEIEADAILMAKNGVDGVYNADPKKDKTAVKFEELTHRDVINKGLRIMDSTASTLSMDNDIDLVVFNMNQPGNIKRVVFGENIGTTVSNNIEEKE

SEQ ID NO: 1853 - DNA, 555 bp, Streptococcus pneumoniae
atggctaacgcaattattgaaaaagctaaagagagaatgacccagtctcaccaatcacttgctcgtgaatttggtggtatccgtgctggtcgtgccaatgcaagcttgcttgaccgtgtacatgtagaatactatggagtcgaaactcctcttaaccaaatcgcttcaattacgattccagaagcgcgtgttttgttggtaacaccatttgacaagtcttcattgaaagacatcgaacgtgccttgaacgcttctgatattggtatcacaccggctaatgacggttctgtgattcgcttggttatcccagctcttacagaagaaactcgtcgtgaccttgctaaagaagtgaagaaggtcggcgaaaatgctaaagtggctgtccgcaatatccgtcgcgatgctatggacgaagctaagaaacgagaaaaagcaaaagaaatcactgaagacgaattgaagactcttgaaaaagacattcaaaaagtaacagacgatgctgttaaacacatcgacgacatgactgctaacaaagagaaagaacttttggaagtc

SEQ ID NO: 1854 - protein, 185 aa, Streptococcus pneumoniae
  ribosome recycling factor (frr); Cellular location: cytoplasm; Similar to strain R6 sequence 15902890 (8.E-98)
MANAIIEKAKERMTQSHQSLAREFGGIRAGRANASLLDRVHVEYYGVETPLNQIASITIPEARVLLVTPFDKSSLKDIERALNASDIGITPANDGSVIRLVIPALTEETRRDLAKEVKKVGENAKVAVRNIRRDAMDEAKKREKAKEITEDELKTLEKDIQKVTDDAVKHIDDMTANKEKELLEV

SEQ ID NO: 1855 - DNA, 852 bp, Streptococcus pneumoniae
atgaatacaaatcttgcaagttttatcgttggactgatcatcgatgaaaacgaccgtttttactttgtgcaaaaggatggtcaaacctatgctcttgctaaggaagaaggccaacatacagtaggggatacggtcaaaggttttgcatacacggatatgaagcaaaaactccgcctgacaaccttagaagtgactgccactcaggaccaatttggttggggacgtgtcacagaggttcgtaaggacttgggtgtctttgtggatacaggccttcctgacaaggaaatcgttgtgtcactcgatattctccctgagctcaaggaactctggcctaagaagggcgaccaactctacatccgtcttgaagtggataagaaagaccgtatctggggcctcttggcttatcaagaagacttccaacgtcttgctcgtcctgcctacaacaacatgcagaaccaaaactggccagccattgtttaccgtctcaagctgtcaggaacttttgtttacctaccagaaaataatatgcttggttttattcatcctagcgagcgttacgcagagccacgtttggggcaagtattagatgcgcgcgttattggtttccgtgaagtggaccgcactctgaacctctccctcaaaccacgctcctttgaaatgttggaaaacgatgctcagatgattttgacttatttggaaagcaatggcggtttcatgaccttaaatgacaagtcatctccagacgacatcaaggcaacctttggcatttctaaaggtcagttcaagaaagctttaggtggtcttatgaaggctggtaaaatcaagcaggaccagtttgggacagagttgatt

SEQ ID NO: 1856 - protein, 284 aa, Streptococcus pneumoniae
  conserved hypothetical protein; Cellular location: cytoplasm; Similar to strain R6 sequence 15902891 (e-164)
MNTNLASFIVGLIIDENDRFYFVQKDGQTYALAKEEGQHTVGDTVKGFAYTDMKQKLRLTTLEVTATQDQFGWGRVTEVRKDLGVFVDTGLPDKEIVVSLDILPELKELWPKKGDQLYIRLEVDKKDRIWGLLAYQEDFQRLARPAYNNMQNQNWPAIVYRLKLSGTFVYLPENNMLGFIHPSERYAEPRLGQVLDARVIGFREVDRTLNLSLKPRSFEMLENDAQMILTYLESNGGFMTLNDKSSPDDIKATFGISKGQFKKALGGLMKAGKIKQDQFGTELI

SEQ ID NO: 1857 - DNA, 213 bp, Streptococcus pneumoniae
atgagaaaatcattttacacttggctcatgaccgagcgcaatcctaaaagtaacagtcccaaagcaattttggcagacctcgcttttgaagagtcagcctttccaaaacacacagatgattttgatgaggtcagtcgctttttggaggagcatgccagtttctcttttaacctaggagattttgacagcatttggcaggaatatctagaacac

SEQ ID NO: 1858 - protein, 71 aa, Streptococcus pneumoniae
  conserved hypothetical protein; Cellular location: cytoplasm; Similar to strain R6 sequence 15902892 (9.E-39)
MRKSFYTWLMTERNPKSNSPKAILADLAFEESAFPKHTDDFDEVSRFLEEHASFSFNLGDFDSIWQEYLEH

SEQ ID NO: 1859 - DNA, 966 bp, Streptococcus pneumoniae
ttgaaggaacattcaatagacattcaactgagtcatccagatgacctgtttcatctttttggttccaatgaacgccatcttcgtttgatggaagaagagcttgatgttgtgattcatgctcgtacggagattgtccaggttttgggagaagagtctgcctgtgaggaagcccgtcaagttattcaggctttgatggtcttggtaaatcgtgggatgaccgttggtacgccagatgtagtcactgcgattagcatggtcaaaaatgatgaaattgacaagtttgtcgccctttacgaagaagaaattatcaaggataatactgggaaacctatccgtgtcaaaaccctagggcaaaagctttatgtggacagtgtcaaacagcatgatgtgacctttggaattgggccagcaggtacagggaagaccttccttgcagtgaccttggcagtgactgcccttaaacgtgggcaagtcaagcgaattatcctaactcgtccagcggtggaagcgggagagagtcttggatttcttccgggtgatcttaaggagaaggtggatccttaccttcgtcctgtttacgatgccttgtatcaaattcttgggaaagaccaaacgactcgtctcatggagcgtgaaattatcgaaattgcgccccttgcctatatgcgtggccggaccttggatgatgcctttgtcattctcgatgaggcgcaaaacacgaccatcatgcagatgaagatgttcttgacgcgtttaggttttcattctaagatgattgtcaatggagatattagtcagattgacctgccacgtaatgtcaagtccggtttgattgatgctcaagagaaactcaagaacatccatcagattgactttgttcatttttcagccaaggatgtggttcgccatcctgttgtcgctcagattatccgagcctatgaatattctactgaagttgcacacgac

SEQ ID NO: 1860 - protein, 322 aa, Streptococcus pneumoniae
  PhoH family protein; Cellular location: cytoplasm; Similar to strain R6 sequence 15902893 (0.E+01)
MKEHSIDIQLSHPDDLFHLFGSNERHLRLMEEELDVVIHARTEIVQVLGEESACEEARQVIQALMVLVNRGMTVGTPDVVTAISMVKNDEIDKFVALYEEEIIKDNTGKPIRVKTLGQKLYVDSVKQHDVTFGIGPAGTGKTFLAVTLAVTALKRGQVKRIILTRPAVEAGESLGFLPGDLKEKVDPYLRPVYDALYQILGKDQTTRLMEREIIEIAPLAYMRGRTLDDAFVILDEAQNTTIMQMKMFLTRLGFHSKMIVNGDISQIDLPRNVKSGLIDAQEKLKNIHQIDFVHFSAKDVVRHPVVAQIIRAYEYSTEVAHD

SEQ ID NO: 1861 - DNA, 812 bp, Streptococcus pneumoniae
atggaaacagtatacgacaaagcacaaaaacttaactcaaaaaacttcaaactattgattggtgtcaaaaaggaaacctttcaactcatgctagaacacctgaattcagcctatcagattcagcaccgaaaaggtggacgtccacgtagtctgcccatggaagaccagctcattatgaccctccgttacttgcgatattatcccactcagcgtctgctggcctttgattttggcgtcggtgtagctacggtaaatgccatcatcacttgggtggaggatacacttcgtgcgtcaggtagctttgatttggaccatttagaagccccgagtgctgctgtggctattgacgtgaccgaaagtccgattcagcgtccaaacaaaaccaaagcaaaaattattctggtaaaaagaaacgacacaccttaaaaactcaaattatgctggatttgacgacacataaagtctgtcaaatggccttttctgacggacatacgcatgattttactctcttcaaagaaagtattggacaaagtttgcctgaaacgacgcttgcctttgttgacctaggttatttaggcatcttgaaatttcatgagaatactttcattcctgctaaaaattccaaaaatcgccgcctgagtgaggatgataagcagttaaataaagagatgtcagcgatacgaattgaaattgaacattttaacgctaaattcaagaccttccaaatcatgtcagtcccttatcgtaaccgcagaaaacgtttcgagttacgggcggaattaatttgtgccatcatcaattatgaagtgaac

SEQ ID NO: 1862 - protein, 153 aa, Streptococcus pneumoniae
  IS1515, transposase FRAMESHIFT
MFGNCKKCYTIFMETVYDKAQKLNSKNFKLLIGVKKETFQLMLEHLNSAYQIQHRKGGRPRSLPMEDQLIMTLRYLRYYPTQRLLAFDFGVGVATVNAIITWVEDTLRASGSFDLDHLEAPSAAVAIDVTESPIQRPNKTKAKIILVKRNDTP

SEQ ID NO: 1863 - DNA, 375 bp, Streptococcus pneumoniae
atgctggatttgacgacacataaagtctgtcaaatggccttttctgacggacatacgcatgattttactctcttcaaagaaagtattggacaaagtttgcctgaaacgacgcttgcctttgttgacctaggttatttaggcatcttgaaatttcatgagaatactttcattcctgctaaaaattccaaaaatcgccgcctgagtgaggatgataagcagttaaataaagagatgtcagcgatacgaattgaaattgaacattttaacgctaaattcaagaccttccaaatcatgtcagtcccttatcgtaaccgcagaaaacgtttcgagttacgggcggaattaatttgtgccatcatcaattatgaagtgaac

SEQ ID NO: 1864 - protein, 125 aa, Streptococcus pneumoniae
  transposase
MLDLTTHKVCQMAFSDGHTHDFTLFKESIGQSLPETTLAFVDLGYLGILKFHENTFIPAKNSKNRRLSEDDKQLNKEMSAIRIEIEHFNAKFKTFQIMSVPYRNRRKRFELRAELICAIINYEVN

SEQ ID NO: 1865 - DNA, 111 bp, Streptococcus pneumoniae
ttgcaaaatttggctctggtggacaatgctgaaaatacagaggattactttcatataaagataaaatacttggaatatccttttcagttagtatcctacaactgtaatact

SEQ ID NO: 1866 - protein, 37 aa, Streptococcus pneumoniae
  hypothetical protein
MQNLALVDNAENTEDYFHIKIKYLEYPFQLVSYNCNT

SEQ ID NO: 1867 - DNA, 498 bp, Streptococcus pneumoniae
atgattgaccaactatctaagtattacagttgtaggatactaactgaaaaggatattccaagtattttatctttatatgaaagtaatcctctgtattttcagcattgtccaccagagccaaattttgcaactgtaaaagaggacatgctttgtctacctgaaggtaaagctaaggctgataagttttttgttggattttggaatggatctgaccttgtggctgttatggattttgtctatgcatatcctgatgaggagactgtttttattggtttgtttatggttgatcaagcctatcagagaaaagggattggtagtcatattgtgacagaagcactagcttattttgctaagaactttcgaaaggcacgtttggcttatgttaagggaaatccgcaatctcagcatttttgggaaaagcagggctttaaatcaattggatgcgaggttaagcaagaactctatacggttgttatcgctgaacagagcctagaagat

SEQ ID NO: 1868 - protein, 166 aa, Streptococcus pneumoniae
  acetyltransferase, GNAT family; Cellular location: cytoplasm; Similar to strain R6 sequence 15902894 (1.E-96)
MIDQLSKYYSCRILTEKDIPSILSLYESNPLYFQHCPPEPNFATVKEDMLCLPEGKAKADKFFVGFWNGSDLVAVMDFVYAYPDEETVFIGLFMVDQAYQRKGIGSHIVTEALAYFAKNFRKARLAYVKGNPQSQHFWEKQGFKSIGCEVKQELYTVVIAEQSLED

SEQ ID NO: 1869 - DNA, 225 bp, Streptococcus pneumoniae
atggcatcaagtaagaactatttggaatttgttttggaacaattatcaggattagatgatgtgacttaccgttccatgatgggggagtatattctttacttccgcggcaagattattggcggcatttatgacgatcgctttttagttaaacccgtgcaagcagtcttagataagattgaccaatcttcttttgagtttccatacaaaggtgccaaagaaatgatt

SEQ ID NO: 1870 - protein, 75 aa, Streptococcus pneumoniae
  conserved hypothetical protein; Cellular location: cytoplasm; Similar to strain R6 sequence 15902895 (4.E-39)
MASSKNYLEFVLEQLSGLDDVTYRSMMGEYILYFRGKIIGGIYDDRFLVKPVQAVLDKIDQSSFEFPYKGAKEMI

SEQ ID NO: 1871 - DNA, 273 bp, Streptococcus pneumoniae
gtgacaacgcacgatgaacccgtctatgaaaaacacggtgttctccactatgccgttgccaatatccctggtgcggttgctcgcacttcaaccatcgccctaaccaatgtcactcttccttatatcgaagctttggctggcaaaggattcgcacaagcaatctctgaagatgaaggcttgcgtcaaggtgtgactacttatcaaggttacttgactaacctaccagttgctcaaggacttaatcgtgactacactgatatcaatgatttagta

SEQ ID NO: 1872 - protein, 91 aa, Streptococcus pneumoniae
  alanine dehydrogenase-related
MTTHDEPVYEKHGVLHYAVANIPGAVARTSTIALTNVTLPYIEALAGKGFAQAISEDEGLRQGVTTYQGYLTNLPVAQGLNRDYTDINDLV

SEQ ID NO: 1873 - DNA, 1097 bp, Streptococcus pneumoniae
atgttaatcggaatcccaaaagaaattaaaaataacgaaaaccgtgtcgccctcacacctgcaggtgttcatagcttagttagtcgtggtcatcgtgtccttatcgaaacaaatgctggtctcggttctggctttactgatgctgactatcaaaagcaaggagctgagattgtcgctactgctggtgaagcttgggcagcagagttggttgtgaaagtaaaagaatctttaagttctgaatacggttacttgcgcgacgatcttcttctcttcacctacttgcacatggccgctgctccagaattagcagatgctatgttaacagcaaaaacaactgaaactgttcgtgacaatcaaggacaactaccgctcctcgttcctatgagtgaggttgcaggtcgtatggctgttcaaatcggagctcacttccttactaagcaagctggtggctctggtgttctacttggtggtgtaccaggtgttccaaaaggaaaagtaactatcatcggtggtggtgtcgtcggtacacatgctgcccgcatcgcccttggtcttggtgctcaagtgactattttagatattagttccaagcgtctctcagttctagaagaagtctttggaagtcaaattcaaactcttatgtctaattcattcaacattgaagcaagtgtgagagatgctgatgtggtgattggagccattctcatccctggtgcaaaagcaccggaattggtgacagatgagatggtcaaacaaatgcgtccaggctctgtatcgttgacgttgctgttgaccaaggtggcgttatcgaaacagctgaccgtgtgacaacgcacgatgaacccgtctatgaaaaacacggtgttctccactatgccgttgccaatatccctggtgcggttgctcgcacttcaaccatcgccctaaccaatgtcactcttccttatatcgaagctttggctggcaaaggattcgcacaagcaatctctgaagatgaaggcttgcgtcaaggtgtgactacttatcaaggttacttgactaacctaccagttgctcaaggacttaatcgtgactacactgatatcaatgatttagta

SEQ ID NO: 1874 - protein, 275 aa, Streptococcus pneumoniae
  alanine dehydrogenase, FRAMESHIFT (ald)
MLIGIPKEIKNNENRVALTPAGVHSLVSRGHRVLIETNAGLGSGFTDADYQKQGAEIVATAGEAWAAELVVKVKESLSSEYGYLRDDLLLFTYLHMAAAPELADAMLTAKTTETVRDNQGQLPLLVPMSEVAGRMAVQIGAHFLTKQAGGSGVLLGGVPGVPKGKVTIIGGGVVGTHAARIALGLGAQVTILDISSKRLSVLEEVFGSQIQTLMSNSFNIEASVRDADVVIGAILIPGAKAPELVTDEMVKQMRPGSVSLTLLLTKVALSKQLTV

SEQ ID NO: 1875 - DNA, 567 bp, Streptococcus pneumoniae
atggaatcaatatttgtgaaatttgcccagtatccgtctatagaaacggagcgtttattgctcagacctgtaactttggatgatgcggaagcaatgtttgactatgcctcggacaagggtaatacacgttacacttttccaaccaatcaaagcttggaagaaaccaagaataacattgctcagttctacttggctaatcccttgggacgttggggaatagaactaaaaagcaatggtcagtttattggaaccattgacttgcacaagattgattctgttcttaagaaggcagctattggctacattatcaataaaaagtattggaatcaaggattaacgacagaagccaatcgtgctgtgattgagctagcttttgagaagatagggatgaataagttgactgcccttcacgataaggctaatcccgcgtcaggaaaggtcatggagaaatcaggcatgcgtttttcccatgcagaaccatatgcttgtatggaccagcatgaaaaaggccgaatcgtgacaagagttcattatgtcttgaccaaggaagactattttgcaaataaa

SEQ ID NO: 1876 - protein, 189 aa, Streptococcus pneumoniae
  acetyltransferase, GNAT family; Cellular location: cytoplasm; Similar to strain R6 sequence 15902899 (e-103)
MESIFVKFAQYPSIETERLLLRPVTLDDAEAMFDYASDKGNTRYTFPTNQSLEETKNNIAQFYLANPLGRWGIELKSNGQFIGTIDLHKIDSVLKKAAIGYIINKKYWNQGLTTEANRAVIELAFEKIGMNKLTALHDKANPASGKVMEKSGMRFSHAEPYACMDQHEKGRIVTRVHYVLTKEDYFANK

SEQ ID NO: 1877 - DNA, 648 bp, Streptococcus pneumoniae
atggaagcaattatcgagaaaatcaaagagtataaaatcatcgtcatctgtactggtctgggcttgcttgtaggaggatttttcctgctaaaaccagctccacaaacacctgtcaaagagacgaatttgcaggctgaagttgcagctgtttccaaggactcatcgaccgaaaaggaagtgaagaaggaagaaaaggaagaaccccttgaacaagatctaatcacagtagatgtcaaaggtgctgtcaaatcgccagggatttatgacttgcctgtaggtagtcgagtcaatgatgctgttcagaaggctggtggcttgacagagcaagcagacagcaagtcgctcaatctagctcagaaagttagtgatgaggctctggtttacgttcctactaagggagaagaagcagttagtcaacagactggttcggggacagcttcttcaacaagcaaggaaaagaaggtcaatctcaacaaggccagtctggaagaactcaagcaggtcaagggactgggaggaaaacgagctcaggacattattgaccatcgtgaggcaaatggcaagttcaagtcagtagacgagctcaagaaggtctctggcattggtggcaaaacaatagaaaagcttaaagactatgttacagtggat

SEQ ID NO: 1878 - protein, 216 aa, Streptococcus pneumoniae
  competence protein CelA (celA); Cellular location: outside; Similar to strain R6 sequence 15902900 (e-113)
MEAIIEKIKEYKIIVICTGLGLLVGGFFLLKPAPQTPVKETNLQAEVAAVSKDSSTEKEVKKEEKEEPLEQDLITVDVKGAVKSPGIYDLPVGSRVNDAVQKAGGLTEQADSKSLNLAQKVSDEALVYVPTKGEEAVSQQTGSGTASSTSKEKKVNLNKASLEELKQVKGLGGKRAQDIIDHREANGKFKSVDELKKVSGIGGKTIEKLKDYVTVD

SEQ ID NO: 1879 - DNA, 1506 bp, Streptococcus pneumoniae
atgttacagtggattaagaatttctctattcccctaatttacctgagttttctattactttggctttattacgctattttctcagcatcttatcttgctttgttgggctttgtttttctgctagtctgtctctttatccaatttccgtggaaatctgctggtaaagttctaataatttgcggaatctttggattttggtttgtttttcaaaattggcaacagagtcaagcgagtcaaaatctggcggattctgttgaaagggtacggattttgcctgatactattaaggttaatggtgatagtctatcctttcgtggcaagtctaacggtcgtgctttccaagtctattataaactccagtccgaggaggagaaagaagcctttcaagctttaactgacctgcatgagataggactagaagggaagctttcggagccagaagggcagagaaattttggtggctttaattaccaagcctatctgaagactcagggaatttaccagactctcaatatcaaaacaatccagtcacttcaaaagattggcagttgggatataggagaaaacttgtccagtttacgtcgaaaggctgtggtttggattaagacgcactttccagaccctatgggcaattacatgacaggactcttgctgggacatctggacaccgactttgaggagatgaatgagctttattccagtctaggaattatccacctctttgccctatctggcatgcaggtaggttttttcatgaatggatttaagaaacttctcttgcgattgggcttgacccaagaaaagttgaaatggctgacttatcccttttcccttatctatgcgggactaactggattttcagcatcggttattcgcagtctcttgcaaaagctactggctcaacatggggttaagggcttggataattttgccttgacggtgcttgtcctctttattgtcatgccaaactttttcttgacagcaggaggagtcttgtcctgcgcttatgcttttatcctgaccatgaccagcaaagaaggggaggggctcaaggctgttactagtgaaagtctagtcatctccttgggcatattgcccattctatccttctattttgcggaatttcaaccttggtctatccttttgacctttgtcttttcctttctttttgacttggtcttcttaccgctcttgtctatcttatttgtcctttcctttctctatccagtcattcagctgaactttatctttgaatggttagagggcattattcgcttggtctcgcaggtggcaaggagaccacttgtctttggtcaacccaacgcatggcttttaatcttattgttaatttccttggctttggtctatgatttgaggaaaaacattaaaggattaacagtattgagtttattgattacaggtctctttttccttaccaagtatccactggaaaatgaaatcaccatgctggatgtggggcaaggagaaagtattttctacgggatg

SEQ ID NO: 1880 - protein, 502 aa, Streptococcus pneumoniae
  competence protein CelB, FRAMESHIFT (celB); Cellular location: membrane; Similar to strain R6 sequence 15902901 (0.E+01)
MLQWIKNFSIPLIYLSFLLLWLYYAIFSASYLALLGFVFLLVCLFIQFPWKSAGKVLIICGIFGFWFVFQNWQQSQASQNLADSVERVRILPDTIKVNGDSLSFRGKSNGRAFQVYYKLQSEEEKEAFQALTDLHEIGLEGKLSEPEGQRNFGGFNYQAYLKTQGIYQTLNIKTIQSLQKIGSWDIGENLSSLRRKAVVWIKTHFPDPMGNYMTGLLLGHLDTDFEEMNELYSSLGIIHLFALSGMQVGFFMNGFKKLLLRLGLTQEKLKWLTYPFSLIYAGLTGFSASVIRSLLQKLLAQHGVKGLDNFALTVLVLFIVMPNFFLTAGGVLSCAYAFILTMTSKEGEGLKAVTSESLVISLGILPILSFYFAEFQPWSILLTFVFSFLFDLVFLPLLSILFVLSFLYPVIQLNFIFEWLEGIIRLVSQVARRPLVFGQPNAWLLILLLISLALVYDLRKNIKGLTVLSLLITGLFFLTKYPLENEITMLDVGQGESIFYGM

SEQ ID NO: 1881 - DNA, 654 bp, Streptococcus pneumoniae
atgacgaccagcaatgcccagcgaaccttgattccctatctcaaaagtcgaggagtagctaagattgaccagctaattttgactaacacggacaaggagcatgttggagatttgtcagagatgaccaaggctttccatgtaggggagattctagtatcaaaagacagtctgaaacagaaggaatttgtggcagaactacaggcgactcaaacaaaggtgcgtagtatgatagtaggggagaacttgcccatttttggaagtcagttagaagttctatctccaaggaaaatgggagatggaggacacgatgataccctagttctgtatgggaaattcttggataagcaatttctcttcacgggaaatttggaggagaaaggagagaaggacttgctgaagcactatccagacttgaaagtaaatgttttgaaagctagccaacatggcaataaaaaatcatcaagtccagcctttctagaaaaactcaaaccagagcttactcttatctcagttggaaagagcaatcgaatgaaactcccccatcaggaaacattgacacgactggaaggtatcaatagcaaagtttatcgaactgaccagcaaggagctatacgttttaaggggttggatagttggaaaatcgaaagtgttcga

SEQ ID NO: 1882 - protein, 218 aa, Streptococcus pneumoniae
  competence protein-related
MTTSNAQRTLIPYLKSRGVAKIDQLILTNTDKEHVGDLSEMTKAFHVGEILVSKDSLKQKEFVAELQATQTKVRSMIVGENLPIFGSQLEVLSPRKMGDGGHDDTLVLYGKFLDKQFLFTGNLEEKGEKDLLKHYPDLKVNVLKASQHGNKKSSSPAFLEKLKPELTLISVGKSNRMKLPHQETLTRLEGINSKVYRTDQQGAIRFKGLDSWKIESVR

SEQ ID NO: 1883 - DNA, 186 bp, Streptococcus pneumoniae
gtgacagtcactaaaagttacaagtatgattggaatacggtttgggaatatagtaccaactatcacgaccatcagtatgcttggattccgtcatggtctcgttatgacagctattctgagtataaagttggcggaggctggaactacgctcgttatgaggtcataaactattacagcggaggctat

SEQ ID NO: 1884 - protein, 62 aa, Streptococcus pneumoniae
  hypothetical protein; Cellular location: cytoplasm; Similar to strain R6 sequence 15902902 (2.E-34)
MTVTKSYKYDWNTVWEYSTNYHDHQYAWIPSWSRYDSYSEYKVGGGWNYARYEVINYYSGGY

SEQ ID NO: 1885 - DNA, 585 bp, Streptococcus pneumoniae
atgttgcagcttactcatgtgaccttaaaaacgcgacaagtcatcttgcaagatgtggatttcacctttaaaaagggtagggtttatggtcttcttgctatcaatggctctggaaagacgaccctgttccgtgccattagcaatttaattcccataagtagtggaaatatcgcagcccctccttctttattttattatgagagtattgaatggctggatggaaacttaagtgggatggactaccttcgtcttatcaaaaacatctggaagtcaggtctgaacttgagggatgaaatcgcctattgggaaatgtctgactatatcagtcttcccattcgcaagtattccttaggcatgaagcaacgcttggtgattgccatgtatttcctcagtcaggccaaatgctggctcatggatgagattacaaatggcttagatgagtattatcgacagaagttttttgataggctagcacaaatcgatagacaagaacagctggttcttttaagttcccactataaggaagagttggttgatgtctgcgatagagtagtaaccattcatcaggggcagatagaagaggtt

SEQ ID NO: 1886 - protein, 195 aa, Streptococcus pneumoniae
  ABC transporter, ATP-binding protein; Cellular location: cytoplasm; Similar to strain R6 sequence 15902903 (2.E-84)
MLQLTHVTLKTRQVILQDVDFTFKKGRVYGLLAINGSGKTTLFRAISNLIPISSGNIAAPPSLFYYESIEWLDGNLSGMDYLRLIKNIWKSGLNLRDEIAYWEMSDYISLPIRKYSLGMKQRLVIAMYFLSQAKCWLMDEITNGLDEYYRQKFFDRLAQIDRQEQLVLLSSHYKEELVDVCDRVVTIHQGQIEEV

SEQ ID NO: 1887 - DNA, 1182 bp, Streptococcus pneumoniae
atgaaagatgttagtctatttttattgaaaaaagttttcaaaagccgcttaaactggattgtcttagctttatttgtatctgtactcggtgttaccttttatttaaatagtcagactgcaaactcacacagcttggagagcaggttggaaagtcgcattgcagccaacgagagggctatcaatgaaaatgaagagaaactctcccaaatgtctgataccagctcggaggaataccagtttgctaaaaataatttagacgtgcaaaaaaatcttttgacgcgaaagacagaaattctgactttattaaaagaagggcgctggaaagaagcctactatttgcagtggcaagatgaagagaagaattatgaatttgtatcaaatgacccgactgctagccctggcttaaaaatgggggttgaccgcgaacggaagatttaccaagccctgtatcccttgaacataaaagcacatactttggagtttccgacccacgggattgatcagattgtctggattttagaggttatcatcccaagtttgtttgtggttgctattatttttatgctaacacaactatttgcagaaagatatcaaaatcatctggacacagctcacttatatcctgtttcaaaagtgacatttgcaatatcctctcttggagttggagtgggatatgtaactgtgctgtttatcggaatctgtggcttttcttttctagtgggaagtctgataagtggttttggacagttagattatccctacccaatttatagcttagtgaatcaagaagtaactattgggaaaatacaagatgtattatttcctggcttgctcttagctttcttagcctttatcgtcattgtggaagttgtgtacttgattgcttactttttcaagcaaaaaatgcctgtcctctttctttcactcattgggattgttggcttattgtttggtatccaaaccattcagcctcttcaaaggattgcacatctgattccctttacttacttgcgttcagtggagattttatctggaagattacctaagcagattgataatgtcgatctaaattggagcatgggaatggtcttacttccttgcctgattatctttttgctattgggaattctatttattgaaagatggggaagttcacagaaaaaagaattttttaatagattc

SEQ ID NO: 1888 - protein, 394 aa, Streptococcus pneumoniae
  hypothetical protein; Cellular location: membrane; Similar to strain R6 sequence 15902904 (0.E+01)
MKDVSLFLLKKVFKSRLNWIVLALFVSVLGVTFYLNSQTANSHSLESRLESRIAANERAINENEEKLSQMSDTSSEEYQFAKNNLDVQKNLLTRKTEILTLLKEGRWKEAYYLQWQDEEKNYEFVSNDPTASPGLKMGVDRERKIYQALYPLNIKAHTLEFPTHGIDQIVWILEVIIPSLFVVAIIFMLTQLFAERYQNHLDTAHLYPVSKVTFAISSLGVGVGYVTVLFIGICGFSFLVGSLISGFGQLDYPYPIYSLVNQEVTIGKIQDVLFPGLLLAFLAFIVIVEVVYLIAYFFKQKMPVLFLSLIGIVGLLFGIQTIQPLQRIAHLIPFTYLRSVEILSGRLPKQIDNVDLNWSMGMVLLPCLIIFLLLGILFIERWGSSQKKEFFNRF

SEQ ID NO: 1889 - DNA, 585 bp, Streptococcus pneumoniae
gtgcgggcttgtatatttacaagtccgctattgtttttctctaataaaacaaaagaggtgaaaaccatagcaaagcaagacttattcatcaatgatgagattcgtgtacgtgaagttcgcttgattggtcttgaaggagaacagctaggtatcaagccactcagtgaagcgcaagctttggctgataacgctaatgttgacctagtattgattcaaccccaagccaaaccgcctgttgcaaaaattatggactacggtaagttcaaatttgagtaccagaagaagcaaaaagaacaacgtaaaaaacaaagcgttgttactgtgaaagaagttcgtctaagtccaacaattgacaagggtgactttgatacaaaacttcgtaatgcacgtaagttccttgaaaaaggaaataaagttaaggtatctattcgctttaagggtcgtatgattacccataaagagattggtgcaaaagttttagccgagtttgctgaagcaactcaagatattgccatcatcgaacaacgtgctaaaatggatggacgtcaaatgttcatgcaattggcgccagcgactgacaaaaaa

SEQ ID NO: 1890 - protein, 195 aa, Streptococcus pneumoniae
  translation initiation factor IF-3 (infC); Cellular location: cytoplasm; Similar to strain R6 sequence 15902905 (e-100)
MRACIFTSPLLFFSNKTKEVKTIAKQDLFINDEIRVREVRLIGLEGEQLGIKPLSEAQALADNANVDLVLIQPQAKPPVAKIMDYGKFKFEYQKKQKEQRKKQSVVTVKEVRLSPTIDKGDFDTKLRNARKFLEKGNKVKVSIRFKGRMITHKEIGAKVLAEFAEATQDIAIIEQRAKMDGRQMFMQLAPATDKK

SEQ ID NO: 1891 - DNA, 198 bp, Streptococcus pneumoniae
atgccaaaacaaaaaacacaccgcgcatcagctaaacgtttcaaacgtacaggttctggtggacttaaacgtttccgtgcttacacttctcaccgtttccacggaaaaactaagaaacaacgtcgtcatcttcgtaaagcatctatggtgcattcaggagattacaaacgtatcaaagcaatgcttactcgcttgaaa

SEQ ID NO: 1892 - protein, 66 aa, Streptococcus pneumoniae
  ribosomal protein L35 (rpmI); Cellular location: cytoplasm; Similar to strain R6 sequence 15902906 (8.E-35)
MPKQKTHRASAKRFKRTGSGGLKRFRAYTSHRFHGKTKKQRRHLRKASMVHSGDYKRIKAMLTRLK

SEQ ID NO: 1893 - DNA, 357 bp, Streptococcus pneumoniae
atggcacgtgttaaaggtggcgttgtatcacgcaaacgtcgtaaacgtattcttaaattagcaaaaggttactatggagctaaacacatcttgttccgtactgcaaaagaacaagtaatgaactcttactactatgcataccgtgaccgtcgtcagaaaaaacgtgacttccgcaaattgtggattactcgtatcaatgcggcagctcgtatgaacggactttcatactcacaattgatgcatggtttgaaattggctgagatcgaagttaaccgtaaaatgcttgctgacttggctgttaacgatgcagtagctttcacagctcttgcagatgcagctaaagcaaaacttggtaaa

SEQ ID NO: 1894 - protein, 119 aa, Streptococcus pneumoniae
  ribosomal protein L20 (rplT); Cellular location: cytoplasm; Similar to strain R6 sequence 15902907 (2.E-63)
MARVKGGVVSRKRRKRILKLAKGYYGAKHILFRTAKEQVMNSYYYAYRDRRQKKRDFRKLWITRINAAARMNGLSYSQLMHGLKLAEIEVNRKMLADLAVNDAVAFTALADAAKAKLGK

SEQ ID NO: 1895 - DNA, 429 bp, Streptococcus pneumoniae
atgagactggaacaggattgtccagtcttttttaaaataaaggagaaagatatggcttcaaaaatgctacacacttgcttacgagtagaaaatcttgaaaaatcaatcgcattttatcaagatgcttttggttttaaagaattgcgtcgcagagattttccagaccatgccttcacgattgtctatctaggtcttgagggcgatgactatgagttggagttgacttataactacgatcacggtccgtatgtggttggtgatgggtttgcccatatcgccctcagtacacctgatcttgaggcacttcatcaagaacacagtgcaaaaggctatgaagtgactgagccaaatggtctaccaggaactacaccaaactattactttgtcaaagaccctgatggatataaggtcgaagtcattcgtgaaaaa

SEQ ID NO: 1896 - protein, 143 aa, Streptococcus pneumoniae
  lactoylglutathione lyase (gloA); Cellular location: cytoplasm; Similar to strain R6 sequence 15902908 (2.E-73)
MRLEQDCPVFFKIKEKDMASKMLHTCLRVENLEKSIAFYQDAFGFKELRRRDFPDHAFTIVYLGLEGDDYELELTYNYDHGPYVVGDGFAHIALSTPDLEALHQEHSAKGYEVTEPNGLPGTTPNYYFVKDPDGYKVEVIREK

SEQ ID NO: 1897 - DNA, 798 bp, Streptococcus pneumoniae
atgaatcccacatgtaagaagcgtttgggtgtcattcggttggaaaccatgaaggtggttgcacaagaggaaatcgcgccagcaatctttgaattagtcctagaaggagaaatggttgaagccatgcgagcaggccaatttcttcatctgcgtgtaccggacgatgcccatctcttacgtcgtcctatttcaatttcgtctattgacaaggcaaacaagcagtgtcacctcatttatcggattgacggagctgggactgcaattttttcaaccttaagtcagggagacactcttgatgtgatggggcctcagggaaatggttttgacttgtctgaccttgatgagcagaatcaggttctccttgttggtggtgggattggtgttccacccttgcttgaggtggccaaggaattgcatgaacgtggagtgaaagtagtgacagtcctcggttttgctaataaggatgctgttattttgaaaacggaattggctcagtatggtcaggtctttgtaacgacagatgatggttcttatggcatcaagggaaatgtttccgttgttatcaatgatttagacagtcagtttgatgctgtttactcgtgtggggctccaggaatgatgaagtatatcaatcaaacctttgatgatcacccaagagcctatttatctctggaatctcgtatggcttgtgggatgggagcttgctatgcctgtgttctaaaagtaccagaaaacgagacggtcagccaacgcgtctgtgaagatggtcctgttttccgcacaggaacagttgtatta

SEQ ID NO: 1898 - protein, 266 aa, Streptococcus pneumoniae
  dihydroorotate dehydrogenase, electron transfer subunit (pyrK); Cellular location: membrane; Similar to strain R6 sequence 15902909 (e-142)
MNPTCKKRLGVIRLETMKVVAQEEIAPAIFELVLEGEMVEAMRAGQFLHLRVPDDAHLLRRPISISSIDKANKQCHLIYRIDGAGTAIFSTLSQGDTLDVMGPQGNGFDLSDLDEQNQVLLVGGGIGVPPLLEVAKELHERGVKVVTVLGFANKDAVILKTELAQYGQVFVTTDDGSYGIKGNVSVVINDLDSQFDAVYSCGAPGMMKYINQTFDDHPRAYLSLESRMACGMGACYACVLKVPENETVSQRVCEDGPVFRTGTVVL

SEQ ID NO: 1899 - DNA, 936 bp, Streptococcus pneumoniae
atgactacaaatcgattacaagtttctctacctggtttggatttgaaaaatccgattattccagcatcaggctgttttggctttggacaagagtatgccaagtactatgatttagaccttttaggttctattatgatcaaggcgacaacccttgaaccacgttttgggaatccaactccaagagtggcagagacgcctgctggtatgctcaatgcaattggcttgcaaaatcctggtttagaggttgttttggctgaaaagctaccttggctggaaagagaatatccaaatcttcctattattgccaatgtagctggtttttcaaaacaagagtatgcagctgtttctcatgggatttccaaggcaactaatgtaaaagctatcgagctcaatatttcttgtcccaatgttgaccactgtaatcatggacttttgattggtcaagatccagatttggcttatgatgtggtgaaagcagctgtggaagcctcagaagtgccagtttatgtcaaattaaccccgagtgtgaccgatatcgttactgtcgcaaaagctgcagaagatgcgggagcaagtggcttgaccatgatcaatactctggttggaatgcgctttgacctcaaaactagaaaaccaatcttggccaatggaacaggtggaatgtctggtccagcagtctttccagtagccctcaaactcatccgccaagttgcccaaacaacagacctgcctatcattggaatgggaggagtggattcggctgaagctgccctagaaatgtatctggctggggcatctgctatcggagttggaacagctaactttaccaatccttatgcctgccctgacatcatcgaaaatttaccaaaagtcatggataaatacggtattagcagtctggaagaactccgtcaggaagtaaaagagtctctgagg

SEQ ID NO: 1900 - protein, 312 aa, Streptococcus pneumoniae
  dihydroorotate dehydrogenase B (pyrDb); Cellular location: cytoplasm; Similar to strain R6 sequence 15902910 (e-177)
MTTNRLQVSLPGLDLKNPIIPASGCFGFGQEYAKYYDLDLLGSIMIKATTLEPRFGNPTPRVAETPAGMLNAIGLQNPGLEVVLAEKLPWLEREYPNLPIIANVAGFSKQEYAAVSHGISKATNVKAIELNISCPNVDHCNHGLLIGQDPDLAYDVVKAAVEASEVPVYVKLTPSVTDIVTVAKAAEDAGASGLTMINTLVGMRFDLKTRKPILANGTGGMSGPAVFPVALKLIRQVAQTTDLPIIGMGGVDSAEAALEMYLAGASAIGVGTANFTNPYACPDIIENLPKVMDKYGISSLEELRQEVKESLR

SEQ ID NO: 1901 - DNA, 2031 bp, Streptococcus pneumoniae
atgaatttaggagaattttggtacaataaaataaataagaacagaggaagaaggttaatgaagaaagtaagatttatttttttagctctgctatttttcttagctagtccagagggtgcaatggctagtgatggtacttggcaaggaaaacagtatctgaaagaagatggcagtcaagcagcaaatgagtgggtttttgatactcattatcaatcttggttctatataaaagcagatgctaactatgctgaaaatgaatggctaaagcaaggtgacgactatttttacctcaaatctggtggctatatggccaaatcagaatgggtagaagacaagggagccttttattatcttgaccaagatggaaagatgaaaagaaatgcttgggtaggaacttcctatgttggtgcaacaggtgccaaagtaatagaagactgggtctatgattctcaatacgatgcttggttttatatcaaagcagatggacagcacgcagagaaagaatggctccaaattaaagggaaggactattatttcaaatccggtggttatctactgacaagtcagtggattaatcaagcttatgtgaatgctagtggtgccaaagtacagcaaggttggctttttgacaaacaataccaatcttggttttacatcaaagaaaatggaaactatgctgataaagaatggattttcgagaatggtcactattattatctaaaatccggtggctacatggcagccaatgaatggatttgggataaggaatcttggttttatctcaaatttgatgggaaaatggctgaaaaagaatgggtctacgattctcatagtcaagcttggtactacttcaaatccggtggttacatgacagccaatgaatggatttgggataaggaatcttggttttatctcaaatctgatgggaaaatagctgaaaaagaatgggtctacgattctcatagtcaagcttggtactacttcaaatccggtggttacatgacagccaatgaatggatttgggataaggaatcttggttttacctcaaatctgatgggaaaatagctgaaaaagaatgggtctacgattctcatagtcaagcttggtactacttcaaatctggtggctacatggcgaaaaatgagacagtagatggttatcagcttggaagcgatggtaaatggcttggaggaaaaactacaaatgaaaatgctgcttactatcaagtagtgcctgttacagccaatgtttatgattcagatggtgaaaagctttcctatatatcgcaaggtagtgtcgtatggctagataaggatagaaaaagtgatgacaagcgcttggctattactatttctggtttgtcaggctatatgaaaacagaagatttacaagcgctagatgctagtaaggactttatcccttattatgagagtgatggccaccgtttttatcactatgtggctcagaatgctagtatcccagtagcttctcatctttctgatatggaagtaggcaagaaatattattcggcagatggcctgcattttgatggttttaagcttgagaatcccttccttttcaaagatttaacagaggctacaaactacagtgctgaagaattggataaggtatttagtttgctaaacattaacaatagccttttggagaacaagggcgctacttttaaggaagccgaagaacattaccatatcaatgctctttatctccttgcccatagtgccctagaaagtaactggggaagaagtaaaattgccaaagataagaataatttctttggcattacagcctatgatacgaccccttacctttctgctaagacatttgatgatgtggataagggaattttaggtgcaaccaagtggattaaggaaaattatatcgataggggaagaactttccttggaaacaaggcttctggtatgaatgtggaatatgcttcagacccttattggggcgaaaaaattgctagtgtgatgatgaaaatcaatgagaagctaggtggcaaagat

SEQ ID NO: 1902 - protein, 677 aa, Streptococcus pneumoniae
  endo-beta-N-acetylglucosaminidase (lytB); Cellular location: outside; Feature of note: WYY motif; Similar to strain R6 sequence 15902911 (0.E+01)
MNLGEFWYNKINKNRGRRLMKKVRFIFLALLFFLASPEGAMASDGTWQGKQYLKEDGSQAANEWVFDTHYQSWFYIKADANYAENEWLKQGDDYFYLKSGGYMAKSEWVEDKGAFYYLDQDGKMKRNAWVGTSYVGATGAKVIEDWVYDSQYDAWFYIKADGQHAEKEWLQIKGKDYYFKSGGYLLTSQWINQAYVNASGAKVQQGWLFDKQYQSWFYIKENGNYADKEWIFENGHYYYLKSGGYMAANEWIWDKESWFYLKFDGKMAEKEWVYDSHSQAWYYFKSGGYMTANEWIWDKESWFYLKSDGKIAEKEWVYDSHSQAWYYFKSGGYMTANEWIWDKESWFYLKSDGKIAEKEWVYDSHSQAWYYFKSGGYMAKNETVDGYQLGSDGKWLGGKTTNENAAYYQVVPVTANVYDSDGEKLSYISQGSVVWLDKDRKSDDKRLAITISGLSGYMKTEDLQALDASKDFIPYYESDGHRFYHYVAQNASIPVASHLSDMEVGKKYYSADGLHFDGFKLENPFLFKDLTEATNYSAEELDKVFSLLNINNSLLENKGATFKEAEEHYHINALYLLAHSALESNWGRSKIAKDKNNFFGITAYDTTPYLSAKTFDDVDKGILGATKWIKENYIDRGRTFLGNKASGMNVEYASDPYWGEKIASVMMKINEKLGGKD

SEQ ID NO: 1903 - DNA, 1680 bp, Streptococcus pneumoniae
atggaatacaatcacaaggagagaacgatgtcatttgacggattttttttacaccacatagttgaggaattgcgaagcgaattagtgaatggtcgcatccagaaaatcaatcagccttttgaacaagagttggtcttgcaaatccgcagcaatcgccaaagccatcgcctgctcctttctgcccatccagtttttggacgcattcagctgacccaaacgacttttgaaaatccagctcaaccttctacctttatcatggttttgagaaagtatttgcagggggccctgattgagtcgattgagcaagtggaaaatgaccgtattgtggaaattacagtttccaataaaaacgagattggagaccatatccaggctaccttgattatcgaaattatggggaaacacagtaatattctactggtcgataaaagcagtcataaaatcctcgaagttatcaaacacgtcggcttttcacaaaatagctaccgcaccttacttccaggatcgacctatatcgctccgccaagtacaaaatctctcaatccttttactatcaaggatgaaaagctctttgaaatcctgcaaacccaagaactaacagcaaaaaatcttcaaagcctctttcaaggtctgggacgcgatacggcaaatgaattggaaaggatactggttagtgaaaaactttccgctttccgaaattttttcaatcaagaaaccaagccatgcttgactgagacttccttcagtccagttccttttgcaaatcaggtgggagagccttttgcaaatctttctgatttgttggacacctactataaggataaggctgagcgcgaccgcgtcaaacagcaggccagtgaactgattcgtcgtgttgaaaatgaacttcagaaaaaccgacacaaactcaaaaaacaggaaaaagagttactggcgacagacaacgctgaagaatttcgtcaaaaaggagaattgctgacaaccttcctccaccaagtgcctaacgaccaagaccaggttatcctagacaactactataccaaccaacctatcatgattgcgcttgataaggctctgactcccaaccagaatgcccaacgctattttaaacggtatcagaaactcaaagaagctgtcaaatacttgactgatttgattgaagaaaccaaagccactattctctatctggaaagtgtagaaaccgtcctcaaccaagctggactggaagaaatcgctgaaatccgtgaagaattgattcaaacaggttttatccgcagaagacaacgggagaaaatccagaaacgcaaaaaactagaacaatatctagcaagcgatggcaaaaccatcatctatgtcggacgaaacaatcttcaaaatgaggaattgacctttaaaatggcccgcaaggaggaactttggttccatgctaaggacattcctggaagccatgttgtcatctcaggaaatcttgacccatctgatgcagtcaagacagacgcagcagagttagctgcctacttctctcaagggcgcctgtcgaatctggtgcaggtagatatgattgaagtcaaaaaactcaataaaccaactggtggaaaacccggctttgtcacttacacaggacaaaagaccctccgcgtcacaccagactccaaaaaaattgcatccatgaaaaaatcc

SEQ ID NO: 1904 - protein, 560 aa, Streptococcus pneumoniae
  adherence and virulence protein A (pavA); Cellular location: cytoplasm; Feature of note: implicated in virulence; Similar to strain R6 sequence 15902912 (0.E+01)
MEYNHKERTMSFDGFFLHHIVEELRSELVNGRIQKINQPFEQELVLQIRSNRQSHRLLLSAHPVFGRIQLTQTTFENPAQPSTFIMVLRKYLQGALIESIEQVENDRIVEITVSNKNEIGDHIQATLIIEIMGKHSNILLVDKSSHKILEVIKHVGFSQNSYRTLLPGSTYIAPPSTKSLNPFTIKDEKLFEILQTQELTAKNLQSLFQGLGRDTANELERILVSEKLSAFRNFFNQETKPCLTETSFSPVPFANQVGEPFANLSDLLDTYYKDKAERDRVKQQASELIRRVENELQKNRHKLKKQEKELLATDNAEEFRQKGELLTTFLHQVPNDQDQVILDNYYTNQPIMIALDKALTPNQNAQRYFKRYQKLKEAVKYLTDLIEETKATILYLESVETVLNQAGLEEIAEIREELIQTGFIRRRQREKIQKRKKLEQYLASDGKTIIYVGRNNLQNEELTFKMARKEELWFHAKDIPGSHVVISGNLDPSDAVKTDAAELAAYFSQGRLSNLVQVDMIEVKKLNKPTGGKPGFVTYTGQKTLRVTPDSKKIASMKKS

SEQ ID NO: 1905 - DNA, 495 bp, Streptococcus pneumoniae
atgtatattgaaatggtagatgaaactggtcaagtttcaaaagaaatgttgcaacaaacccaagaaattttggaatttgcagcccaaaaattaggaaaagaagacaaggagatggcagtcacttttgtgaccaatgagcgtagtcatgaacttaatctggagtaccgtaacaccgaccgtccgacagatgtcatcagccttgagtataaaccagaattggaaattgcctttgacgaagaggatttgcttgaaaattcagaattggcagagatgatgtctgagtttgatgcctatattggggaattgttcatctctatcgataaggctcatgagcaggccgaagaatatggtcacagctttgagcgtgagatgggcttcttggcagtacacggctttttacatattaacggctatgatcactacactccggaagaagaagcggagatgttcggtttacaagaagaaattttgacagcctatggactcacaagacaa

SEQ ID NO: 1906 - protein, 165 aa, Streptococcus pneumoniae
  conserved hypothetical protein TIGR00043; Cellular location: cytoplasm; Similar to strain R6 sequence 15902913 (2.E-91)
MYIEMVDETGQVSKEMLQQTQEILEFAAQKLGKEDKEMAVTFVTNERSHELNLEYRNTDRPTDVISLEYKPELEIAFDEEDLLENSELAEMMSEFDAYIGELFISIDKAHEQAEEYGHSFEREMGFLAVHGFLHINGYDHYTPEEEAEMFGLQEEILTAYGLTRQ

SEQ ID NO: 1907 - DNA, 393 bp, Streptococcus pneumoniae
atggactcacaagacaataaacgaaaatggaaaaatcgtgacttgatatccagtttagaatttgctttgacaggtatttttactgctatcaaggaagaacgcaatatgcgaaaacacgcagtgacggctctagtggtcatccttgcaggttttgtttttcaggtgtcacgaatcgaatggctctttctcctattgagtattttcttggtagtagcctttgagattatcaactctgctattgaaaatgtggtggatttggccagtcactatcacttttccatgctggctaaaaatgccaaggatatggcggccggcgcggtattagtggtttctcttttcgcagccttaacaggcgcattgatttttctcccacgaatctgggatttattattt

SEQ ID NO: 1908 - protein, 131 aa, Streptococcus pneumoniae
  diacylglycerol kinase; Cellular location: membrane; Similar to strain R6 sequence 15902914 (3.E-68)
MDSQDNKRKWKNRDLISSLEFALTGIFTAIKEERNMRKHAVTALVVILAGFVFQVSRIEWLFLLLSIFLVVAFEIINSAIENVVDLASHYHFSMLAKNAKDMAAGAVLVVSLFAALTGALIFLPRIWDLLF

SEQ ID NO: 1909 - DNA, 897 bp, Streptococcus pneumoniae
atgacttttaaatcaggctttgtagccattttaggacgtcccaatgttgggaagtcaacctttttaaatcacgttatggggcaaaagattgccatcatgagtgacaaggcgcagacaacgcgcaataaaatcatgggaatttacacgactgataaggagcaaattgtctttatcgacacaccagggattcacaagcctaaaacagctctcggagatttcatggttgagtctgcctacagtacccttcgcgaagtggacactgttcttttcatggtgcctgctgatgaagcgcgtggtaagggggacgatatgattatcgagcgtctcaaggctgccaaggttcctgtgattttggtggtgaataaaatcgataaggtccatccagaccagctcttgtctcagattgatgacttccgtaatcaaatggactttaaggaaattgttccaatctcagcccttcagggaaataacgtgtctcgtctagtggatattttgagtgaaaatctggatgaaggtttccaatatttcccgtctgatcaaatcacagaccatccagaacgtttcttggtttcagaaatggttcgcgagaaagtcttgcacctaactcgtgaagagattccgcattctgtagcagtagttgttgactctatgaaacgagacgaagagacagacaaggttcacatccgtgcaaccatcatggtcgagcgcgatagccaaaaagggattatcatcggtaaaggtggcgctatgcttaagaaaatcggtagcatggcccgtcgtgatatcgaactcatgctaggagacaaggtcttcctagaaacctgggtcaaggtcaagaaaaactggcgcgataaaaagctagatttggctgactttggctataatgaaagagaatac

SEQ ID NO: 1910 - protein, 299 aa, Streptococcus pneumoniae
  GTP-binding protein Era (era); Cellular location: cytoplasm; Similar to strain R6 sequence 15902915 (e-170)
MTFKSGFVAILGRPNVGKSTFLNHVMGQKIAIMSDKAQTTRNKIMGIYTTDKEQIVFIDTPGIHKPKTALGDFMVESAYSTLREVDTVLFMVPADEARGKGDDMIIERLKAAKVPVILVVNKIDKVHPDQLLSQIDDFRNQMDFKEIVPISALQGNNVSRLVDILSENLDEGFQYFPSDQITDHPERFLVSEMVREKVLHLTREEIPHSVAVVVDSMKRDEETDKVHIRATIMVERDSQKGIIIGKGGAMLKKIGSMARRDIELMLGDKVFLETWVKVKKNWRDKKLDLADFGYNEREY

SEQ ID NO: 1911 - DNA, 822 bp, Streptococcus pneumoniae
atgcctgaattacctgaggttgaaaccgtttgtcgtggcttagaaaaattgattataggaaagaagatttcgagtatagaaattcgctaccccaagatgattaagacggatttggaagagtttcaaagggaattgcctagtcagattatcgagtcaatgggacgtcgtggaaaatatttgcttttttatctgacagacaaggtcttgatttcccatttgcggatggagggcaagtatttttactatccagaccaaggacctgaacgcaagcatgcccatgttttctttcattttgaagatggtggcacgcttgtttatgaggatgttcgcaagtttggaaccatggaactcttggtgcctgaccttttagacgtctactttatttctaaaaaattaggtcctgaaccaagcgaacaagactttgatttacaggtctttcaatctgcccttgccaagtccaaaaagcctatcaaatcccatctcctagaccagaccttggtagctggacttggcaatatctatgtggatgaggttctctggcgagctcaggttcatccagctagaccttcccagactttgacagcagaagaagcgactgccattcatgaccagaccattgctgttttgggccaggctgttgaaaaaggtggctccaccattcggacttataccaatgcctttggggaagatggaagcatgcaggactttcatcaggtctatgataagactggtcaagaatgtgtacgctgtggtaccatcattgagaaaattcaactaggcggacgtggaacccacttttgtccaaactgtcaaaggagggac

SEQ ID NO: 1912 - protein, 274 aa, Streptococcus pneumoniae
  formamidopyrimidine-DNA glycosylase (fpg); Cellular location: cytoplasm; Similar to strain R6 sequence 15902916 (e-160)
MPELPEVETVCRGLEKLIIGKKISSIEIRYPKMIKTDLEEFQRELPSQIIESMGRRGKYLLFYLTDKVLISHLRMEGKYFYYPDQGPERKHAHVFFHFEDGGTLVYEDVRKFGTMELLVPDLLDVYFISKKLGPEPSEQDFDLQVFQSALAKSKKPIKSHLLDQTLVAGLGNIYVDEVLWRAQVHPARPSQTLTAEEATAIHDQTIAVLGQAVEKGGSTIRTYTNAFGEDGSMQDFHQVYDKTGQECVRCGTIIEKIQLGGRGTHFCPNCQRRD

SEQ ID NO: 1913 - DNA, 552 bp, Streptococcus pneumoniae
gtgacaaattttctaagacagcaaggctttcaagtagtggatgccgacgcagtcgtccaccaactacagaaacctggtggtcgtctgtttgaggctctagtacagcactttgggcaagaaatcattcttgaaaacggagaactcaatcgccctctcctagctagtctcatcttttcaaatcctgatgaacgagaatggtctaagcaaattcaaggggagattatccgtgaggaactggctactttgagagaacagttggctcagacagaagagattttcttcatggatattcccctactttttgagcaggactacagcgattggtttgctgagacttggttggtctatgtggaccgagatgcccaagtggaacgcttaatgaaaagggaccagttgtccaaagatgaagctgagtctcgtctggcagcccagtggcctttagaaaaaaagaaagatttggccagccaggttcttgataataatggcaatcagaaccagcttcttaatcaagtgcatatccttcttgagggaggtaggcaagatgacagagat

SEQ ID NO: 1914 - protein, 184 aa, Streptococcus pneumoniae
  kinase, putative; Cellular location: cytoplasm; Similar to strain R6 sequence 15902917 (e-111)
MTNFLRQQGFQVVDADAVVHQLQKPGGRLFEALVQHFGQEIILENGELNRPLLASLIFSNPDEREWSKQIQGEIIREELATLREQLAQTEEIFFMDIPLLFEQDYSDWFAETWLVYVDRDAQVERLMKRDQLSKDEAESRLAAQWPLEKKKDLASQVLDNNGNQNQLLNQVHILLEGGRQDDRD

SEQ ID NO: 1915 - DNA, 135 bp, Streptococcus pneumoniae
atgcgcagattatccttccagttaatctctgtcatcttgcctacctccctcaagaaggatatgcacttgattaagaagctggttctgattgccattattatcaagaacctggctggccaaatctttctttttttc

SEQ ID NO: 1916 - protein, 45 aa, Streptococcus pneumoniae
  hypothetical protein
MRRLSFQLISVILPTSLKKDMHLIKKLVLIAIIIKNLAGQIFLFF

SEQ ID NO: 1917 - DNA, 1122 bp, Streptococcus pneumoniae
ttggttgtaccttttatgcccatcttcgtggaaaatctaggtgtagggagtcagcaagtcgctttttatgcaggcttagcaatttctgtctctgctatttccgcggcgctcttttctcctatttggggtattcttgctgacaaatacggccgaaaacccatgatgattcgggcaggtcttgctatgactatcactatgggaggcttggcctttgtcccaaatatctattggttaatctttcttcgtttactaaacggtgtatttgcaggttttgttcctaatgcaacggcactgatagccagtcaggttccaaaggagaaatcaggctctgccttaggtactttgtctacaggcgtagttgcaggtactctaactggtccctttattggtggctttatcgcagaattatttggcattcgtacagttttcttactggttggtagttttctatttttagctgctattttgactatttgctttatcaaggaagattttcaaccagtagccaaggaaaaggctattccaacaaaggaattatttacctcggttaaatatccctatcttttgctcaatctctttttaaccagttttgtcatccaattttcagctcaatcgattggccctattttggctctttatgtacgcgacttagggcagacagagaatcttctttttgtctctggtttgattgtgtccagtatgggcttttccagcatgatgagtgcaggagtcatgggcaagctaggtgacaaggtgggcaatcatcgtctcttggttgtcgcccagttttattcagtcatcatctatctcctctgtgccaatgcctctagcccccttcaactaggactctatcgtttcctctttggattgggaaccggtgccttgattcccggggttaatgccctactcagcaaaatgactcccaaagccggcatttcgagggtctttgccttcaatcaggtattcttttatctgggaggtgttgttggtcccatggcaggttctgcagtagcaggtcaatttggctaccatgctgtcttttatgcgacaagcctttgtgttgcctttagttgtctctttaacctgattcaatttcgaacattattaaaagtaaaggaaatc

SEQ ID NO: 1918 - protein, 374 aa, Streptococcus pneumoniae
  multi-drug resistance efflux pump (pmrA); Cellular location: membrane; Similar to strain R6 sequence 15902919 (0.E+01)
MVVPFMPIFVENLGVGSQQVAFYAGLAISVSAISAALFSPIWGILADKYGRKPMMIRAGLAMTITMGGLAFVPNIYWLIFLRLLNGVFAGFVPNATALIASQVPKEKSGSALGTLSTGVVAGTLTGPFIGGFIAELFGIRTVFLLVGSFLFLAAILTICFIKEDFQPVAKEKAIPTKELFTSVKYPYLLLNLFLTSFVIQFSAQSIGPILALYVRDLGQTENLLFVSGLIVSSMGFSSMMSAGVMGKLGDKVGNHRLLVVAQFYSVIIYLLCANASSPLQLGLYRFLFGLGTGALIPGVNALLSKMTPKAGISRVFAFNQVFFYLGGVVGPMAGSAVAGQFGYHAVFYATSLCVAFSCLFNLIQFRTLLKVKEI

SEQ ID NO: 1919 - DNA, 231 bp, Streptococcus pneumoniae
atgtataacctattattaaccattttattagtattatctgttgtgattgtgattgcaattttcatgcaaccaaccaaaaaccaatccagcaatgtatttgatgccagttcaggtgatttgtttgaacgcagtaaagctcgcggttttgaagctgtaatgcagcgtttgacagggattttagtctttttctggctagccattgccttagcattgacggtattatcaagtaga

SEQ ID NO: 1920 - protein, 77 aa, Streptococcus pneumoniae
  preprotein translocase, SecG subunit, putative; Cellular location: membrane; Similar to strain R6 sequence 15902921 (2.E-37)
MYNLLLTILLVLSVVIVIAIFMQPTKNQSSNVFDASSGDLFERSKARGFEAVMQRLTGILVFFWLAIALALTVLSSR

SEQ ID NO: 1921 - DNA, 2352 bp, Streptococcus pneumoniae
atgaaagatagaataaaagaatatttacaagacaagggaaaggtgactgttaatgatttggctcaggctttgggaaaagacagttccaaggattttcgtgagttgattaaaaccttgtccttaatggaaagaaagcaccaaattcgttttgaagaagatggtagtctgacattagaaattaagaaaaaacatgagattaccctcaaggggatttttcatgcccataaaaatggctttggctttgttagtctggaaggcgaggaggacgacctttttgtagggaaaaatgatgtcaactatgctattgatggtgataccgtcgaggtagtgattaagaaagtcgctgaccgcaataagggaacagcagcagaagccaaaattattgatatcctagaacacagtttgacaacagttgtcgggcaaatcgttctggatcaggaaaaacctaagtatgctggctatattcgttcaaaaaatcagaaaatcagtcaaccgatttatgttaagaaaccagccctaaaattagaaggaacagaagttctcaaagtctttatcgataaatacccaagcaagaaacatgatttctttgtcgcgagtgttctcgatgtagtgggacactcaacggatgtcggaattgatgttcttgaggtcttggaatcaatggacattgtatccgagtttccagaagctgttgttaaggaagcagaaagtgtgcctgatgctccgtctcaaaaggatatggaaggtcgtctggatctaagagatgaaattacctttaccattgacggtgcggatgccaaggacttggacgatgcagtgcatatcaaggctctgaaaaatggcaatctggagtttggggttcacatcgcagatgtttcttattatgtgaccgaggggtctgcccttgacaaggaagcccttaaccgtgcgacttctgtttacgtgacagaccgagtggtgccaatgcttccagaacgactatcaaatggcatctgctctctcaatccccaagttgaccgcctgacccagtctgctattatggagattgataaacatggtcgtgtggtcaactataccattacacaaacagttatcaagaccagttttcgtatgacctatagcgatgtcaatgatatcctagctggcgatgaagaaaagagaaaagaatatcataaaattgtatcaagtatcgaactcatggccaagcttcatgaaactttagaaaacatgcgtgtgaaacgtggagctctcaattttgataccaatgaagcgaagattttagtggataaacaaggtaagcctgttgatatcgttcttcggcagcgtggtattgccgagcggatgattgagtcttttatgttgatggctaatgaaacagttgccgaacatttcagcaagttggatttgccttttatctatcgaattcacgaggagcctaaggctgaaaaggttcagaagtttattgattatgcttcgagttttggcttgcgcatttatggaactgccagtgagattagtcaggaggcacttcaagacatcatgcgtgctgttgagggagaaccttatgcagatgtattgtccatgatgcttcttcgctctatgcagcaggctcgttattcggagcacaatcacggccactatggactagctgctgactattatactcactttaccagtccaattcgtcgttatccagaccttcttgttcaccgtatgattcgggattacggccgttctaaggaaatagcagagcattttgaacaagtgattccagagattgcgacccagtcttccaaccgtgaacgtcgtgccatagaagctgagcgtgaagtcgaagccatgaaaaaggctgagtatatggaagaatacgtgggtgaagagtatgatgcagttgtatcaagtattgtcaaattcggtctctttgtcgaattgccaaacacagttgaaggcttgattcacatcactaatctgcctgaattttatcatttcaatgagcgtgatttgactcttcgtggagaaaaatcaggtatcactttccgagtgggtcagcagatccgtatccgtgttgaaagagcggataaaatgactggagagattgatttttcattcgtacctagtgagtttgatgtgattgaaaaaggcttgaaacagtctagtcgtagtggcagagggcgtgattcaaatcgtcgttcggataagaaggaagacaagagaaaatcaggacgctcaaatgataagcgtaagcattcacaaaaagacaagaagaaaaaaggaaagaaacctttttacaaggaagtagctaagaaaggagccaagcatggcaaagggcgagggaaaggtcgtcgcacaaaa

SEQ ID NO: 1922 - protein, 784 aa, Streptococcus pneumoniae
  exoribonuclease, VacB/Rnb family; Cellular location: cytoplasm; Similar to strain R6 sequence 15902922 (0.E+01)
MKDRIKEYLQDKGKVTVNDLAQALGKDSSKDFRELIKTLSLMERKHQIRFEEDGSLTLEIKKKHEITLKGIFHAHKNGFGFVSLEGEEDDLFVGKNDVNYAIDGDTVEVVIKKVADRNKGTAAEAKIIDILEHSLTTVVGQIVLDQEKPKYAGYIRSKNQKISQPIYVKKPALKLEGTEVLKVFIDKYPSKKHDFFVASVLDVVGHSTDVGIDVLEVLESMDIVSEFPEAVVKEAESVPDAPSQKDMEGRLDLRDEITFTIDGADAKDLDDAVHIKALKNGNLEFGVHIADVSYYVTEGSALDKEALNRATSVYVTDRVVPMLPERLSNGICSLNPQVDRLTQSAIMEIDKHGRVVNYTITQTVIKTSFRMTYSDVNDILAGDEEKRKEYHKIVSSIELMAKLHETLENMRVKRGALNFDTNEAKILVDKQGKPVDIVLRQRGIAERMIESFMLMANETVAEHFSKLDLPFIYRIHEEPKAEKVQKFIDYASSFGLRIYGTASEISQEALQDIMRAVEGEPYADVLSMMLLRSMQQARYSEHNHGHYGLAADYYTHFTSPIRRYPDLLVHRMIRDYGRSKEIAEHFEQVIPEIATQSSNRERRAIEAEREVEAMKKAEYMEEYVGEEYDAVVSSIVKFGLFVELPNTVEGLIHITNLPEFYHFNERDLTLRGEKSGITFRVGQQIRIRVERADKMTGEIDFSFVPSEFDVIEKGLKQSSRSGRGRDSNRRSDKKEDKRKSGRSNDKRKHSQKDKKKKGKKPFYKEVAKKGAKHGKGRGKGRRTK

SEQ ID NO: 1923 - DNA, 465 bp, Streptococcus pneumoniae
atggcaaagggcgagggaaaggtcgtcgcacaaaataaaaaggcacgccacgactatacaatcgtagatacgctagaggcagggatggtcctgactggaactgaaatcaagagtgtacgagctgctcgaattaatctcaaggatggctttgctcaagtgaaaaatggagaagtttggctgagcaatgttcatatcgcgccttacgaagagggcaatatctggaaccaggaaccagaacgtcgtcgtaaactcctgctccataaaaagcaaattcaaaaattggaacaagagatcaaagggacaggaatgaccttagttccccttaaggtctatataaaagatggctacgctaagcttcttttaggacttgccaaagggaagcatgactatgacaaacgggagtctatcaaacgtcgtgagcaaaatcgagatatcgcgcgtgtgatgaaagctgttaatcagcga

SEQ ID NO: 1924 - protein, 155 aa, Streptococcus pneumoniae
  SsrA-binding protein (smpB); Cellular location: cytoplasm; Similar to strain R6 sequence 15902923 (1.E-85)
MAKGEGKVVAQNKKARHDYTIVDTLEAGMVLTGTEIKSVRAARINLKDGFAQVKNGEVWLSNVHIAPYEEGNIWNQEPERRRKLLLHKKQIQKLEQEIKGTGMTLVPLKVYIKDGYAKLLLGLAKGKHDYDKRESIKRREQNRDIARVMKAVNQR

SEQ ID NO: 1925 - DNA, 864 bp, Streptococcus pneumoniae
ttgaaaatggaaaaattagttgcctataaacgcatgcctttgtggaataaacaaacaatgcctgaagctgttcagcaaaagcacaatacaaaagttgggacttgggggaaaattactgtcttgaagggagctctcaagtttattgaattgacagaagaaggggaagttctagctgaacacctctttgaagcaggggcagacaatccaatggcccaacctcaagcctggcaccgagtggaagctgccacagatgatgtggaatggtacttggaattttattgtaaacctgaggattattttgctaaaaaatacaataccaatcctgttcattcagaggtcctagaggccatgcagacagtgaaacaagggaaagctttggatttgggttgtggtcaggggcgtaattctctttttctagcccagcaagattttgatgtgacggctgtagatcaaaatggactagctcttgaaatcttgcaaagcattgtggagcaggaagatttggacatgcctgttggcctttacgatatcaattcagctagcattgaacaagaatatgattttatcgtttcaacagttgttctcatgtttctacaagcggaccgcattccagctattattcaaaatatgcaggagaaaaccagtgttggtggttacaaccttatcgtttgtgccatggacacggaggattatccttgctcggttaacttcccattcacctttaaagaaggagaactggcagactattacaaggattgggaattggttaagtacaatgaaaatccaggccatttgcaccgtcgcgatgagaatggcaatcgtattcaactacgctttgcgaccttactagctaagaaaatcaag

SEQ ID NO: 1926 - protein, 288 aa, Streptococcus pneumoniae
  tellurite resistance protein TehB (tehB); Cellular location: cytoplasm; Similar to strain R6 sequence 15902924 (e-169)
MKMEKLVAYKRMPLWNKQTMPEAVQQKHNTKVGTWGKITVLKGALKFIELTEEGEVLAEHLFEAGADNPMAQPQAWHRVEAATDDVEWYLEFYCKPEDYFAKKYNTNPVHSEVLEAMQTVKQGKALDLGCGQGRNSLFLAQQDFDVTAVDQNGLALEILQSIVEQEDLDMPVGLYDINSASIEQEYDFIVSTVVLMFLQADRIPAIIQNMQEKTSVGGYNLIVCAMDTEDYPCSVNFPFTFKEGELADYYKDWELVKYNENPGHLHRRDENGNRIQLRFATLLAKKIK

SEQ ID NO: 1927 - DNA, 951 bp, Streptococcus pneumoniae
atgtttgttgcgagagatgctaggggagaattggtaaatgtgttagaggataaacttgagaagcaagcatacacctgcccagcttgtggaggccagctccatttgcgtcaaggaccaagtgtacggacgcattttgcccataaatccttaaaagactgtgattttttctttgaaaatgaaagtccagaacacctggccaataaggaatccctctatcactggttgaaaaaagagacaaaggttcaattagagtacccgctttcagaacttaaacagattgcggatgtatttgtaaatggcaatctagctctagaagttcagtgtagtcccttgcctcagaaagtccttaaagagcgaagtgagggctatcgtagtcagggttaccaagtactgtggttgctgggtcaaaaactgtggctcaaggagcgtttgactcgtctacagcaaggttttctttatttcagtcaaaacatgggcttttatgtttgggaattagacaaggaaaaacaagttttaagactcaaatacctgatttaccaggatctccgcggtaaactccattatcaaatcaaggaattttcctatggtcaaggtagtttattggaaatattgcgtcttccctataagagacaaaaaatatctcattttacagtttctgaggacaaggacatctgtcgctatatccggcaacaactttattatcaaaatctcttttggatgaaagaacaagcagaagcctatcaaaagggagaaaatatcctgacttatggactgaaagaatggtatccacaaattcgaccaatagtgggcaaatttttccagattgaacaagacttgactagctattatcagcacttttatacctattaccaaaaaaatcctcaaaatgattggcaaaagctttatccaccagccttttatcagcaatatttcttgaaaaatatggtagaa

SEQ ID NO: 1928 - protein, 317 aa, Streptococcus pneumoniae
  competence protein CoiA (coiA); Cellular location: cytoplasm; Similar to strain R6 sequence 15902925 (0.E+01)
MFVARDARGELVNVLEDKLEKQAYTCPACGGQLHLRQGPSVRTHFAHKSLKDCDFFFENESPEHLANKESLYHWLKKETKVQLEYPLSELKQIADVFVNGNLALEVQCSPLPQKVLKERSEGYRSQGYQVLWLLGQKLWLKERLTRLQQGFLYFSQNMGFYVWELDKEKQVLRLKYLIYQDLRGKLHYQIKEFSYGQGSLLEILRLPYKRQKISHFTVSEDKDICRYIRQQLYYQNLFWMKEQAEAYQKGENILTYGLKEWYPQIRPIVGKFFQIEQDLTSYYQHFYTYYQKNPQNDWQKLYPPAFYQQYFLKNMVE

SEQ ID NO: 1929 - DNA, 1800 bp, Streptococcus pneumoniae
atggtattacaaagaaatgaaataaatgaaaaagatacatgggatctatcaacgatctacccaactgaccaggcttgggaagaagccttaaaagatttaacagaacaattggagacagtagcccagtatgaaggccatctcttggatagtgcggataacctactagaaatcactgaattttctcttgaaatggaacgccagatagagaagctttacgcttatgctcatatgaagaatgaccaggatacacgtgaagctaagtatcaagagtactatgccaaggccatgacactctacagccagttagaccaagccttttcattctatgagcctgaatttatggagattagcgaaaagcagtatgctgactttttagaagctcaaccaaagctgcaggtttatcaacactattttgacaagcttttgcaaggcaaggatcacgttctttcacaacgtgaagaagaattattggctggagctggagaaatctttggttcagcaagtgaaaccttcgctatcttggacaatgcggatattgtgttcccttatgtcctagacgatgatggtaaagaagttcagctatctcatgggacttacacacgtttgatggagtctaaaaaacgtgaggttcgccgtggtgcctatcaagctctttatgcgacttacgaacaattccaacacacctatgccaaaaccttgcaaaccaatgttaaggtgcaaaattaccgtgctaaagttcgtaactacaagagtgctcgtcatgcagccctcgcagcgaattttgttccagaaagtgtttatgacaatttggtagcagcagttcgcaagcatttgccactcttacatcgctatcttgagcttcgttcaaaaatcttggggatttcagatctcaagatgtacgatgtctacacaccgctttcatctgttgaatacagttttacctaccaagaagccttgaaaaaagcagaagatgctttggcagtcttgggtgaggattacttgagccgtgttaaacgtgccttcagcgagcgttggattgatgtttacgaaaatcaaggcaagcgttcaggtgcctactctggtggttcttatgataccaatgcctttatgcttctcaactggcaagacaatctggacaatctctttactcttgttcatgaaacaggtcacagtatgcattcaagctatactcgtgaaactcagccttatgtttacggggattactctatctttttggctgagattgcctcaactaccaatgaaaatatcttgacggagaaattattggaagaagtggaagacgacgcaacacgctttgctattctcaataacttcctagatggtttccgtggaacagttttccgccaaactcaatttgctgagtttgaacacgccattcaccaagcagatcaaaatggggaggtcttgacaagcgatttcctaaataaactctacgcagacttgaaccaagagtattatggtttgagtaaggaagacaatcctgaaatccaatacgagtgggctcgcattccacacttctactataactactatgtatatcaatattcaactggctttgcggccgcctcagccttggctgaaaaaattgtccatggtagtcaagaagaccgtgaccgctatatcgactacctcaaggcaggtaagtcggactatccacttaatgtcatgagaaaagctggtgttgatatggagaaggaagactacctcaacgatgcctttgcagtctttgaacgccgtttaaatgagtttgaagcccttgttgaaaaattaggattggca

SEQ ID NO: 1930 - protein, 600 aa, Streptococcus pneumoniae
  oligoendopeptidase F (pepF); Cellular location: cytoplasm; Similar to strain R6 sequence 15902926 (0.E+01)
MVLQRNEINEKDTWDLSTIYPTDQAWEEALKDLTEQLETVAQYEGHLLDSADNLLEITEFSLEMERQIEKLYAYAHMKNDQDTREAKYQEYYAKAMTLYSQLDQAFSFYEPEFMEISEKQYADFLEAQPKLQVYQHYFDKLLQGKDHVLSQREEELLAGAGEIFGSASETFAILDNADIVFPYVLDDDGKEVQLSHGTYTRLMESKKREVRRGAYQALYATYEQFQHTYAKTLQTNVKVQNYRAKVRNYKSARHAALAANFVPESVYDNLVAAVRKHLPLLHRYLELRSKILGISDLKMYDVYTPLSSVEYSFTYQEALKKAEDALAVLGEDYLSRVKRAFSERWIDVYENQGKRSGAYSGGSYDTNAFMLLNWQDNLDNLFTLVHETGHSMHSSYTRETQPYVYGDYSIFLAEIASTTNENILTEKLLEEVEDDATRFAILNNFLDGFRGTVFRQTQFAEFEHAIHQADQNGEVLTSDFLNKLYADLNQEYYGLSKEDNPEIQYEWARIPHFYYNYYVYQYSTGFAAASALAEKIVHGSQEDRDRYIDYLKAGKSDYPLNVMRKAGVDMEKEDYLNDAFAVFERRLNEFEALVEKLGLA

SEQ ID NO: 1931 - DNA, 711 bp, Streptococcus pneumoniae
atggttgaatcgtatagtaagaatgctaaccataacatgcgtcgtcctgtcgtcaaagaagaaattgtagacttgatgcgtcagcgtcaaaagcaggtcacaggtttcttgaaagaattggaagactttgcccgcaaggaaaatattcctattattccccatgaaacggttgcttatttccgttttcttatggaaaccatgcagcctaaaaatattctggaaattgggacggctatcggtttttcagctctcttgatggctgaacatgcgccaaatgctaagattacaactattgatcgtaatccagaaatgattggttttgccaaggaaaattttgcccagtttgacagtcgcaagcaaatcactctcctagagggagatgcggtggatgtcttatctacactgacagagtcttatgatttcgtctttatggattctgccaagtctaaatacatcgtctttctgccagaaatcctcaaacatttggaagttggtggtgtggttgtcttggatgatatttttcaaggtggtgatgttgccaaggatattatggaagtccgtcgtggtcagcgaaccatttatcgaggccttcaaaaattatttgatgcaaccttagacaatccagaactcaccgcaacattagtgcctttaggagatggtattctcatgcttcgtaaaaatgtagcagatgttcaactgtctgaaagcgaa

SEQ ID NO: 1932 - protein, 237 aa, Streptococcus pneumoniae
  O-methyltransferase; Cellular location: cytoplasm; Similar to strain R6 sequence 15902927 (e-132)
MVESYSKNANHNMRRPVVKEEIVDLMRQRQKQVTGFLKELEDFARKENIPIIPHETVAYFRFLMETMQPKNILEIGTAIGFSALLMAEHAPNAKITTIDRNPEMIGFAKENFAQFDSRKQITLLEGDAVDVLSTLTESYDFVFMDSAKSKYIVFLPEILKHLEVGGVVVLDDIFQGGDVAKDIMEVRRGQRTIYRGLQKLFDATLDNPELTATLVPLGDGILMLRKNVADVQLSESE

SEQ ID NO: 1933 - DNA, 939 bp, Streptococcus pneumoniae
atgaagaaaaaattattggcaggtgccatcacactattatcagtagcaactttagcagcttgttcgaaagggtcagaaggtgcagaccttatcagcatgaaaggggatgtcattacagaacatcaattttatgagcaagtgaaaagcaacccttcagcccaacaagtcttgttaaatatgaccatccaaaaagtttttgaaaaacaatatggctcagagcttgatgataaagaggttgatgatactattgccgaagaaaaaaaacaatatggcgaaaactaccaacgtgtcttgtcacaagcaggtatgactcttgaaacacgtaaagctcaaattcgtacaagtaaattagttgagttggcagttaagaaggtagcagaagctgaattgacagatgaagcctataagaaagcctttgatgagtacactccagatgtaacggctcaaatcatccgtcttaataatgaagataaggccaaagaagttctcgaaaaagccaaggcagaaggtgctgattttgctcaattagccaaagataattcaactgatgaaaaaacaaaagaaaatggtggagaaattacctttgattctgcttcaacagaagtacctgagcaagtcaaaaaagccgctttcgctttagatgtggatggtgtttctgatgtgattacagcaactggcacacaagcctacagtagccaatattacattgtaaaactcactaagaaaacagaaaaatcatctaatattgatgactacaaagaaaaattaaaaactgttatcttgactcaaaaacaaaatgattcaacatttgttcaaagcattatcggaaaagaattgcaagcagccaatatcaaggttaaggaccaagccttccaaaatatctttacccaatatatcggtggtggagattcaagctcaagcagtagtacatcaaacgaa

SEQ ID NO: 1934 - protein, 313 aa, Streptococcus pneumoniae
  protease maturation protein, putative; Cellular location: lipoprotein; Similar to strain R6 sequence 15902928 (e-172)
MKKKLLAGAITLLSVATLAACSKGSEGADLISMKGDVITEHQFYEQVKSNPSAQQVLLNMTIQKVFEKQYGSELDDKEVDDTIAEEKKQYGENYQRVLSQAGMTLETRKAQIRTSKLVELAVKKVAEAELTDEAYKKAFDEYTPDVTAQIIRLNNEDKAKEVLEKAKAEGADFAQLAKDNSTDEKTKENGGEITFDSASTEVPEQVKKAAFALDVDGVSDVITATGTQAYSSQYYIVKLTKKTEKSSNIDDYKEKLKTVILTQKQNDSTFVQSIIGKELQAANIKVKDQAFQNIFTQYIGGGDSSSSSSTSNE

SEQ ID NO: 1935 - DNA, 339 bp, Streptococcus pneumoniae
atgttggaacaggcattcaaagagaagcactacgagaatacgattctccatagtgaccaaggctggcaatatcaacacgattcttatcatcgcttcctagagagtaagggaattcaagcatccatgtcacgtaagggcaacagccaagacaacggtaggatggaatctttctttggcattttaaaatccgaaatgttttatggctatgagaaaacatttaaatcacttaatcaattggaacgagccattatagactatattgattattacaacaataagagaattaagataaaactaaaaggacttagctctgtgcaatacagaactaaatccttcgga

SEQ ID NO: 1936 - protein, 113 aa, Streptococcus pneumoniae
  transposase
MLEQAFKEKHYENTILHSDQGWQYQHDSYHRFLESKGIQASMSRKGNSQDNGRMESFFGILKSEMFYGYEKTFKSLNQLERAIIDYIDYYNNKRIKIKLKGLSSVQYRTKSFG

SEQ ID NO: 1937 - DNA, 473 bp, Streptococcus pneumoniae
atgaaattaacttatgatgataaagttcagatctatgaacttagaaaacaaggatatagcttagagaagctttcaaataaatttgggataaacaattctaatcttaggtacatgattaaattgattgatcgttaatgttggaacaggcattcaaagagaagcactacgagaatacgattctccatagtgaccaaggctggcaatatcaacacgattcttatcatcgcttcctagagagtaagggaattcaagcatccatgtcacgtaagggcaacagccaagacaacggtaggatggaatctttctttggcattttaaaatccgaaatgttttatggctatgagaaaacatttaaatcacttaatcaattggaacgagccattatagactatattgattattacaacaataagagaattaagataaaactaaaaggacttagctctgtgcaatacagaactaaatccttcgga

SEQ ID NO: 1938 - protein, 65 aa, Streptococcus pneumoniae
  IS3-Spn1, hypothetical protein/transposase, internal deletion
MYMNYTPKVRQKKSNFWGVFIMKLTYDDKVQIYELRKQGYSLEKLSNKFGINNSNLRYMIKLIDR

SEQ ID NO: 1939 - DNA, 228 bp, Streptococcus pneumoniae
atgagtagggaggaaaaggtaaaagtttatgcccaaactcttcacataagaactctagcttacccattctatggaatcttgcattatccattaaaacttccagactcatactcttctaaaatctattcaaaccacgtcagcttcacattatatatgttggtgacctcacaagttttatctacaacctcaaagctgttctttgagcagcctacagctagcttcctagtt

SEQ ID NO: 1940 - protein, 76 aa, Streptococcus pneumoniae
  hypothetical protein
MSREEKVKVYAQTLHIRTLAYPFYGILHYPLKLPDSYSSKIYSNHVSFTLYMLVTSQVLSTTSKLFFEQPTASFLV

SEQ ID NO: 1941 - DNA, 144 bp, Streptococcus pneumoniae
ttgttctacaatcctgttgagaagacacgtgttcatatcaaaaaggtattggcaagttgcaatacctttttacgaggctctgttgtcttatttttgtttcaactgactatatctcctatggttctagttcagaaggctaggcta

SEQ ID NO: 1942 - protein, 48 aa, Streptococcus pneumoniae
  IS630-Spn1, transposase Orf2, degenerate
MFYNPVEKTRVHIKKVLASCNTFLRGSVVLFLFQLTISPMVLVQKARL

SEQ ID NO: 1943 - DNA, 618 bp, Streptococcus pneumoniae
atgaaactctactttgtccgccacggtcgtaccctctggaaccaagaaggtcgttttcaaggtgctagtggtgattctcctcttcttcctgaatccattgaaaccctaaaacgacttggtcagtatctcaaggaaattccttttgatcagatttattcaagtgatttacctcgagcggtcaaatctgctgagattatccaaagtcaactctataccccctgttctttagaaatcgttcctaatctccgtgaatggcaacttgggaagttagaaggtttgaaaattgcaaccttggaagctatttacccgcaacaaatccaggcttttcgttcaaatcttgctcaatttgacactcgaatgttcggagccgaatccctctatagtacaactcaacggaccatccaatttatcaaatcattaaaagatagtccagctgaacgtattctaattgtcggacacggcgccaatcttactgccagtcttcgtactctcctaggctataaagaaccacttcttcgtaaagatggcggtctagcaaatgccagcctgaccattatagaaacccatgattttgaaacattcactcccaatacttggaatgatacttcttatcaatca

SEQ ID NO: 1944 - protein, 206 aa, Streptococcus pneumoniae
  phosphoglycerate mutase family protein; Cellular location: cytoplasm; Similar to strain R6 sequence 15902931 (e-115)
MKLYFVRHGRTLWNQEGRFQGASGDSPLLPESIETLKRLGQYLKEIPFDQIYSSDLPRAVKSAEIIQSQLYTPCSLEIVPNLREWQLGKLEGLKIATLEAIYPQQIQAFRSNLAQFDTRMFGAESLYSTTQRTIQFIKSLKDSPAERILIVGHGANLTASLRTLLGYKEPLLRKDGGLANASLTIIETHDFETFTPNTWNDTSYQS

SEQ ID NO: 1945 - DNA, 480 bp, Streptococcus pneumoniae
atggcaaaaaaagttaaaatcaaaaaaacattggtggaacaaatcctatctaaagcagctatccctcatcaggggattcaaatcaatgccctagaaggagagcttcctcaaggttatgaacgagatcagattttcaaaaccttggcgcttttgggagacaagaccggaccgattatcggaattgtccctatcactcagcacttgtctgaaaagaaactagctaaaatttctggcaataaaaaagtgagcatgattccacaaaaggacttagaaaaaacaactggttacattcatggagccaataatcctgtcggaattcgtcagaaacacaattatcccatttttatcgataaaattgctctagatttggatcaaatgattgtctctgcaggcgaagtcggacacagcattatcgtcgcgccacaagacttggctagctttgtaaaggcagactttgtagatattttggaggacatcaag

SEQ ID NO: 1946 - protein, 160 aa, Streptococcus pneumoniae
  regulatory protein, putative; Cellular location: cytoplasm; Similar to strain R6 sequence 15902932 (6.E-87)
MAKKVKIKKTLVEQILSKAAIPHQGIQINALEGELPQGYERDQIFKTLALLGDKTGPIIGIVPITQHLSEKKLAKISGNKKVSMIPQKDLEKTTGYIHGANNPVGIRQKHNYPIFIDKIALDLDQMIVSAGEVGHSIIVAPQDLASFVKADFVDILEDIK

SEQ ID NO: 1947 - DNA, 840 bp, Streptococcus pneumoniae
atgctctcatggttagcacgcgttattaaagggattgtaattgctcttggatttatcctaccgggaatttccggaggggttctagcagcaatcttaggaatctatgaacgaatgattggctttctggcccatccctttaaagactttaaagaaaatgttttgtactttattccagttgccatcggtatgcttctgggaatcggcttattttcctacccgattgaatacctgcttgaaaattatcaggtttttgtattatggagctttgcgggagctattatcggtacagttcctagcctcctcaaagaatcaactcgagaatctgaccgagacaagattgatttagcttggttatggacaacctttatcatttctggattaggactctatgccttaaattttgtcgttggaaccttaagcgccagctttcttaacttcgtcctagcaggcgcactattggcccttggcgtcttggttcctggcctcagcccatcaaatttacttttgattttgggactctatgctcctatgttgactggttttaaaacttttgatttcttgggaaccttctttccgattggaattggtgcaggtgcaactctcatcgttttttcaaaattgatagattatgccttaaacaactaccactcacgcgtctatcatttcatcatcggtatcgtcctatcaagtacccttttgatcttaattccaaatgcaggaaacgctgaaagtatccaatacacaggactttcacttgtcggttatgtcatcatcgccttcttctttgcgctgggaatctggcttggtatttggatgagtcaattggaggataaatataaa

SEQ ID NO: 1948 - protein, 280 aa, Streptococcus pneumoniae
  conserved hypothetical protein; Cellular location: membrane; Similar to strain R6 sequence 15902933 (e-157)
MLSWLARVIKGIVIALGFILPGISGGVLAAILGIYERMIGFLAHPFKDFKENVLYFIPVAIGMLLGIGLFSYPIEYLLENYQVFVLWSFAGAIIGTVPSLLKESTRESDRDKIDLAWLWTTFIISGLGLYALNFVVGTLSASFLNFVLAGALLALGVLVPGLSPSNLLLILGLYAPMLTGFKTFDFLGTFFPIGIGAGATLIVFSKLIDYALNNYHSRVYHFIIGIVLSSTLLILIPNAGNAESIQYTGLSLVGYVIIAFFFALGIWLGIWMSQLEDKYK

SEQ ID NO: 1949 - DNA, 798 bp, Streptococcus pneumoniae
atgagaaaacaaattcatccacttattttatttagtttttttgggattatgatgttcattttaatcatcaatcgcccacttaatgacagccaatcgtttaaaacaaaatccaatatagcacagattgaagcacaggctttgaaacacttagacaaaccgattattgacctctctggctggcagcgtcctgaggaaatcaactacgatgccctctcacaaaatatttcaggtgctattgttcgtgttcacagtggtgctcaaacgacaaaagaaaatgatgcttcatttatcaatggaatagacaaggcctataagagtcatatcactgaacttcaaaagcggaatgtcccagttgctgtctacgcttatgtagctggaaaaagtgtccaagaaatggaaaaggctgccgaagttttctacaatgctgcctctccttacagccctagttactattggcttgacgtggaagacaaaaccatgtctaatatgaacgaaggtgtcgaaaactttcgagcaaaactagcatcactgggtgctaaaaacatcggcatctacgttggtgtctacttcatggaagaacacagtattgatacaggcaagtttacctctgtttggattccgtcctacggctcagactcaggatttttggagagcagtcctaaaactgatttagattatgatattcaccaatacacatctaaaggaaaaattgccggctttgaccacgatttagatatcaacgttatctctcccttaaaaaataaagaagaaacctttcgaaaactttttttaaaacct

SEQ ID NO: 1950 - protein, 266 aa, Streptococcus pneumoniae
  hypothetical protein; Cellular location: outside; Similar to strain R6 sequence 15902934 (e-153)
MRKQIHPLILFSFFGIMMFILIINRPLNDSQSFKTKSNIAQIEAQALKHLDKPIIDLSGWQRPEEINYDALSQNISGAIVRVHSGAQTTKENDASFINGIDKAYKSHITELQKRNVPVAVYAYVAGKSVQEMEKAAEVFYNAASPYSPSYYWLDVEDKTMSNMNEGVENFRAKLASLGAKNIGIYVGVYFMEEHSIDTGKFTSVWIPSYGSDSGFLESSPKTDLDYDIHQYTSKGKIAGFDHDLDINVISPLKNKEETFRKLFLKP

SEQ ID NO: 1951 - DNA, 1437 bp, Streptococcus pneumoniae
gtgcggaatgatttgaaatatggtataataaaagggaatttctacagaaaagagaagattatgtcaaattttgccattattttagcagcgggtaaagggactcgcatgaaatctgatttgccaaaagttttgcacaaggttgcgggtatttctatgttggaacatgttttccgtagtgtgggagctatccaacctgaaaagacagtaacagttgtaggacacaaggcagaattggttgaggaggtcttggctggacagacagaatttgtgactcaatctgaacagttgggaactggtcatgcagttatgatgacagagcctatcttagaaggtttgtcaggacacaccttggtcattgcaggagatactcctttaatcactggtgaaagcttgaaaaacttgattgatttccatatcaatcataaaaatgtggccactatcttgactgctgaaacggataatccttttggttatggacgaattgttcgtaatgacaatgctgaggttcttcgtattgttgagcagaaggatgctacagattttgaaaagcaaatcaaggaaatcaacactggaacatacgtctttgacaacgagcgtttgtttgaggctttgaaaaatatcaataccaataacgctcaaggcgaatactatattacagacgtcattggtattttccgtgaaactggtgaaaaagttggcgcttatactttgaaagattttgatgaaagtcttggggtaaatgaccgtgtggcgcttgcgacagctgagtcagttatgcgtcgtcgcatcaatcataaacacatggtcaacggtgttagctttgtcaatccagaagcaacttatatcgatattgatgttgagattgcttcggaagttcaaatcgaagccaatgttaccttgaaagggcaaacgaaaattggtgctgagactgttttgacaaacggtacttatgtagtggacagcactatcggagcaggagcggtcattaccaattctatgattgaggaaagtagtgttgcagacggtgtgatagtcggtccttatgctcacattcgtccaaattcaagtctgggtgcccaagttcatattggtaactttgttgaggtgaaaggatcttcaatcggtgagaataccaaggctggtcatttgacttatatcggaaactgtgaagtgggaagcaacgttaatttcggtgctggaactattacagtcaactatgacggcaaaaacaaatacaagacagtcattggaaacaatgtctttgttggttcaaattcaaccattattgcaccagtagaacttggtgacaattccctcgttggtgctggttcaactattactaaagacgtgccagcagatgctattgctattggtcgcggtcgtcagatcaataaagacgaatatgcaacacgtcttcctcatcatcctaagaaccag

SEQ ID NO: 1952 - protein, 479 aa, Streptococcus pneumoniae
  UDP-N-acetylglucosamine pyrophosphorylase (glmU); Cellular location: cytoplasm; Similar to strain R6 sequence 15902935 (0.E+01)
MRNDLKYGIIKGNFYRKEKIMSNFAIILAAGKGTRMKSDLPKVLHKVAGISMLEHVFRSVGAIQPEKTVTVVGHKAELVEEVLAGQTEFVTQSEQLGTGHAVMMTEPILEGLSGHTLVIAGDTPLITGESLKNLIDFHINHKNVATILTAETDNPFGYGRIVRNDNAEVLRIVEQKDATDFEKQIKEINTGTYVFDNERLFEALKNINTNNAQGEYYITDVIGIFRETGEKVGAYTLKDFDESLGVNDRVALATAESVMRRRINHKHMVNGVSFVNPEATYIDIDVEIASEVQIEANVTLKGQTKIGAETVLTNGTYVVDSTIGAGAVITNSMIEESSVADGVIVGPYAHIRPNSSLGAQVHIGNFVEVKGSSIGENTKAGHLTYIGNCEVGSNVNFGAGTITVNYDGKNKYKTVIGNNVFVGSNSTIIAPVELGDNSLVGAGSTITKDVPADAIAIGRGRQINKDEYATRLPHHPKNQ

SEQ ID NO: 1953 - DNA, 543 bp, Streptococcus pneumoniae
atggagtttgaagaaaaaacgcttagccgaaaagaaatctatcaaggaccaatatttaaactggtccaagatcaggttgaattaccagaaggcaagggaactgcccaacgggatttgattttccacaatggggctgtctgtgttttagcagtaacggatgaacaaaaacttatcttggtcaagcagtaccgcaaagctatcgaggctgtctcttacgaaattccagccggaaaattggaagtaggagaaaacacagcccctgtggcagctgcccttcgtgaattagaggaagaaacagcctatacagggaaattagaactcttgtacgatttttattcagctattggcttttgtaatgagaagttaaaactatatttagcaagcgatttgacaaaagtggaaaatccgcgtccgcaggatgaggatgaaaccttggaagtccttgaagtgagcttagaagaagcgaaagaattaatccaatcaggtcatatctgtgatgccaagacaattatggctgttcagtattgggagttgcagaaaaaa

SEQ ID NO: 1954 - protein, 181 aa, Streptococcus pneumoniae
  MutT/nudix family protein; Cellular location: cytoplasm; Similar to strain R6 sequence 15902936 (e-100)
MEFEEKTLSRKEIYQGPIFKLVQDQVELPEGKGTAQRDLIFHNGAVCVLAVTDEQKLILVKQYRKAIEAVSYEIPAGKLEVGENTAPVAAALRELEEETAYTGKLELLYDFYSAIGFCNEKLKLYLASDLTKVENPRPQDEDETLEVLEVSLEEAKELIQSGHICDAKTIMAVQYWELQKK

SEQ ID NO: 1955 - DNA, 345 bp, Streptococcus pneumoniae
ttgggagttgcagaaaaaatagaggaggtcagtatgggtaaatctttattaacggatgaaatgattgaaagagctaatagaggcgaaaaaatttcaggtcctcctttgctagatgataatgaggaaactaagattttaccaacctcttcttcccgttttggttatgccaatcctaaggatcatggttttagccaggaaaccttgaagattcaggtcgaaccatctattcataaaagccgtcgtattgaaaataccaagagaaatgtcttcaattctaagttgaataaaatcttatttgcggtcatctttctcttgattttgcttgttttagcaatgaaacttttg

SEQ ID NO: 1956 - protein, 115 aa, Streptococcus pneumoniae
  hypothetical protein; Cellular location: membrane; Similar to strain R6 sequence 15902937 (2.E-60)
MGVAEKIEEVSMGKSLLTDEMIERANRGEKISGPPLLDDNEETKILPTSSSRFGYANPKDHGFSQETLKIQVEPSIHKSRRIENTKRNVFNSKLNKILFAVIFLLILLVLAMKLL

SEQ ID NO: 1957 - DNA, 690 bp, Streptococcus pneumoniae
atgaaaataggaattattgctgctatgccagaagaactggcttatctggtccagcatttagataatgcccaggagcaagttgtttttgggaatacctatcatacaggaaccattgcttctcatgaagtcgttcttgtagaaagtggaattggtaaggtcatgtctgctatgagtgtggcgattttggctgatcatttccaggtggatgcccttattaatacgggttcagctggggcagtagcagaaggtatcgctgttggggatgtcgtgattgctgacaaattagcctatcatgacgtggatgtcacagcttttggctatgcttatggacaaatggcgcaacaaccgctttatttcgaatcagacaaaacctttgttgctcaaatccaaaagagtttatctcaattggaccaaaactggcatcttggtttgattgctacaggagatagttttgttgcaggaaatgacaagatagaagcgattaagtcccatttcccagaagttttagccgtggagatggagggggcagctattgctcaagcagcgcatgccctcaatctcccagtcttagtcatccgagctatgagtgacaatgccaaccatgaagcaaacatcttttttgatgagtttattatcgaagctggacgtcgctctgcccaagtcttgttgacctttttgaaggctttagat

SEQ ID NO: 1958 - protein, 230 aa, Streptococcus pneumoniae
  5'-methylthioadenosine/S-adenosylhomocysteine nucleosidase (mtf); Cellular location: membrane; Similar to strain R6 sequence 15902938 (e-124)
MKIGIIAAMPEELAYLVQHLDNAQEQVVFGNTYHTGTIASHEVVLVESGIGKVMSAMSVAILADHFQVDALINTGSAGAVAEGIAVGDVVIADKLAYHDVDVTAFGYAYGQMAQQPLYFESDKTFVAQIQKSLSQLDQNWHLGLIATGDSFVAGNDKIEAIKSHFPEVLAVEMEGAAIAQAAHALNLPVLVIRAMSDNANHEANIFFDEFIIEAGRRSAQVLLTFLKALD

SEQ ID NO: 1959 - DNA, 489 bp, Streptococcus pneumoniae
atgagtattgaaatgaccgtcagtgagattgcagaggtcttaggattatctcgccaagcaatcaataaccgtgtcaaagaattaccagaagaagacacagataaaaatgacaaaggggtaacagttgttaccagaagtggcttgattaagctagaagaaatctataaaaaaacgatttttgaagatgagcctgtcagtgaagatgtcaaacaacgtgaactgatggagattctagtggatgagaagaatgcagaaattcttcgtctttatgaacaattaaaagccaaggatcgtcagttatcagaaaaagacgagcagatgcgtatcaaagaccgtcagattgctgagaaagacaaacaattagatcagcaacaacaattgacccttcaagccatgaaggatcaagaaaatcttaagctagagctggaccaagcaaaagaagaagtccaatccactaaaaaaggcttttttgctcgtttatttggagga

SEQ ID NO: 1960 - protein, 163 aa, Streptococcus pneumoniae
  conserved hypothetical protein; Cellular location: cytoplasm; Similar to strain R6 sequence 15902939 (7.E-87)
MSIEMTVSEIAEVLGLSRQAINNRVKELPEEDTDKNDKGVTVVTRSGLIKLEEIYKKTIFEDEPVSEDVKQRELMEILVDEKNAEILRLYEQLKAKDRQLSEKDEQMRIKDRQIAEKDKQLDQQQQLTLQAMKDQENLKLELDQAKEEVQSTKKGFFARLFGG

SEQ ID NO: 1961 - DNA, 624 bp, Streptococcus pneumoniae
ttgattagaacagagacagtagaggagaggtacagaatggaacgattagaagattacattgcttttgatttagaatttaatcagcacgaaggacaaacacacttgattcaagtatcggcagtgcgttttagagatggtcgggaaatcgatgcctatgattcctatgttcataccagcgtccctctaaaaagctttatcaatggtttgaccgggattacagctgagaccttaaaagatgctcctccagttgagaaagtcttagaagaattccaagagtttgtgggttctttgctgatgataggctacaatgctgctaaaagtgatttacctattttagcagagcatggtttagactatagccaacagtacaaggtggatttgtatgatgaagcttttgaacgtcggagttcagatttacatggtattgccaatctcaaattgcaaactgttgcctcatttcttggatttcaaggtcagtctcataatagtttagaggatgctcggatgacggcgcgtgtttacgaatccttcttagagtcggatcaagctagggaattgttagagacagaaagtagcttatcaaacaatccttttggtggcttggacttgtctcaattatttgac

SEQ ID NO: 1962 - protein, 208 aa, Streptococcus pneumoniae
  exonuclease; Cellular location: cytoplasm; Similar to strain R6 sequence 15902940 (e-109)
MIRTETVEERYRMERLEDYIAFDLEFNQHEGQTHLIQVSAVRFRDGREIDAYDSYVHTSVPLKSFINGLTGITAETLKDAPPVEKVLEEFQEFVGSLLMIGYNAAKSDLPILAEHGLDYSQQYKVDLYDEAFERRSSDLHGIANLKLQTVASFLGFQGQSHNSLEDARMTARVYESFLESDQARELLETESSLSNNPFGGLDLSQLFD

SEQ ID NO: 1963 - DNA, 1767 bp, Streptococcus pneumoniae
gtgcctatgaaacctgaaaaacctaaaaaattgggtcttaaacagatttacctcgatcttgataaaatcctctttctatttttcttgatttttatgatagtggagtatttgtgggtaccattcaattcatggttggctagcttcttattagatcagacaggttatctttttatttcctataacaatgtcttagccatccttactcattctccattgattagtctagcttttttagccttgattgtaattaaccttctggttgcttattttcaaataggactcctctttattggtgctcgtcatctcctctataatgaaaagcgaaggctaattgagtatatccgcaaggttttccatgaaagttttggatttatgaaaaagctaacttgcgctaaagccttgtttatctttttctatatagctatgctgtttccttttatacggaaaatgctgaagatttattatcttaataaaatcgtcattccagagtttatccaagcttatttagaagatagatattggatgtggtggctgagcatcctacttctatctcttatctttctctatgtctctgtcagattgatgtttgcccttccgaagattgtatatgatcagctgactgttcgagaagcagtgatgtttagcttggagaaaaccaagaagagagttactttttatgcttggaatttattttacatcttgctcaaagcacatttattattttatcttcctttgattcctttattattggctcaaactttggtagatgatatcactcagagagagtctctgattcttggtattttgaattttgtcgtgattaaaaatctctattatatggctctgacttattttttggttaaatttgtttcatttttgacaggaaaggagctggatatgcttcctaggagagaaaaagatcacatcgtgcgatggggtgtcatgacttgtgccagtcttttctttgccttagaaggttatatttatctggaggctcccatggttcatctacctcaacttatttctcaccgaggggtttccaatgcaaatgggattcaaaatacagtagagtccttggaaactacagcacaactcaaaccagacttggtggagacggacgtgcaggaaacaaaagatgggcagtttgtcatgatgcatgatgctaacttgaaaaatctagcaggtatcaataaaagtcctcaagacttaaacttggaggagcttaaagggattgatatttttgaaaatggctaccagactaaaatttcaagctttgaagattatctcagtcgagccaacgaacttggtcaaaaattactaattgaaattaaaaccagtaaaaaagatagtccagacatgatgaaccgctttttagcccgttatgctgcaaagctcaagatttatggacatcaaatccagtctttagactaccatgttgtcgaaaaagtaagacagtatgatgccgaactaccagtttatttcatcatgccctacaattctgtctttcctaaaacaagagcgacaggatatactatggagtactcaaccttggatgaatattttgtaagcaaactatggacaacggatcagaaactttatgtctggactgtcaatgattcagaagctatcagcaaatctcttcacttaggagtagatggagtgattacagatgatttggaaaaagttcagcgggaaatagaagtagcccaagaagatccagaatatacggatttgctcttgaaaaaagcattggaattctttgaattt

SEQ ID NO: 1964 - protein, 589 aa, Streptococcus pneumoniae
  hypothetical protein; Cellular location: membrane; Similar to strain R6 sequence 15902941 (0.E+01)
MPMKPEKPKKLGLKQIYLDLDKILFLFFLIFMIVEYLWVPFNSWLASFLLDQTGYLFISYNNVLAILTHSPLISLAFLALIVINLLVAYFQIGLLFIGARHLLYNEKRRLIEYIRKVFHESFGFMKKLTCAKALFIFFYIAMLFPFIRKMLKIYYLNKIVIPEFIQAYLEDRYWMWWLSILLLSLIFLYVSVRLMFALPKIVYDQLTVREAVMFSLEKTKKRVTFYAWNLFYILLKAHLLFYLPLIPLLLAQTLVDDITQRESLILGILNFVVIKNLYYMALTYFLVKFVSFLTGKELDMLPRREKDHIVRWGVMTCASLFFALEGYIYLEAPMVHLPQLISHRGVSNANGIQNTVESLETTAQLKPDLVETDVQETKDGQFVMMHDANLKNLAGINKSPQDLNLEELKGIDIFENGYQTKISSFEDYLSRANELGQKLLIEIKTSKKDSPDMMNRFLARYAAKLKIYGHQIQSLDYHVVEKVRQYDAELPVYFIMPYNSVFPKTRATGYTMEYSTLDEYFVSKLWTTDQKLYVWTVNDSEAISKSLHLGVDGVITDDLEKVQREIEVAQEDPEYTDLLLKKALEFFEF

SEQ ID NO: 1965 - DNA, 171 bp, Streptococcus pneumoniae
ttggttttgttccttttacttggtggtttagctctcctgttttctcttttagctttaaccagccataaatggtattacgtgagatttggaaaacgtgtgatgcttctgttatactacctattcgctcacaataagagagaacttttttacgaaaatctattgaatatgcca

SEQ ID NO: 1966 - protein, 57 aa, Streptococcus pneumoniae
  hypothetical protein
MVLFLLLGGLALLFSLLALTSHKWYYVRFGKRVMLLLYYLFAHNKRELFYENLLNMP

SEQ ID NO: 1967 - DNA, 345 bp, Streptococcus pneumoniae
atgtggtataatcttcttatggcatattcaatagattttcgtaaaaaagttctctcttattgtgagcgaataggtagtataacagaagcatcacacgttttccaaatctcacgtaataccatttatggctggttaaagctaaaagagaaaacaggagagctaaaccaccaagtaaaaggaacaaaaccaagaaaagttgatagagatagacttaaaaactatcttactgacaatccagatgcttatttgactgaaatagcttctgactttggctgtcatccaactaccatccactatgcgctcaaagctatgggctacactcgaaaaaaagaaccacacctacta

SEQ ID NO: 1968 - protein, 115 aa, Streptococcus pneumoniae
  IS630-Spn1, transposase Orf1 FRAMESHIFT; Cellular location: cytoplasm; Similar to strain R6 sequence 15902766 (1.E-65)
MWYNLLMAYSIDFRKKVLSYCERIGSITEASHVFQISRNTIYGWLKLKEKTGELNHQVKGTKPRKVDRDRLKNYLTDNPDAYLTEIASDFGCHPTTIHYALKAMGYTRKKEPHLL

SEQ ID NO: 1969 - DNA, 138 bp, Streptococcus pneumoniae
ttggttgcaggtctaacaaatggtgaattaatcgctccaatgacttacgaagagacgatgacgagcgacttttttgaagcttggtttcagaagtttctcttaccaacattaaccacaccatcggttattatagtaaaa

SEQ ID NO: 1970 - protein, 46 aa, Streptococcus pneumoniae
  IS630-Spn1, transposase Orf2, truncation; Cellular location: cytoplasm; Similar to strain R6 sequence 15903081 (6.E-21)
MVAGLTNGELIAPMTYEETMTSDFFEAWFQKFLLPTLTTPSVIIVK

SEQ ID NO: 1971 - DNA, 198 bp, Streptococcus pneumoniae
gtggtagcaagcgcttcggctagctcaacgagcacacaagctcaagagcaagttgacaagtctgaacttcgtgccttgagtcaagagttagaccaacgcttgaaagctttggcaacagtatctgatccgaaaatcgatgcaaccaaggctgtcctcctagatgctcaaaaagctccggaagatagtgccttgacagag

SEQ ID NO: 1972 - protein, 66 aa, Streptococcus pneumoniae
  hypothetical protein; Similar to strain R6 sequence 15902944 (2.E-30)
MVASASASSTSTQAQEQVDKSELRALSQELDQRLKALATVSDPKIDATKAVLLDAQKAPEDSALTE

SEQ ID NO: 1973 - DNA, 297 bp, Streptococcus pneumoniae
atgactgaaacaaactcagttccggcaggagtgattgtggtcagtctacttgccctcctaggcgtgattgccttctggctgattcgccgtaagaaagagtcagaaatccagcaattaagcacggaattgatcaaggttctaggacagctagatgcagaaaaagcggataaaaaagtccttgccaaagcccaaaaccttctccaagaaacccttgatttcgtgaaagaagaaaatggctcagcagagacagaaactaaactagtagaggagcttaaagcaatccttgacaaactcaag

SEQ ID NO: 1974 - protein, 99 aa, Streptococcus pneumoniae
  hypothetical protein; Cellular location: outside; Similar to strain R6 sequence 15902946 (3.E-49)
MTETNSVPAGVIVVSLLALLGVIAFWLIRRKKESEIQQLSTELIKVLGQLDAEKADKKVLAKAQNLLQETLDFVKEENGSAETETKLVEELKAILDKLK

SEQ ID NO: 1975 - DNA, 630 bp, Streptococcus pneumoniae
atgttttacttgagtttgtcaaggattgctttaagctcctctactagtttagtttctgtctctgctgagccattttcttctttcacgaaatcaagggtttcttggagaaggttttgggctttggcaaggacttttttatccgctttttctgcatctagctgtcctagaaccttgatcaattccgtgcttaattgctggatttctgactctttcttacggcgaatcagccagaaggcaatcacgcctaggagggcaagtagactgaccacaatcactcctgccggaactgagtttgtttcagtcatcttatctgaatccttactatcttccgttccttgttttgcatccttcttgtcctgtgcaggcttgctgtcgctagcatttgctttcacatctttgagagagtccaaggcagcccagccttcacagactctactgcagtatgcagaccttactctgtcaaggcactatcttccggagctttttgagcatctaggaggacagccttggttgcatcgattttcggatcagatactgttgccaaagctttcaagcgttggtctaactcttgactcaaggcacgaagttcagacttgtcaacttgctcttgagcttgtgtgctcgttgagc

SEQ ID NO: 1976 - protein, 210 aa, Streptococcus pneumoniae
  hypothetical protein
MFYLSLSRIALSSSTSLVSVSAEPFSSFTKSRVSWRRFWALARTFLSAFSASSCPRTLINSVLNCWISDSFLRRISQKAITPRRASRLTTITPAGTEFVSVILSESLLSSVPCFASFLSCAGLLSLAFAFTSLRESKAAQPSQTLLQYADLTLSRHYLPELFEHLGGQPWLHRFSDQILLPKLSSVGLTLDSRHEVQTCQLALELVCSLS

SEQ ID NO: 1977 - DNA, 705 bp, Streptococcus pneumoniae
ttggaaacgatagtatttttaatctctgtttttctagcaggtgttttatcctttttttctccttgtatttttcctcttctgccagtctatgctgggattttattggatgatcaagaaagtgcaaaaagcttttctttgtttgggagaaaggttctctggtcaggcttgattcgaacactttgctttatcgctggtatctctctcattttctttattctaggctttggtgctggttactttggtcatattctctatgcaaattggtttcgatatggcatgggagctattattatcattttgggtcttcaccagatggaaatttttcatttgaagaaattagaagttcaaaaaagttttacctttaaaaaatcagattctaatcgttattggtcagcttttttacttggtattacctttagctttggttggacaccttgtattggtccagttttaagttctgttttagcacttgcggcttctggaggcaatggcgcttggcaaggagcgatttatactctcatttacactctgggcatggcccttcctttcttggtattggcactagcttcaggtctagtcatgccatattttagtaaaatcaagcgtcatatgatgctactaaagaaaattggtggtttcctcattgttttaatgggaattttgttactattaggacaagtaaatgttctagctggaatttttgaa

SEQ ID NO: 1978 - protein, 235 aa, Streptococcus pneumoniae
  cytochrome c-type biogenesis protein CcdA (ccdA); Cellular location: membrane; Similar to strain R6 sequence 15902947 (e-132)
METIVFLISVFLAGVLSFFSPCIFPLLPVYAGILLDDQESAKSFSLFGRKVLWSGLIRTLCFIAGISLIFFILGFGAGYFGHILYANWFRYGMGAIIIILGLHQMEIFHLKKLEVQKSFTFKKSDSNRYWSAFLLGITFSFGWTPCIGPVLSSVLALAASGGNGAWQGAIYTLIYTLGMALPFLVLALASGLVMPYFSKIKRHMMLLKKIGGFLIVLMGILLLLGQVNVLAGIFE

SEQ ID NO: 1979 - DNA, 555 bp, Streptococcus pneumoniae
atgaaaaaagtaatgtttgctggcttaagtctcttgtcattagttgtattgatggcctgtggtgaggaagaaactaaaaagactcaagcagcacaacagccaaaacaacaaacgactgtacaacaaattgctgttggaaaagatgctccagacttcacattgcaatccatggatggcaaagaagttaagttatctgattttaagggtaaaaaggtttacttgaagttttgggcttcatggtgtggtccatgcaagaaaagtatgccagagttgatggaactagcggcgaaaccagatcgtgatttcgaaattcttactgtcattgcaccaggaattcaaggtgaaaaaactgttgagcaattcccacaatggttccaggaacaaggatataaggatatcccagttctttatgataccaaagcaaccaccttccaagcttatcaaattcgaagcattcctacagaatatttaattgatagccaaggaaagattggaaagattcaatttggtgctatcagtaatgcggatgcagaagcagcatttaaagaaatgaac

SEQ ID NO: 1980 - protein, 185 aa, Streptococcus pneumoniae
  thioredoxin family protein; Cellular location: lipoprotein; Similar to strain R6 sequence 15902948 (e-104)
MKKVMFAGLSLLSLVVLMACGEEETKKTQAAQQPKQQTTVQQIAVGKDAPDFTLQSMDGKEVKLSDFKGKKVYLKFWASWCGPCKKSMPELMELAAKPDRDFEILTVIAPGIQGEKTVEQFPQWFQEQGYKDIPVLYDTKATTFQAYQIRSIPTEYLIDSQGKIGKIQFGAISNADAEAAFKEMN

SEQ ID NO: 1981 - DNA, 1389 bp, Streptococcus pneumoniae
atgaatatatttagaacaaagaatgttagtttagataaaacagagatgcataggcatttgaagttatgggatttgattttgctgggtatcggagccatggtagggacaggcgtctttacaatcacaggtactgcagctgcaacacttgctggcccagccctagtgatttcaatcgttatttctgccttgtgtgtgggattatcagccctcttttttgcagaatttgcctcgcgagtacccgctacaggaggtgcctatagttacctctatgctatcttaggagaattccctgcctggttggctggttggttaaccatgatggagttcatgacagccatatcaggcgtagcttcgggttgggcagcttattttaaaggcttgctctctcaatacgggatagcctttcctcaggctttaaatggtacctttaatcctcaagcagggacatttgttgatttattgcctattcttgtcttggtcttggtgacttcgcttgttttactaaatgccaaggcagccttacgctttaattcgattctagttattttgaaattttccgctttagctctctttgttttagtaggaatttggaatattaagtttgataattggagcaattttgctccttacggttttggacaaatctatggagctagcactggtattatggctggtgcgtccttgatgttcttcggttttttgggatttgaatccatctctatggctgtagatgaagtcaagactcctcaaaaaaatattcctagagggattgtcttatcgctttctatcgtaaccattctctatgccttggtgacccttgttttgactggtgtggttcactatagtcatttaaatgtcgatgatgccgttgcctttgcccttcgtagtgttgggattagttgggcagccaactatgtgtcattagtggctatcttgaccttgattacagtttgtatttcgatgacctatgccctatcgcgtatgatttacagtttagcacgtgacggcttagtgcctgctgcctttaaggaactgacgaagactagcaagataccaaagaatgctactatcttgacaggtctagcttcagcagtagcagcaggaatgttcccactagccagtattgcagcctttttaaatatttgtaccttagcctacttgatcatgttggcttatggtctgattcgcttacggaaagaaaaaggaatgcccaaagctggggaatttaaaacaccattggtacctctgttaccaattttatcgatcatcatttgtttatccttcatgttacagtataatatgaatacctggattgctttcctagttgcgttgttagtaggaagtattatttacttcacttatggctataagcattctaccatagaagaa

SEQ ID NO: 1982 - protein, 463 aa, Streptococcus pneumoniae
  amino acid permease family protein; Cellular location: membrane; Similar to strain R6 sequence 15902949 (0.E+01)
MNIFRTKNVSLDKTEMHRHLKLWDLILLGIGAMVGTGVFTITGTAAATLAGPALVISIVISALCVGLSALFFAEFASRVPATGGAYSYLYAILGEFPAWLAGWLTMMEFMTAISGVASGWAAYFKGLLSQYGIAFPQALNGTFNPQAGTFVDLLPILVLVLVTSLVLLNAKAALRFNSILVILKFSALALFVLVGIWNIKFDNWSNFAPYGFGQIYGASTGIMAGASLMFFGFLGFESISMAVDEVKTPQKNIPRGIVLSLSIVTILYALVTLVLTGVVHYSHLNVDDAVAFALRSVGISWAANYVSLVAILTLITVCISMTYALSRMIYSLARDGLVPAAFKELTKTSKIPKNATILTGLASAVAAGMFPLASIAAFLNICTLAYLIMLAYGLIRLRKEKGMPKAGEFKTPLVPLLPILSIIICLSFMLQYNMNTWIAFLVALLVGSIIYFTYGYKHSTIEE

SEQ ID NO: 1983 - DNA, 933 bp, Streptococcus pneumoniae
atggttaaggagttgttcatgaagaaacaaaatttatttttagtcctgttaagtgtctttcttttgtgcttgggggcttgtggtcaaaaggaaagtcagacaggaaaggggatgaaaattgtgaccagtttttatcctatctacgctatggttaaggaagtatctggtgacttgaatgatgttcggatgattcagtcaagtagtggtattcactcctttgaaccttcggcaaatgatatcgcagccatctatgatgcagatgtctttgtttaccattctcatacactcgaatcttgggcaggaagtctggatccaaatctaaaaaaatccaaagtgaaggtcttagaggcttctgagggaatgaccttggaacgtgtccctggactagaggatgtggaagcaggggatggagttgatgaaaaaacgctctatgaccctcacacatggctagatcctgaaaaagctggagaagaagcccaaattatcgctgataaactttcagaggtggatagtgagcataaagagacttatcaaaaaaatgcgcaagcctttatcaaaaaagctcaggaattgactaagaaattccaaccaaaatttgaaaaagcgactcagaaaacatttgtaacacaacatacagccttttcttatctagcgaagagatttgggcttaatcaacttggtattgcaggtatctctcctgaacaagaaccaagtccacgacaactaacagaaattcaggaatttgttaagacctataaggttaaaacgatttttacagaaagtaacgcttcttcaaaagtagctgaaactcttgtcaaatcaacaggtgtgggtcttaaaactctgaatcctttagagtcagacccacaaaatgacaagacctatttagaaaatcttgaagaaaatatgagtattctagcagaagaattaaag

SEQ ID NO: 1984 - protein, 311 aa, Streptococcus pneumoniae
  adhesion lipoprotein (lmb); Cellular location: lipoprotein; Similar to strain R6 sequence 15902950 (e-173)
MVKELFMKKQNLFLVLLSVFLLCLGACGQKESQTGKGMKIVTSFYPIYAMVKEVSGDLNDVRMIQSSSGIHSFEPSANDIAAIYDADVFVYHSHTLESWAGSLDPNLKKSKVKVLEASEGMTLERVPGLEDVEAGDGVDEKTLYDPHTWLDPEKAGEEAQIIADKLSEVDSEHKETYQKNAQAFIKKAQELTKKFQPKFEKATQKTFVTQHTAFSYLAKRFGLNQLGIAGISPEQEPSPRQLTEIQEFVKTYKVKTIFTESNASSKVAETLVKSTGVGLKTLNPLESDPQNDKTYLENLEENMSILAEELK

SEQ ID NO: 1985 - DNA, 2517 bp, Streptococcus pneumoniae
atgaaaattaataaaaaatatctagcaggttcagtggcagtccttgccctaagtgtttgttcctatgaacttggtcgtcaccaagctggtcaggttaagaaagagtctaatcgagtttcttatatagatggtgatcaggctggtcaaaaggcagaaaacttgacaccagatgaagtcagtaagagggaggggatcaacgccgaacaaatcgtcatcaagattacggatcaaggttatgtgacctctcatggagaccattatcattactataatggcaaggtcccttatgatgccatcatcagtgaagagctcctcatgaaagatccgaattatcagttgaaggattcagacattgtcaatgaaatcaagggtggttatgttatcaaggtagatggaaaatactatgtttaccttaaggatgcagctcatgcggataatattcggacaaaagaagagattaaacgtcagaagcaggaacacagtcataatcacgggggtggttctaacgatcaagcagtagttgcagccagagcccaaggacgctatacaacggatgatggttatatcttcaatgcatctgatatcattgaggacacgggtgatgcttatatcgttcctcacggcgaccattaccattacattcctaagaatgagttatcagctagcgagttagctgctgcagaagcctattggaatgggaagcagggatctcgtccttcttcaagttctagttataatgcaaatccagctcaaccaagattgtcagagaaccacaatctgactgtcactccaacttatcatcaaaatcaaggggaaaacatttcaagccttttacgtgaattgtatgctaaacccttatcagaacgccatgtggaatctgatggccttattttcgacccagcgcaaatcacaagtcgaaccgccagaggtgtagctgtccctcatggtaaccattaccactttatcccttatgaacaaatgtctgaattggaaaaacgaattgctcgtattattccccttcgttatcgttcaaaccattgggtaccagattcaagaccagaacaaccaagtccacaatcgactccggaacctagtccaagtccgcaacctgcaccaaatcctcaaccagctccaagcaatccaattgatgagaaattggtcaaagaagctgttcgaaaagtaggcgatggttatgtctttgaggagaatggagtttctcgttatatcccagccaaggatctttcagcagaaacagcagcaggcattgatagcaaactggccaagcaggaaagtttatctcataagctaggagctaagaaaactgacctcccatctagtgatcgagaattttacaataaggcttatgacttactagcaagaattcaccaagatttacttgataataaaggtcgacaagttgattttgaggctttggataacctgttggaacgactcaaggatgtcccaagtgataaagtcaagttagtggatgatattcttgccttcttagctccgattcgtcatccagaacgtttaggaaaaccaaatgcgcaaattacctacactgatgatgagattcaagtagccaagttggcaggcaagtacacaacagaagacggttatatctttgatcctcgtgatataaccagtgatgagggggatgcctatgtaactccacatatgacccatagccactggattaaaaaagatagtttgtctgaagctgagagagcggcagcccaggcttatgctaaagagaaaggtttgacccctccttcgacagaccatcaggattcaggaaatactgaggcaaaaggagcagaagctatctacaaccgcgtgaaagcagctaagaaggtgccacttgatcgtatgccttacaatcttcaatatactgtagaagtcaaaaacggtagtttaatcatacctcattatgaccattaccataacatcaaatttgagtggtttgacgaaggcctttatgaggcacctaaggggtatactcttgaggatcttttggcgactgtcaagtactatgtcgaacatccaaacgaacgtccgcattcagataatggttttggtaacgctagcgaccatgttcgtaaaaataaggtagaccaagacagtaaacctgatgaagataaggaacatgatgaagtaagtgagccaactcaccctgaatctgatgaaaaagagaatcacgctggtttaaatccttcagcagataatctttataaaccaagcactgatacggaagagacagaggaagaagctgaagataccacagatgaggctgaaattcctcaagtagagaattctgttattaacgctaagatagcagatgcggaggccttgctagaaaaagtaacagatcctagtattagacaaaatgctatggagacattgactggtctaaaaagtagtcttcttctcggaacgaaagataataacactatttcagcagaagtagatagtctcttggctttgttaaaagaaagtcaaccggctcctatacag

SEQ ID NO: 1986 - protein, 839 aa, Streptococcus pneumoniae
  conserved hypothetical protein (Pneumococcal histidine); Cellular location: lipoprotein; Similar to strain R6 sequence 15902951 (0.E+01)
MKINKKYLAGSVAVLALSVCSYELGRHQAGQVKKESNRVSYIDGDQAGQKAENLTPDEVSKREGINAEQIVIKITDQGYVTSHGDHYHYYNGKVPYDAIISEELLMKDPNYQLKDSDIVNEIKGGYVIKVDGKYYVYLKDAAHADNIRTKEEIKRQKQEHSHNHGGGSNDQAVVAARAQGRYTTDDGYIFNASDIIEDTGDAYIVPHGDHYHYIPKNELSASELAAAEAYWNGKQGSRPSSSSSYNANPAQPRLSENHNLTVTPTYHQNQGENISSLLRELYAKPLSERHVESDGLIFDPAQITSRTARGVAVPHGNHYHFIPYEQMSELEKRIARIIPLRYRSNHWVPDSRPEQPSPQSTPEPSPSPQPAPNPQPAPSNPIDEKLVKEAVRKVGDGYVFEENGVSRYIPAKDLSAETAAGIDSKLAKQESLSHKLGAKKTDLPSSDREFYNKAYDLLARIHQDLLDNKGRQVDFEALDNLLERLKDVPSDKVKLVDDILAFLAPIRHPERLGKPNAQITYTDDEIQVAKLAGKYTTEDGYIFDPRDITSDEGDAYVTPHMTHSHWIKKDSLSEAERAAAQAYAKEKGLTPPSTDHQDSGNTEAKGAEAIYNRVKAAKKVPLDRMPYNLQYTVEVKNGSLIIPHYDHYHNIKFEWFDEGLYEAPKGYTLEDLLATVKYYVEHPNERPHSDNGFGNASDHVRKNKVDQDSKPDEDKEHDEVSEPTHPESDEKENHAGLNPSADNLYKPSTDTEETEEEAEDTTDEAEIPQVENSVINAKIADAEALLEKVTDPSIRQNAMETLTGLKSSLLLGTKDNNTISAEVDSLLALLKESQPAPIQ

SEQ ID NO: 1987 - DNA, 3117 bp, Streptococcus pneumoniae
atgaaatttagtaaaaaatatatagcagctggatcagctgttatcgtatccttgagtctatgtgcctatgcactaaaccagcatcgttcgcaggaaaataaggacaataatcgtgtctcttatgtggatggcagccagtcaagtcagaaaagtgaaaacttgacaccagaccaggttagccagaaagaaggaattcaggctgagcaaattgtaatcaaaattacagatcagggctatgtaacgtcacacggtgaccactatcattactataatgggaaagttccttatgatgccctctttagtgaagaactcttgatgaaggatccaaactatcaacttaaagacgctgatattgtcaatgaagtcaagggtggttatatcatcaaggtcgatggaaaatattatgtctacctgaaagatgcagctcatgctgataatgttcgaactaaagatgaaatcaatcgtcaaaaacaagaacatgtcaaagataatgagaaggttaactctaatgttgctgtagcaaggtctcagggacgatatacgacaaatgatggttatgtctttaatccagctgatattatcgaagatacgggtaatgcttatatcgttcctcatggaggtcactatcactacattcccaaaagcgatttatctgctagtgaattagcagcagctaaagcacatctggctggaaaaaatatgcaaccgagtcagttaagctattcttcaacagctagtgacaataacacgcaatctgtagcaaaaggatcaactagcaagccagcaaataaatctgaaaatctccagagtcttttgaaggaactctatgattcacctagcgcccaacgttacagtgaatcagatggcctggtctttgaccctgctaagattatcagtcgtacaccaaatggagttgcgattccgcatggcgaccattaccactttattccttacagcaagctttctgccttagaagaaaagattgccagaatggtgcctatcagtggaactggttctacagtttctacaaatgcaaaacctaatgaagtagtgtctagtctaggcagtctttcaagcaatccttcttctttaacgacaagtaaggagctctcttcagcatctgatggttatatttttaatccaaaagatatcgttgaagaaacggctacagcttatattgtaagacatggtgatcatttccattacattccaaaatcaaatcaaattgggcaaccgactcttccaaacaatagtctagcaacaccttctccatctcttccaatcaatccaggaacttcacatgagaaacatgaagaagatggatacggatttgatgctaatcgtattatcgctgaagatgaatcaggttttgtcatgagtcacggagaccacaatcattatttcttcaagaaggacttgacagaagagcaaattaaggctgcgcaaaaacatttagaggaagttaaaactagtcataatggattagattctttgtcatctcatgaacaggattatccaagtaatgccaaagaaatgaaagatttagataaaaaaatcgaagaaaaaattgctggcattatgaaacaatatggtgtcaaacgtgaaagtattgtcgtgaataaagaaaaaaatgcgattatttatccgcatggagatcaccatcatgcagatccgattgatgaacataaaccggttggaattggtcattctcacagtaactatgaactgtttaaacccgaagaaggagttgctaaaaaagaagggaataaagtttatactggagaagaattaacgaatgttgttaatttgttaaaaaatagtacgtttaataatcaaaactttactctagccaatggtcaaaaacgcgtttcttttagttttccgcctgaattggagaaaaaattaggtatcaatatgctagtaaaattaataacaccagatggaaaagtattggagaaagtatctggtaaagtatttggagaaggagtagggaatattgcaaactttgaattagatcaaccttatttaccaggacaaacatttaagtatactatcgcttcaaaagattatccagaagtaagttatgatggtacatttacagttccaacctctttagcttacaaaatggccagtcaaacgattttctatcctttccatgcaggggatacttatttaagagtgaaccctcaatttgcagtgcctaaaggaactgatgctttagtcagagtgtttgatgaatttcatggaaatgcttatttagaaaataactataaagttggtgaaatcaaattaccgattccgaaattaaaccaaggaacaaccagaacggccggaaataaaattcctgtaaccttcatggcaaatgcttatttggacaatcaatcgacttatattgtggaagtacctatcttggaaaaagaaaatcaaactgataaaccaagtattctaccacaatttaaaaggaataaagcacaagaaaacttaaaacttgatgaaaaggtagaagaaccaaagactagtgagaaggtagaaaaagaaaaactttctgaaactgggaatagtactagtaattcaacgttagaagaagttcctacagtggatcctgtacaagaaaaagtagcaaaatttgctgaaagttatgggatgaagctagaaaatgtcttgtttaatatggacggaacaattgaattatatttaccatcgggagaagtcattaaaaagaatatggcagattttacaggagaagcacctcaaggaaatggtgaaaataaaccatctgaaaatggaaaagtatctactggaacagttgagaaccaaccaacagaaaataaaccagcagattctttaccagaggcaccaaacgaaaaacctgtaaaaccagaaaactcaacggataatggaatgttgaatccagaagggaatgtggggagtgaccctatgttagatccagcattagaggaagctccagcagtagatcctgtacaagaaaaattagaaaaatttacagctagttacggattaggcttagatagtgttatattcaatatggatggaacgattgaattaagattgccaagtggagaagtgataaaaaagaatttatctgatctcatagcg

SEQ ID NO: 1988 - protein, 1039 aa, Streptococcus pneumoniae
  conserved hypothetical protein (Pneumococcal histidine triad); Cellular location: lipoprotein; Feature of note: similar to TeNT; Similar to strain R6 sequence 15902952 (0.E+01)
MKFSKKYIAAGSAVIVSLSLCAYALNQHRSQENKDNNRVSYVDGSQSSQKSENLTPDQVSQKEGIQAEQIVIKITDQGYVTSHGDHYHYYNGKVPYDALFSEELLMKDPNYQLKDADIVNEVKGGYIIKVDGKYYVYLKDAAHADNVRTKDEINRQKQEHVKDNEKVNSNVAVARSQGRYTTNDGYVFNPADIIEDTGNAYIVPHGGHYHYIPKSDLSASELAAAKAHLAGKNMQPSQLSYSSTASDNNTQSVAKGSTSKPANKSENLQSLLKELYDSPSAQRYSESDGLVFDPAKIISRTPNGVAIPHGDHYHFIPYSKLSALEEKIARMVPISGTGSTVSTNAKPNEVVSSLGSLSSNPSSLTTSKELSSASDGYIFNPKDIVEETATAYIVRHGDHFHYIPKSNQIGQPTLPNNSLATPSPSLPINPGTSHEKHEEDGYGFDANRIIAEDESGFVMSHGDHNHYFFKKDLTEEQIKAAQKHLEEVKTSHNGLDSLSSHEQDYPSNAKEMKDLDKKIEEKIAGIMKQYGVKRESIVVNKEKNAIIYPHGDHHHADPIDEHKPVGIGHSHSNYELFKPEEGVAKKEGNKVYTGEELTNVVNLLKNSTFNNQNFTLANGQKRVSFSFPPELEKKLGINMLVKLITPDGKVLEKVSGKVFGEGVGNIANFELDQPYLPGQTFKYTIASKDYPEVSYDGTFTVPTSLAYKMASQTIFYPFHAGDTYLRVNPQFAVPKGTDALVRVFDEFHGNAYLENNYKVGEIKLPIPKLNQGTTRTAGNKIPVTFMANAYLDNQSTYIVEVPILEKENQTDKPSILPQFKRNKAQENLKLDEKVEEPKTSEKVEKEKLSETGNSTSNSTLEEVPTVDPVQEKVAKFAESYGMKLENVLFNMDGTIELYLPSGEVIKKNMADFTGEAPQGNGENKPSENGKVSTGTVENQPTENKPADSLPEAPNEKPVKPENSTDNGMLNPEGNVGSDPMLDPALEEAPAVDPVQEKLEKFTASYGLGLDSVIFNMDGTIELRLPSGEVIKKNLSDLIA

SEQ ID NO: 1989 - DNA, 567 bp, Streptococcus pneumoniae
ttgttagaaattactttaaaatccccttatcaatttgctcatattctatttcaatctactatagtaccacatggtggtcactatcatttcattcctgagagtgacttgtcggcaggtgaattagcagccacatatgtctttaaccctaatgatattgtcagagatacaggtgatgcttatatagtaagacatggggatcactatcactatattcctaagtcatctcttaacaatcccccatcacactctaacacggaagaggtaggaagttcttctagttctgtattaagtaatccgtcactacatgtccatcatgaggaagaagatggtcatggttttgatgccaatcgaattataagtgaagattcagaaggttttgtgattcctcatggcgaccacaatcactacatcaaggttcaaactaagggatatgaagcggctttgaaaaacaagattccatccctgcaatccaactatcaacctggaacttttgatgagaaggcagtcttggcaaaagtagatcaacttctagctgatagcagaagcatctacaaagacagattgagt

SEQ ID NO: 1990 - protein, 189 aa, Streptococcus pneumoniae
  hypothetical protein
MLEITLKSPYQFAHILFQSTIVPHGGHYHFIPESDLSAGELAATYVFNPNDIVRDTGDAYIVRHGDHYHYIPKSSLNNPPSHSNTEEVGSSSSSVLSNPSLHVHHEEEDGHGFDANRIISEDSEGFVIPHGDHNHYIKVQTKGYEAALKNKIPSLQSNYQPGTFDEKAVLAKVDQLLADSRSIYKDRLS

SEQ ID NO: 1991 - DNA, 201 bp, Streptococcus pneumoniae
ttgatttgccttgctcaaaagactttctacttcttccttgctatctgtcgcagattattggttgctatctaccatgtactcctaaaacaggagagttataatccaagattacaaggccttacagaaataagaaatccagataagacaatgttcgtccaagacgctattcgcttcgcacagcagcacggattcaatatgctt

SEQ ID NO: 1992 - protein, 67 aa, Streptococcus pneumoniae
  hypothetical protein; Cellular location: membrane; Similar to strain R6 sequence 15902955 (1.E-31)
MICLAQKTFYFFLAICRRLLVAIYHVLLKQESYNPRLQGLTEIRNPDKTMFVQDAIRFAQQHGFNML

SEQ ID NO: 1993 - DNA, 627 bp, Streptococcus pneumoniae
ttgagcaaggcaaatcaactcttggaacaaatccatgaagaaggaatcagacaatccttggcagaagaagtagaaaatctaaaagctgccacaaacaaggctgatgcagacttggatgaagtaaacagtcaggtaaaagatgtcttgactcgtatcgctagcgcccttcaacaagaaaaggaaaatgctgagcaagatcctcagacacttgtactctatcaaaaactctacgatattctcatgtcgcttcactcttatttagaaagtaataatggatctgatgcggactttgataaggtggatgcattattagatcaactttctgctaagagtaaagacaaaacagctttacttgaatcgacaaaagctattctagttttgaatcatcaaatccagtcaaaagctagcgcaagtgaagaaacaagtccagcaagaaatgctgaagcaaatggtgataacaccagtgctgagaaccaaccaaacgcaactgcagaatctaacattgaaactgctagcgacgaaaacaaaccaagcaatacaagagattctaaacctgctgaatcaacttcagaaaatgaaacaacagaatcttctacaactactggaaatcaagaaaaaccagtagaa

SEQ ID NO: 1994 - protein, 209 aa, Streptococcus pneumoniae
  hypothetical protein; Cellular location: cytoplasm; Similar to strain R6 sequence 15902956 (e-112)
MSKANQLLEQIHEEGIRQSLAEEVENLKAATNKADADLDEVNSQVKDVLTRIASALQQEKENAEQDPQTLVLYQKLYDILMSLHSYLESNNGSDADFDKVDALLDQLSAKSKDKTALLESTKAILVLNHQIQSKASASEETSPARNAEANGDNTSAENQPNATAESNIETASDENKPSNTRDSKPAESTSENETTESSTTTGNQEKPVE

SEQ ID NO: 1995 - DNA, 1221 bp, Streptococcus pneumoniae
atgacttatccaaatctcttggaccgcttcttaacctatgttaaggtcaacacgcgctctgatgaacactctactactactccaagtacacagagtcaggttgacttcgcaacaaatgtcctaattcctgaaatgaaacgtgttggactgcaaaatgtttactatctaccgaatggttttgctattggaaccttgccagccaacgatccgtctttaacacgtaagattggttttatatcgcacatggatactgctgattttaatgctgaaggagtcaatccacaggtaattgaaaactacgatggtggtgtgattgaactagggaattctggtttcaaactcgatccagctgacttcaagagtcttgaaaaatatccaggacaaacgctcatcacaacagatggaacaaccttgctaggtgctgatgacaagtcaggaattgctgaaattatgacagccattgaatatctaactgctcatcctgaaattaagcactgtgagattcgtgttggttttggtccagatgaagaaatcggtgttggtgccaataaatttgatgcagaagattttgatgtggattttgcctacactgttgatggtggtccactaggtgaacttcagtacgagactttctcagccgctggtgctgaattgcatttccaaggtcgtaatgtccaccctggtactgccaaagggcagatggtcaatgcccttcagctagcaattgattttcataatcaacttccagaaaatgaccgacctgagttaactgaaggttaccaaggtttttaccatctaatggatgtgacaggtagtgttgaggaggcgcgtgcaagctacatcattcgtgattttgaaaaagatgcctttgaagcgcgtaaagcatccatgcaatctatcgctgataagatgaatgaagaacttgggagcgaccgtgtcactctcaacttgacagaccagtactacaatatgaaagaagtcattgaaaaagatatgactccaattaccattgctaaagccgttatggaagatctaggtatcacgcctattatcgaaccaatccggggtggaacagacggctctaagatttcctttatgggaatcccaactccgaatatctttgcaggtggcgaaaatatgcacggacgttttgaatacgttagccttcagactatggaacgtgcagttgataccatcattggcatcgtagcttataaaggc

SEQ ID NO: 1996 - protein, 407 aa, Streptococcus pneumoniae
  peptidase t (pepT); Cellular location: cytoplasm; Similar to strain R6 sequence 15902957 (0.E+01)
MTYPNLLDRFLTYVKVNTRSDEHSTTTPSTQSQVDFATNVLIPEMKRVGLQNVYYLPNGFAIGTLPANDPSLTRKIGFISHMDTADFNAEGVNPQVIENYDGGVIELGNSGFKLDPADFKSLEKYPGQTLITTDGTTLLGADDKSGIAEIMTAIEYLTAHPEIKHCEIRVGFGPDEEIGVGANKFDAEDFDVDFAYTVDGGPLGELQYETFSAAGAELHFQGRNVHPGTAKGQMVNALQLAIDFHNQLPENDRPELTEGYQGFYHLMDVTGSVEEARASYIIRDFEKDAFEARKASMQSIADKMNEELGSDRVTLNLTDQYYNMKEVIEKDMTPITIAKAVMEDLGITPIIEPIRGGTDGSKISFMGIPTPNIFAGGENMHGRFEYVSLQTMERAVDTIIGIVAYKG

SEQ ID NO: 1997 - DNA, 1092 bp, Streptococcus pneumoniae
atgaaaaaagcaattttaatgatgaccttcggttcaccagaagagattatctttgaaggtgtagctgattttttcacaaatattcgtcgtggggtgagaccccaagaccacgagattcagactctttatgataattatgtacgaattggaggcacgcctctgcaaaaaattacccgtcaagaggttgccttggtagaagctaggctggggagtgaatacagtgtctactttgctaataagttttccagtccctttattccagatgtgatcggtcaaatggaagcagacggaattgaacagtgtatttgcttgattttggagccccattattctttctactctgtcatgggctatgaaaaatttttagaaagcaaacaaattcaatttttggtcattaaggactggtatcaggaagaagcgctcttaaactattgggcagatgaaattgctaagattttaaaagaagaagtaaagcaagacagctttaaagtcatcttttcagcccatagtgtgcctatttttgccttggactttggtgatccttatatagaccaaattttcgaaaatagcaagctagtcgctgaaaaactgggcttgagttcagaacaatataccaacacttggcaaagtgagagtgatattggtattccatggattaaaccagatgttttggagtatctcagagaacagacagaacatccagaccattatatttttgtacctattagtttcatcagtgagcatattgaggtcttgtttgacaatgatgtggaatgttatgacttatgtcaggaatttggggtaaactaccatcgtccaccaatgccaaatacagattctcgtttgattgatgctttggtcaatacagttagagtcaatgaaaatcaagagtttaaggaatttctcccagaagaagagacctttgatgagttagttccttcagacgagacgaaaaacattttggctgaatctcaagatttacaaatgccagaatttgtgaaaaaattgattgagaaaaaaggtcgtgaaaatgttaagatgccttatcttatcaaaaaaatgcttgaaaaagcaggcaagttacccaaagag

SEQ ID NO: 1998 - protein, 364 aa, Streptococcus pneumoniae
  ferrochelatase (hemH); Cellular location: cytoplasm; Similar to strain R6 sequence 15902958 (0.E+01)
MKKAILMMTFGSPEEIIFEGVADFFTNIRRGVRPQDHEIQTLYDNYVRIGGTPLQKITRQEVALVEARLGSEYSVYFANKFSSPFIPDVIGQMEADGIEQCICLILEPHYSFYSVMGYEKFLESKQIQFLVIKDWYQEEALLNYWADEIAKILKEEVKQDSFKVIFSAHSVPIFALDFGDPYIDQIFENSKLVAEKLGLSSEQYTNTWQSESDIGIPWIKPDVLEYLREQTEHPDHYIFVPISFISEHIEVLFDNDVECYDLCQEFGVNYHRPPMPNTDSRLIDALVNTVRVNENQEFKEFLPEEETFDELVPSDETKNILAESQDLQMPEFVKKLIEKKGRENVKMPYLIKKMLEKAGKLPKE

SEQ ID NO: 1999 - DNA, 375 bp, Streptococcus pneumoniae
atgttaaaaaatctaaaatcgttcttgcttcgaggaaatgttattgaccttgctgtcggtgttgtaattgcctctgcttttggtgctatcgttacttcacttgtaaacgacattatcactcctcttattttaaatcccgctttgaaagctgctaaagttgaacgtatcgctcaactttcttggcatggagtcggctatggtaacttcttaagtgctattatcaattttatctttgtgggtaccgccctcttctttattatcaagggcattgaaaaagcacagaagctgactggcataaaggaagaaaaaactgacgaaaaaaaaccaaccgaattggaagtccttcaagaaataaaagctctccttgagaaaaaa

SEQ ID NO: 2000 - protein, 125 aa, Streptococcus pneumoniae
  large conductance mechanosensitive channel protein MscL (mscL); Cellular location: membrane; Similar to strain R6 sequence 15902959 (1.E-63)
MLKNLKSFLLRGNVIDLAVGVVIASAFGAIVTSLVNDIITPLILNPALKAAKVERIAQLSWHGVGYGNFLSAIINFIFVGTALFFIIKGIEKAQKLTGIKEEKTDEKKPTELEVLQEIKALLEKK

SEQ ID NO: 2001 - DNA, 429 bp, Streptococcus pneumoniae
atgaaaaaacctattcaaaaattttttaacaatgaaatcttagcctatctcttttttggtatagtgactactcttgttgctatactatcacgattagtcatttatcagctaagtcatcaggaactccttgctacggccttggcaaatattatcggtatcctatttgcctttatcacaaatgatacgattgtatttaagcaaaaaaagaaaaatagacttatccgtttagtgaaattttctcttgcccgcctttctacttttctgttagacttgtttttaacttttctctttgtaacccaatttcctcacatcatagggcaattcgtaactgaaaacattgataagataaatgctattgaaacaataattgcacaaatattcattattatcatcaattatatcttgagcaaggtctatatttttagaaaa

SEQ ID NO: 2002 - protein, 143 aa, Streptococcus pneumoniae
  GtrA family protein; Cellular location: membrane; Similar to strain R6 sequence 15902960 (5.E-74)
MKKPIQKFFNNEILAYLFFGIVTTLVAILSRLVIYQLSHQELLATALANIIGILFAFITNDTIVFKQKKKNRLIRLVKFSLARLSTFLLDLFLTFLFVTQFPHIIGQFVTENIDKINAIETIIAQIFIIIINYILSKVYIFRK

SEQ ID NO: 2003 - DNA, 507 bp, Streptococcus pneumoniae
atgaaaaaattaactattcgtgatgttgcagatattgcaatcgtcgctgctatctacgtcgttttgactgtcacaccgcccctaaatgccatcagctatggtgcttatcagtttcgtatttcagaaatgatgaactttatggctttttacaatcctaagtacatcatcggagttaccatcggttgtatgattgctaatttctttagcttcggactgctagatgtctttgttggtggtggttcaaccttagtattcctcagtttaggtgtttggctttttgcaaaatatagcaaggattacctctttaacggattgattcgaaaagatcatttcttcttttcaatcctcttttcaatttccatgtttactatcgctgcagagttaaatattgtagcagaattaccattcttccttacttggtttacaacaggaatcggtgaatttgcttcattgattattggagcgattattattggtaaaattggtcgtcgaattgatttaagtaaa

SEQ ID NO: 2004 - protein, 169 aa, Streptococcus pneumoniae
  conserved hypothetical protein; Cellular location: membrane; Similar to strain R6 sequence 15902961 (2.E-93)
MKKLTIRDVADIAIVAAIYVVLTVTPPLNAISYGAYQFRISEMMNFMAFYNPKYIIGVTIGCMIANFFSFGLLDVFVGGGSTLVFLSLGVWLFAKYSKDYLFNGLIRKDHFFFSILFSISMFTIAAELNIVAELPFFLTWFTTGIGEFASLIIGAIIIGKIGRRIDLSK

SEQ ID NO: 2005 - DNA, 1074 bp, Streptococcus pneumoniae
atgggatatacagttgctgtagtcggcgcgacaggtgctgtcggtgctcagatgataaaaatgttggaagaatcaacacttccaatcgataaaattcgttaccttgcttctgcacgttcagcaggtaagtcattgaaatttaaagatcaagatattacaattgaagaaacgactgaaacagcttttgaaggagttgatattgctctcttttcagcaggtagttctacatcagctaagtatgcaccatacgcagtaaaagctggcgtggtagtagtagataatacatcttatttccgtcaaaatccagatgttcctttggttgttccagaggtcaatgctcatgcacttgatgctcacaacggaatcattgcctgccctaattgttcaacaattcaaatgatggtggctcttgagccggttcgccaaaaatggggcttggaccgtatcattgtttcaacttatcaagccgtttcaggtgctggtatgggagcaattcttgagacacaacgtgaacttcgtgaagtcttgaatgatggtgtgaaaccacgtgatttgcatgcggaaatcttgccttcaggtggtgacaagaaacattatcctatcgcctttaacgctcttccacaaattgatgttttcactgataatgattacacgtacgaagagatgaagatgaccaaggaaactaagaaaattatggaagatgatagcattgcagtatctgcaacatgtgtgcgtattccagtcttgtcagctcactctgagtctgtttatatcgaaacaaaagaagtggctccaatcgaagaagtaaaagcagctatcgcagccttcccaggtgctgttcttgaagatgatgtagctcatcaaatctatcctcaagctatcaatgcagttggttcgcgtgatacctttgttggtcgtatccgtaaagacttggatgcagaaaaaggaattcacatgtgggttgtttcagataaccttctcaaaggtgctgcttggaactcagttcagattgctgaaactcttcatgaacgtggattggttcgtccaacagccgaattgaaatttgaattaaaa

SEQ ID NO: 2006 - protein, 358 aa, Streptococcus pneumoniae
  aspartate-semialdehyde dehydrogenase (asd); Cellular location: cytoplasm; Similar to strain R6 sequence 15902962 (0.E+01)
MGYTVAVVGATGAVGAQMIKMLEESTLPIDKIRYLASARSAGKSLKFKDQDITIEETTETAFEGVDIALFSAGSSTSAKYAPYAVKAGVVVVDNTSYFRQNPDVPLVVPEVNAHALDAHNGIIACPNCSTIQMMVALEPVRQKWGLDRIIVSTYQAVSGAGMGAILETQRELREVLNDGVKPRDLHAEILPSGGDKKHYPIAFNALPQIDVFTDNDYTYEEMKMTKETKKIMEDDSIAVSATCVRIPVLSAHSESVYIETKEVAPIEEVKAAIAAFPGAVLEDDVAHQIYPQAINAVGSRDTFVGRIRKDLDAEKGIHMWVVSDNLLKGAAWNSVQIAETLHERGLVRPTAELKFELK

SEQ ID NO: 2007 - DNA, 933 bp, Streptococcus pneumoniae
gtgtcttatcaagatttaaaaaaatgtaaaatcattacagcctttattacccccttccatgaggatggttccattaactttgatgctattccagccttgattgagcatttattggcccatcatacggatggaattcttctcgcaggaacgactgctgagagtccaactttgacccacgatgaggagttggagttgtttgcggctgtacaaaaggttgtcaatggacgcgttcctttgattgcgggtgtaggtactaatgatacgcgtgactctattgagtttgtcaaagaagtagcggaatttggtggtttcgcagctgggcttgctattgttccttactacaacaaaccttctcaagaagggatgtatcagcactttaagactattgcagatgcttctgacctaccaattattatctataacattccagggcgtgtagttgtcgaattgactccagaaaccatgcttcgcttggctgaccatccaaatattatcggtgtcaaagaatgtactagcttggctaatatggcttacttgattgagcacaagcctgaagagttcttgatttatacaggtgaggatggagatgctttccatgccatgaaccttggggcggatggggttatttctgttgcctctcatacaaatggggatgaaatgcacgagatgtttactgcgattgcagaaagcgatatgaagaaagccgcagcaattcagcgtaaattcattcctaaggttaatgctctcttctcttatccaagtcctgctccagttaaggcaattcttaactatatgggatttgaagctggacccactcgtctacctcttgttccagcaccagaagaagatgccaaacgcattatcaaggttgtcgtagatggcgactacgaagcaactaaggcaactgtaacaggggtcttaagaccagattac

SEQ ID NO: 2008 - protein, 311 aa, Streptococcus pneumoniae
  dihydrodipicolinate synthase (dapA); Cellular location: cytoplasm; Similar to strain R6 sequence 15902963 (e-176)
MSYQDLKKCKIITAFITPFHEDGSINFDAIPALIEHLLAHHTDGILLAGTTAESPTLTHDEELELFAAVQKVVNGRVPLIAGVGTNDTRDSIEFVKEVAEFGGFAAGLAIVPYYNKPSQEGMYQHFKTIADASDLPIIIYNIPGRVVVELTPETMLRLADHPNIIGVKECTSLANMAYLIEHKPEEFLIYTGEDGDAFHAMNLGADGVISVASHTNGDEMHEMFTAIAESDMKKAAAIQRKFIPKVNALFSYPSPAPVKAILNYMGFEAGPTRLPLVPAPEEDAKRIIKVVVDGDYEATKATVTGVLRPDY

SEQ ID NO: 2009 - DNA, 1098 bp, Streptococcus pneumoniae
atgactttcaaaaaaccttctaaaattccttatcttgaaacgactggtatgcccactagaattctccttagaaagcgtcgattcaagtgctatcactgttcaaaaatgatggtcgctgaaacttctatcgtcaagaagaatcaccaaatccctcgtatcatcaaccaaaagattgctcaaaagttaattgaaaagatttctatgactgatattgcccatcagctttccatctcaacttcaactgttattcgtaagctcaatgactttcactttaaacatgatttttcttgtcttcctgagattatgtcttgggatgagtatgcttttacaaaaggaaagatgagcttcattgcgcaagattttaacaatctcaatatcatcactgttcttaagggaagaacacaagctgtcatccgaaatcactttcttaaatatgatagagccgtccgatgtcgcgtcaaaatcattactatggatatgtttagtccttactatgacttagctagacaacttttcccgtgtgctaaaatcgtgttggatcgctttcacattgtacaacatcttagccgtgctatgagtcgtgtgcgtgtccaaatcatgaatcagtttcatcgaaaatcccatgaatacaaggctatcaagcgctactggaaactcattcaacaggatagccgtaaactgagtgataagcgattttatcgtcctacttttcgtatgcacttaaccaataaagagattttaaacaagcttttgagctattcacaaaacttgaaacatcactatcagctctatcaactcttgctgtttcactttcagaataaggaaccggagaaatttttcggactcattgaggacaatctgaagcaggttcatcctatttttcagactgtctttaaaacctttctaaaggacaaaaagaaaatcgtcaacacccttcaactaccctattcaaacgccaaattggaagcgaccaataatctcatcaaacttatcaagcgcaatgcctttggttttcggaactttgaaaacttcaaaaaacggatttttatcgctctgaatatcaaaaaagaaaggacaaaatttgtcctttctcgagct

SEQ ID NO: 2010 - protein, 366 aa, Streptococcus pneumoniae
  transposase
MTFKKPSKIPYLETTGMPTRILLRKRRFKCYHCSKMMVAETSIVKKNHQIPRIINQKIAQKLIEKISMTDIAHQLSISTSTVIRKLNDFHFKHDFSCLPEIMSWDEYAFTKGKMSFIAQDFNNLNIITVLKGRTQAVIRNHFLKYDRAVRCRVKIITMDMFSPYYDLARQLFPCAKIVLDRFHIVQHLSRAMSRVRVQIMNQFHRKSHEYKAIKRYWKLIQQDSRKLSDKRFYRPTFRMHLTNKEILNKLLSYSQNLKHHYQLYQLLLFHFQNKEPEKFFGLIEDNLKQVHPIFQTVFKTFLKDKKKIVNTLQLPYSNAKLEATNNLIKLIKRNAFGFRNFENFKKRIFIALNIKKERTKFVLSRA

SEQ ID NO: 2011 - DNA, 1255 bp, Streptococcus pneumoniae
atggaacaattacattttatcacaaaattactagacattaaagaccctaatatccagattttagacatcatcaataaggatacacacaaggaaatcatcgccaaactggactacgacgccccatcttgccctgagtgcggaaaccaattgaagaaatatgactttcaaaaaaccttctaaaattccttatcttgaaacgactggtatgcccactagaattctccttagaaagcgtcgattcaagtgctatcactgttcaaaaatgatggtcgctgaaacttctatcgtcaagaagaatcaccaaatccctcgtatcatcaaccaaaagattgctcaaaagttaattgaaaagatttctatgactgatattgcccatcagctttccatctcaacttcaactgttattcgtaagctcaatgactttcactttaaacatgatttttcttgtcttcctgagattatgtcttgggatgagtatgcttttacaaaaggaaagatgagcttcattgcgcaagattttaacaatctcaatatcatcactgttcttaagggaagaacacaagctgtcatccgaaatcactttcttaaatatgatagagccgtccgatgtcgcgtcaaaatcattactatggatatgtttagtccttactatgacttagctagacaacttttcccgtgtgctaaaatcgtgttggatcgctttcacattgtacaacatcttagccgtgctatgagtcgtgtgcgtgtccaaatcatgaatcagtttcatcgaaaatcccatgaatacaaggctatcaagcgctactggaaactcattcaacaggatagccgtaaactgagtgataagcgattttatcgtcctacttttcgtatgcacttaaccaataaagagattttaaacaagcttttgagctattcacaaaacttgaaacatcactatcagctctatcaactcttgctgtttcactttcagaataaggaaccggagaaatttttcggactcattgaggacaatctgaagcaggttcatcctatttttcagactgtctttaaaacctttctaaaggacaaaaagaaaatcgtcaacacccttcaactaccctattcaaacgccaaattggaagcgaccaataatctcatcaaacttatcaagcgcaatgcctttggttttcggaactttgaaaacttcaaaaaacggatttttatcgctctgaatatcaaaaaagaaaggacaaaatttgtcctttctcgagct

SEQ ID NO: 2012 - protein, 59 aa, Streptococcus pneumoniae
  IS1167, transposase FRAMESHIFT
MEQLHFITKLLDIKDPNIQILDIINKDTHKEIIAKLDYDAPSCPECGNQLKKYDFQKTF

SEQ ID NO: 2013 - DNA, 1437 bp, Streptococcus pneumoniae
ttgttacaatttgaaaagaaacttggagaatttccaagaaaagagctattaattaaaggaaacattatgattacacgtgaatttgataccatcgctgctatctctactccactaggtgaaggggctattggtattgtccgcctgagcggaacagacagttttgctattgcgcaaaagatttttaaaggaaaagacttgaacaaggttgccagccacactctcaactacggtcacattattgatcctctgactggtaaagtcatggacgaggttatggttggggctatgaagtctccaaagaccttcactcgtgaggatattatcgagattaacacccacggtgggattgcggtgaccaatgaaattctccagctagctattcgtgaaggggctcggttggcagaacctggtgaatttaccaaacgtgcttttttaaacggtcgcgtagacttgacacaggcagaggctgtgatggatatcatccgtgccaagactgacaaggccatgaacattgcggtcaaacaattagacggctccctttctgacctcattaacaatacccgtcaagaaatcctcaatacacttgcccaagttgaggtcaatatcgactatcctgagtatgacgatgttgaggaagccactactgctgttgtccgagagaagacaatggagtttgagcaattactaaccaaactccttaggacagcacgtcgtggtaaaatccttcgtgaaggaatttcaacggctatcattggacgtcccaacgttgggaaatcaagccttctcaacaacctcttgcgtgaggacaaggctatcgtaacagatatcgctgggacaacacgagatgtcatcgaagagtacgtcaacatcaatggtgtacctctcaaattgattgatacagccggtattcgtgaaacggatgatatcgttgaacaaattggagttgagcgttcgaaaaaagctcttaaggaagctgacctagttctgctagtactaaacgctagtgaaccactaaccgcccaagatcgccaactcctagaaatcagtcaggagactaatcgcattattcttcttaacaaaactgacctgcctgaaacgattgaaacttcggaactacctgaagatgtcatccgcatttcagttcttaaaaatcaaaacatcgataaaatcgaagagagaatcaacaacctcttctttgaaaatgctggtttggttgagcaagatgctacctacttgtcaaacgcccgtcacatttccttgattgagaaggccgttgaaagcctacaagctgttaaccaaggtcttgaactagggatgccagttgacttgcttcaagttgacttgacccgtacttgggaaattctaggagaaatcactggagatgctgctccagatgaactcatcacccaactctttagccaattctgtttaggaaaa

SEQ ID NO: 2014 - protein, 479 aa, Streptococcus pneumoniae
  thiophene and furan oxidation protein ThdF (thdF); Cellular location: cytoplasm; Similar to strain R6 sequence 15902964 (0.E+01)
MLQFEKKLGEFPRKELLIKGNIMITREFDTIAAISTPLGEGAIGIVRLSGTDSFAIAQKIFKGKDLNKVASHTLNYGHIIDPLTGKVMDEVMVGAMKSPKTFTREDIIEINTHGGIAVTNEILQLAIREGARLAEPGEFTKRAFLNGRVDLTQAEAVMDIIRAKTDKAMNIAVKQLDGSLSDLINNTRQEILNTLAQVEVNIDYPEYDDVEEATTAVVREKTMEFEQLLTKLLRTARRGKILREGISTAIIGRPNVGKSSLLNNLLREDKAIVTDIAGTTRDVIEEYVNINGVPLKLIDTAGIRETDDIVEQIGVERSKKALKEADLVLLVLNASEPLTAQDRQLLEISQETNRIILLNKTDLPETIETSELPEDVIRISVLKNQNIDKIEERINNLFFENAGLVEQDATYLSNARHISLIEKAVESLQAVNQGLELGMPVDLLQVDLTRTWEILGEITGDAAPDELITQLFSQFCLGK

SEQ ID NO: 2015 - DNA, 195 bp, Streptococcus pneumoniae
gtggaggaagctattatgccatttgtacgcatcgatttatttgaaggacgcacgctcgagcaaaagaaagctcttgctaaggaagtaacggaagcagttgtccgcaacactggagcccctcaatctgctgtccatgtcatcatcaacgacatgccagaaggaacttacttcccacaaggggaaatgcgtactaaa

SEQ ID NO: 2016 - protein, 65 aa, Streptococcus pneumoniae
  4-oxalocrotonate tautomerase (xylH); Cellular location: cytoplasm; Similar to strain R6 sequence 15902965 (2.E-30)
MEEAIMPFVRIDLFEGRTLEQKKALAKEVTEAVVRNTGAPQSAVHVIINDMPEGTYFPQGEMRTK

SEQ ID NO: 2017 - DNA, 597 bp, Streptococcus pneumoniae
atggcacagttgtactatcgttatgggaccatgaactctggtaaaacgattgagattctcaaagtggcctataactacgaggagcaaggaaaaggtgttgtgattatgacctcggctctggatacgcgtgacggcgttggctatgtgtcgagtcgaattggcatgaaacgccctgcccttgcgattgaggaaacaacggatatctttggctatatccgagacctaccagaaaaaccttactgtgttttggtcgatgaagcccagtttctcaaacgccaccatgtttacgacctagctcgtgttgtggacgagttagacatacccgtcatggcttttggcttgaaaaatgactttcgcaatgaattgttcgaaggttccaaatatctcttgcttttagcagacaagattgacgaaatcaagaccatctgtcagtattgcaagaaaaaggcgaccatggtgttgcgaacacaggatggactgcccgtttacgatggagaacagatccagattggtggtaacgaaacctatatctcagtttgccgtaaacattattttgcgccaatgataacctctaacaaggagcaaaactatgacaat

SEQ ID NO: 2018 - protein, 199 aa, Streptococcus pneumoniae
  thymidine kinase (tdk); Cellular location: cytoplasm; Similar to strain R6 sequence 15902966 (e-115)
MAQLYYRYGTMNSGKTIEILKVAYNYEEQGKGVVIMTSALDTRDGVGYVSSRIGMKRPALAIEETTDIFGYIRDLPEKPYCVLVDEAQFLKRHHVYDLARVVDELDIPVMAFGLKNDFRNELFEGSKYLLLLADKIDEIKTICQYCKKKATMVLRTQDGLPVYDGEQIQIGGNETYISVCRKHYFAPMITSNKEQNYDN

SEQ ID NO: 2019 - DNA, 477 bp, Streptococcus pneumoniae
atgacaattgaactaagagatgttacaatggaaaattattttgatgttttaaatttggatgtcaaggaatatcaaaaacaattcattgcaaccaacgcaattagtttagctgaagcatacgtctacactaaaaatggagattttgtagctccattggcagtttatgataatgatgcaattataggttttgtgatgatagcttatgataaaaagatcggaattagtagtggaaattatttactatttcgttttatgattgataagaattttcaaaatcaaggatattttaaaccaattatggataaagtactagactatgttcgaacagcgccagcaggtttaagcaataaactttggttgtcttatgaaccagaaaatgaacaggcaagattttgttacctcagttatggatttaaagaaactggggaaatatccgagaatgaagtagtagcaatctatgatttaacaattgagaaa

SEQ ID NO: 2020 - protein, 159 aa, Streptococcus pneumoniae
  acetyltransferase, GNAT family; Cellular location: cytoplasm; Similar to strain R6 sequence 15902967 (3.E-89)
MTIELRDVTMENYFDVLNLDVKEYQKQFIATNAISLAEAYVYTKNGDFVAPLAVYDNDAIIGFVMIAYDKKIGISSGNYLLFRFMIDKNFQNQGYFKPIMDKVLDYVRTAPAGLSNKLWLSYEPENEQARFCYLSYGFKETGEISENEVVAIYDLTIEK

SEQ ID NO: 2021 - DNA, 1077 bp, Streptococcus pneumoniae
atgaacatctatgatcaactacaagttgtagaagaccgttatgaagaattaggagaattgctgagtgaccctgatgtcgtttcagacaccaagcgttttatggagctttcaaaagaagaagcttccaatcgtgacaccgtaatagcctaccgtgagtataaacaagtccttcaaaatatcgtcgatgccgaagagatgattaaggaatcaggcggagatgcggacttggaagaattggccaagcaagaactcaaagatgccaaggctgaaaaagaagaatatgaagaaaaactgaaaattttgctccttccaaaggatccaaacgatgacaagaatatcatccttgaaatccgtggagcagctggtggagacgaagcggcacttttcgctggagatttgctaactatgtaccaaaagtatgcggaagcccaaggttggcgctttgaagtcatggaagcctctatgaatggtgtcggtggttttaaagaagtggttgctatggtttcaggtcagtctgtatactctaagcttaagtatgaatcaggtgcccaccgtgtgcaacgtgttcctgtgacagaaagccaaggccgtgttcatacttcgacagcgacagttcttgttatgccagaagttgaagaggttgaatacgacattgatccaaaagaccttcgtgtcgacatctatcacgcctctggtgctggtggacagaacgtcaataaggttgcgactgccgttcgtatcgttcacttgccaaccaatatcaaggttgagatgcaggaagaacgtacccagcagaagaaccgtgagaaggccatgaaaatcatccgtgcccgtgttgctgaccactttgctcagattgctcaagatgagcaggacgctgagcgtaagtcgacaatcggtactggtgaccgttcagaacggatccgaacttataacttcccacaaaaccgtgtcacagaccaccgtatcggcttgaccctccaaaaactagatacgattttgtctggtaaattggacgaagttgtggatgccttggtgctttatgaccaaacacaaaaactagaagaattaaacaaa

SEQ ID NO: 2022 - protein, 359 aa, Streptococcus pneumoniae
  peptide chain release factor 1 (prfA); Cellular location: cytoplasm; Similar to strain R6 sequence 15902968 (0.E+01)
MNIYDQLQVVEDRYEELGELLSDPDVVSDTKRFMELSKEEASNRDTVIAYREYKQVLQNIVDAEEMIKESGGDADLEELAKQELKDAKAEKEEYEEKLKILLLPKDPNDDKNIILEIRGAAGGDEAALFAGDLLTMYQKYAEAQGWRFEVMEASMNGVGGFKEVVAMVSGQSVYSKLKYESGAHRVQRVPVTESQGRVHTSTATVLVMPEVEEVEYDIDPKDLRVDIYHASGAGGQNVNKVATAVRIVHLPTNIKVEMQEERTQQKNREKAMKIIRARVADHFAQIAQDEQDAERKSTIGTGDRSERIRTYNFPQNRVTDHRIGLTLQKLDTILSGKLDEVVDALVLYDQTQKLEELNK

SEQ ID NO: 2023 - DNA, 837 bp, Streptococcus pneumoniae
atgaaattagctcaattattttcaaattttgaagaagagttgataagacaaggagaggaagcggaaagcctctcttttgtctatcgtagtctgaaaaatctatcttttacagactttatttttgccctccagcaggaggtgacaacagaggaagaaaaacaatttgtagaagatatttaccagcaactagcagctcacaagccagctcagtacatcattggacaggcagatttttatggaatgcatttaaaggtggatgaacgggttttgattcctcgtccagaaacagaggagttggtggagcttatcctggctgaaaatcctgtgaaaaatcttatggtcctagatatcggaacaggtagtggagctattgctctcgctctagcaaaaaacagaccagattggtcagtgacggcagcagatatttcccaagatgctttagatgtagctagcgaaaatgctaaaaatcaaaatcttcaaatatttttaaaaaaatctgactgttttacagaaatttctgaaaaatatgatataattgtttccaatccaccctatatctctcgtgaagatgagtcagaggtaggcttgaatgtcttgtattcggagcctcatctagctctctttgcagatgaggatggcctagctatttaccgtagaattgcggaagatgcaaaagactatctcaaagatggtggtaagatttaccttgaaattggatacaagcaaggtcaaagtgttcctgaactttttaggaaacatcttcctgaaaagcgagtacgaacactcaaggaccaatttggtcaagataggatggttgtcgttgatgatggacaggat

SEQ ID NO: 2024 - protein, 279 aa, Streptococcus pneumoniae
  HemK protein (hemK); Cellular location: membrane; Similar to strain R6 sequence 15902969 (e-150)
MKLAQLFSNFEEELIRQGEEAESLSFVYRSLKNLSFTDFIFALQQEVTTEEEKQFVEDIYQQLAAHKPAQYIIGQADFYGMHLKVDERVLIPRPETEELVELILAENPVKNLMVLDIGTGSGAIALALAKNRPDWSVTAADISQDALDVASENAKNQNLQIFLKKSDCFTEISEKYDIIVSNPPYISREDESEVGLNVLYSEPHLALFADEDGLAIYRRIAEDAKDYLKDGGKIYLEIGYKQGQSVPELFRKHLPEKRVRTLKDQFGQDRMVVVDDGQD

SEQ ID NO: 2025 - DNA, 627 bp, Streptococcus pneumoniae
ttggtcaagataggatggttgtcgttgatgatggacaggattagacaagagttggaaaatggtggagctgtcgttttgcctacagagacagtttacggtctctttgctaaggcgctagacgaaaaagcagttgaccatgtttaccagcttaaacgtcgacgtagagacaaggcgctcaatctcaatgttgcctctttagaggacatcttgtacttttcaaagaatcagccaacttatcttcaaaaacttgtagagatctttttaccaggtcccttgaccattattctcgaagctaatgaccgagttccctattgggtcaattctggccttgcaactgttggatttcggatgcctagtcatcccattacccttgatttgattcgagagacaggtcccttgattgggccgtctgccaatatctcaggtcaggcgagtggagtgacctttaatcaaattctagaggattttgaccaagaggttctgggtctggaagacgatgcttttctaactggacaggattcaactattttgaatttgtcgggagacaaggtgaaaatcttacgtcaaggggccattaagcgagaagatattcttgctcggttgccaaagatttcttttgaggaggaa

SEQ ID NO: 2026 - protein, 209 aa, Streptococcus pneumoniae
  Sua5/YciO/YrdC family protein; Cellular location: cytoplasm; Similar to strain R6 sequence 15902970 (e-102)
MVKIGWLSLMMDRIRQELENGGAVVLPTETVYGLFAKALDEKAVDHVYQLKRRRRDKALNLNVASLEDILYFSKNQPTYLQKLVEIFLPGPLTIILEANDRVPYWVNSGLATVGFRMPSHPITLDLIRETGPLIGPSANISGQASGVTFNQILEDFDQEVLGLEDDAFLTGQDSTILNLSGDKVKILRQGAIKREDILARLPKISFEEE

SEQ ID NO: 2027 - DNA, 468 bp, Streptococcus pneumoniae
ttgctcggttgccaaagatttcttttgaggaggaatgagatgctaagagatttaagagaaactgatgtgaaagctatatgtgacatcaaccaagaggctttgggttatacttttagtccagaggaaacggctagccaactagctagactgtctcaggattcccatcatttcctacttggctatgaggatgcagctaatcatgtcttacttggatatgtccacgctgaagtttacgaatcactctattccaaagcaggatttaatatcttagctttagcagtttcacctcaagcgcaaggtcaaggtattggtaaaagtttactacaagggttggaagaagaagcaaaaagatgtggttatgggtttatccgcttaaattctgccaatcatcgtctgggtgctcatgcattttatgaaaaagttggctatacttgtgataaaatgcagaaacggtttattcgcatctgt

SEQ ID NO: 2028 - protein, 156 aa, Streptococcus pneumoniae
  acetyltransferase, GNAT family; Cellular location: cytoplasm; Similar to strain R6 sequence 15902971 (9.E-79)
MLGCQRFLLRRNEMLRDLRETDVKAICDINQEALGYTFSPEETASQLARLSQDSHHFLLGYEDAANHVLLGYVHAEVYESLYSKAGFNILALAVSPQAQGQGIGKSLLQGLEEEAKRCGYGFIRLNSANHRLGAHAFYEKVGYTCDKMQKRFIRIC

SEQ ID NO: 2029 - DNA, 1254 bp, Streptococcus pneumoniae
atgatttttgacaaagatgattttaaagcatatgatgctgatctctggaatgctattgccaaagaagaagaacgccaacaaaataatatcgagttaattgcttcggaaaacgtagtttccaaggctgttatggcagctcaagggtctatcttgacaaataaatatgccgagggttacccaggacgccgttattatggtggaactgatgtagtagacgttgtagagactcttgctattgaacgcgcaaaagaaattttcggtgctaaatttgccaatgttcaaccacattcaggaagccaagctaactgtgcggcttacatgtccttgattgagccaggtgatacggttatgggaatggatttggcatcaggtggtcatttgactcatggggctcctgttagcttctctggtcaaacctacaactttgtttcttatagtgttgatcctaaaacggaactcttagactttgatgctatcttgaaacaagcccaagaagtaaaaccaaaactgattgtagctggtgcttcagcctattctcaaattatcgatttttcaaaattccgtgaaatcgcagatgctgtcggtgcgaagctcatggtggacatggcccatatcgctggcttggttgcggctggccttcatccaagcccagttccatacgctcatatcacaacaacaacgacccacaaaacccttcgtggacctcgtggtggtttgattttgaccaatgacgaagaacttgctaaaaaaatcaattcagctattttcccaggtattcagggcggtcctttagagcatgttgtggcggctaaggcagtttccttcaaagaagttttggatccagccttcaaggaatatgctgccaatgtaattaagaacagcaaggctatggcagatgtcttcttgcaagaccctgatttccgtattatttcaggtggaactgaaaaccatctcttccttgttgatgtgactaaagttgtagaaaacggcaaagttgctcaaaacttgttggatgaagtcaatattaccttaaataaaaactcaatcccttacgaaagcttgtcaccattcaagacaagtgggattcgtatcggagcagcagccattactgcacgtggatttggtgaagaagaaagtcgcaaagtggctgaactcatcattaaaacccttaagaattcagaaaatgaggctgtattagaagaagtgagaagtgcagtcaaagaattgacagatgccttcccattatacgaggac

SEQ ID NO: 2030 - protein, 418 aa, Streptococcus pneumoniae
  serine hydroxymethyltransferase (glyA); Cellular location: cytoplasm; Similar to strain R6 sequence 15902972 (0.E+01)
MIFDKDDFKAYDADLWNAIAKEEERQQNNIELIASENVVSKAVMAAQGSILTNKYAEGYPGRRYYGGTDVVDVVETLAIERAKEIFGAKFANVQPHSGSQANCAAYMSLIEPGDTVMGMDLASGGHLTHGAPVSFSGQTYNFVSYSVDPKTELLDFDAILKQAQEVKPKLIVAGASAYSQIIDFSKFREIADAVGAKLMVDMAHIAGLVAAGLHPSPVPYAHITTTTTHKTLRGPRGGLILTNDEELAKKINSAIFPGIQGGPLEHVVAAKAVSFKEVLDPAFKEYAANVIKNSKAMADVFLQDPDFRIISGGTENHLFLVDVTKVVENGKVAQNLLDEVNITLNKNSIPYESLSPFKTSGIRIGAAAITARGFGEEESRKVAELIIKTLKNSENEAVLEEVRSAVKELTDAFPLYED

SEQ ID NO: 2031 - DNA, 1005 bp, Streptococcus pneumoniae
atgccttcccattatacgaggactaaaacttttatggacatttatattaagaaagccattattcaccagttcagtccggatgataccgaactgttcttagcagataagtttctcaatattactccaaaaatcgaagaatacctgcgtaaaaaaattgaacatgtgtattcagatgaagccaagactgggattttcgaagaagaaaatcccttcttcaatcatattacagacgatttgttggagacatcagtaacgctggctaatctctggaaagaggagtttagcatttctgaaaatctcaagaccaatgacttgatttttgtgcaattttctaaagaaggtgtagaacatttcgctttcttgcgaattgccctgcgggagaccttgacccacctcggaggagaagttgataatccaatcaagctaactcagaataacctgcctggatttggaacaggagctgatgaggccttggtggtcaatcttcagagtagcaagtatcacctgattgaaaaacgaatcaagtacaacgggacttttttgaactatttttcagataatcttcttgctgtcgctcctaagatttctcctaaaaaatctatcaaggaactggaaaaaacagcccagagaattgctaaatcttttaacacagatgattttcaatttcaatccaaggtcaaatcagctattttcaacaacctagaagaaagcaatgaattgtcacctgagaaattggctaatgacctttttgacaacaatctgacggctcgtttgagctttattgaccaagtcaaagaagccgtaccagaacctgttcaatttgatgaaattgatgccagtcgccaattaaagaaatttgaaaaccaaaaactctccttatcaaatggaattgagctcatcgttcccaataacgtctatcaagacgccgagtctgttgagtttatccaaaacgaaaatggaacctactctatcttaatcaaaaatatcgaggatatccaaagtaaa

SEQ ID NO: 2032 - protein, 335 aa, Streptococcus pneumoniae
  hypothetical protein; Cellular location: cytoplasm; Similar to strain R6 sequence 15902973 (0.E+01)
MPSHYTRTKTFMDIYIKKAIIHQFSPDDTELFLADKFLNITPKIEEYLRKKIEHVYSDEAKTGIFEEENPFFNHITDDLLETSVTLANLWKEEFSISENLKTNDLIFVQFSKEGVEHFAFLRIALRETLTHLGGEVDNPIKLTQNNLPGFGTGADEALVVNLQSSKYHLIEKRIKYNGTFLNYFSDNLLAVAPKISPKKSIKELEKTAQRIAKSFNTDDFQFQSKVKSAIFNNLEESNELSPEKLANDLFDNNLTARLSFIDQVKEAVPEPVQFDEIDASRQLKKFENQKLSLSNGIELIVPNNVYQDAESVEFIQNENGTYSILIKNIEDIQSK

SEQ ID NO: 2033 - DNA, 612 bp, Streptococcus pneumoniae
atgtttaaacgaattcgaagagtgcttgtactagcagtcttcctttttgctggctataaagcttaccgcgttcatcaagatgtcaaacaagtcatgacctatcaacccatggtgcgagaaatattgagtgaacaagacaccccagcaaacgaagagcttgtgcttgctatgatttatactgaaacaaaaggaaaagaaggcgatgttatgcagtctagtgagtctgcaagtggttccaccaacaccatcaatgataatgcctctagcattcggcaaggcattcaaactctgacaggcaatctctatctggcgcagaagaagggggtagatatctggacagctgttcaagcctataattttggacctgcctatatcgattttatcgcccaaaatggcaaggaaaataccctggctctagccaaacagtactctcgtgagactgttgcccccttgcttggtaataggactggaaagacttatagttatattcaccccatttccatttttcacggtgctgaactctatgtaaatggaggaaactattattattctagacaggtacgacttaacctttacatcatcaaatgtttcactctcttttcaacatctggc

SEQ ID NO: 2034 - protein, 204 aa, Streptococcus pneumoniae
  conserved hypothetical protein; Cellular location: outside; Similar to strain R6 sequence 15902974 (e-114)
MFKRIRRVLVLAVFLFAGYKAYRVHQDVKQVMTYQPMVREILSEQDTPANEELVLAMIYTETKGKEGDVMQSSESASGSTNTINDNASSIRQGIQTLTGNLYLAQKKGVDIWTAVQAYNFGPAYIDFIAQNGKENTLALAKQYSRETVAPLLGNRTGKTYSYIHPISIFHGAELYVNGGNYYYSRQVRLNLYIIKCFTLFSTSG

SEQ ID NO: 2035 - DNA, 972 bp, Streptococcus pneumoniae
atgagaaagaaactctttctgactagcgctgcgatcttgtgggcagtaacagctatgaatagcgtccatgcagcaacagatgttcaaaaagttatcgatgaaacctatgtccaacctgaatatgtcctaggttcctccctatctgaagaccaaaaaaatcaaactcttaaaaaactgggctacaatgcctcaacagataccaaagaactcaagaccatgacacctgatgtttattctaaaatcatgaatgtggccaatgactctagcttacagttgtattcatcagccaagattcaaaagctaggtgacaaatcgccacttgaggtcaagattgaaacaccagaaaatatcactaaggtgactcaggatatgtaccgaaacgcagcagtaacgctgggtatggaacatgccaaaatcactgtagcagcccctattccagttacaggagaaagtgctttagcagggatttactattcgctagaggctaatggagccaaggtgccacaagctaataaagatttggctcaagaagagctaaaagctttgtcagatatcaatgctgaaaacaaggacaaatcaggctatgatgctaataaattaaacgttgccctagctgatatcaagtcaggactcgccaaagctaaagaaagtaagggaaatctgacagaagaagatatccgcaagattgttgaagataccttaaaaaattacaaacttgatcaggtcataacaggaaaccagatcaatatcatcatcaattttgccttgaatctctcaaagagtgatatcctcagcaatgcagatttcactaaaaccctaaatgaccttaaacaaagcatcgtatcacaagctggcgacagttttaaaaatatcaaccttaactttgatgcggataaggcgctagaggacggtggtaacttcttaagctccctctggcaagcccttgtcaacttcttcaagagttttggttct

SEQ ID NO: 2036 - protein, 324 aa, Streptococcus pneumoniae
  conserved hypothetical protein; Cellular location: outside; Similar to strain R6 sequence 15902975 (e-180)
MRKKLFLTSAAILWAVTAMNSVHAATDVQKVIDETYVQPEYVLGSSLSEDQKNQTLKKLGYNASTDTKELKTMTPDVYSKIMNVANDSSLQLYSSAKIQKLGDKSPLEVKIETPENITKVTQDMYRNAAVTLGMEHAKITVAAPIPVTGESALAGIYYSLEANGAKVPQANKDLAQEELKALSDINAENKDKSGYDANKLNVALADIKSGLAKAKESKGNLTEEDIRKIVEDTLKNYKLDQVITGNQINIIINFALNLSKSDILSNADFTKTLNDLKQSIVSQAGDSFKNINLNFDADKALEDGGNFLSSLWQALVNFFKSFGS

SEQ ID NO: 2037 - DNA, 90 bp, Streptococcus pneumoniae
ttgtcaacttcttcaagagttttggttcttaagaaatttcatggtataatggatggtaaccgtaacgttgccgtcttttttgtcggccaa

SEQ ID NO: 2038 - protein, 30 aa, Streptococcus pneumoniae
  hypothetical protein; Cellular location: cytoplasm
MSTSSRVLVLKKFHGIMDGNRNVAVFFVGQ

SEQ ID NO: 2039 - DNA, 1629 bp, Streptococcus pneumoniae
atgttaaagaaaaatgatattgtagaagttgaaattgttgatttgacccatgaaggggcaggagttgccaaggtagatggtttggtcttttttgtagagaatgctttaccgagtgaaaaaattctcatgcgtgtcctcaaggtcaataaaaagattggctttggaaaagttgaaaaataccttgtccagtcaccacaccgtaatcaagatctagatttggcttacctgcgttcaggaatcgcggatttaggacacctttcttatccagaacagctcaagtttaaaaccaagcaagtcaaggacagtctctacaagattgctggaattgcagatgtagaagttgctgaaacgcttggtatggaacatccagtcaagtatcgcaataaggcgcaggtgcccgttcgtcgagtgaatggtgtcttggaaacaggatttttccgtaagaattcgcataacctcatgccccttgaagatttctttatccaggatcctgtcattgaccaagtcgtagtagctcttcgagacctgctccgtcgttttgatttaaaaccttatgacgaaaaggaacagtctggattgattcggaatcttgtggtgcgtcgtggtcactattcaggacaaatcatggtcgttttggtgacaactcgtccaaaagtttttcgtgttgaccaattgattgaacaagttatcaagcagttcccagagattgtgtctgtcatgcaaaatatcaacgaccagaataccaatgcgatttttggtaaggagtggcgcactctttatggtcaagactatattacggaccagatgttgggaaatgacttccaaatcgctggcccagccttttaccaagtcaatactgaaatggcggagaaactctatcaaacagccattgactttgcagagttaaaaaaagatgatgtgattattgatgcctattctggtattggaaccattggtttatcagtcgccaagcatgtcaaagaagtctacggtgttgaactgattccagaagcagtagagaatagccagaagaatgcttctttgaacaagattactaatgcccactatgtctgtgacacggctgaaaatgccatgaagaaatggctcaaggaaggtattcaaccaaccgttatcttggttgatcctccacgcaagggcttgacagaaagctttatcaaagcaagcgcccaaacaggagccgatcgcatcgcctatatctcctgcaatgtcgcaaccatggcgcgtgatattaaactataccaagagttgggatatgaattgaagaaagtccagccggtggatctatttcctcaaacgcatcacgtcgagacggtagcacttttgtccaaactcgatgtcgataagcacataagtgttgaaattgagctggatgagatggatttgacaagtgcggagagcaaagcaacatatgctcaaatcaaagaatatgtttggaataaatttgaattaaaagtttcgacattatatattgcacagataaaaaagaaatgtggaatagaattacgagaacattacaacaagtctaaaaaggataaacaaattattccacagtgtacacctgaaaaagaagaagccatcatggatgctttgagacacttcaaaatgatt

SEQ ID NO: 2040 - protein, 543 aa, Streptococcus pneumoniae
  RNA methyltransferase, TrmA family; Cellular location: cytoplasm; Similar to strain R6 sequence 15902976 (0.E+01)
MLKKNDIVEVEIVDLTHEGAGVAKVDGLVFFVENALPSEKILMRVLKVNKKIGFGKVEKYLVQSPHRNQDLDLAYLRSGIADLGHLSYPEQLKFKTKQVKDSLYKIAGIADVEVAETLGMEHPVKYRNKAQVPVRRVNGVLETGFFRKNSHNLMPLEDFFIQDPVIDQVVVALRDLLRRFDLKPYDEKEQSGLIRNLVVRRGHYSGQIMVVLVTTRPKVFRVDQLIEQVIKQFPEIVSVMQNINDQNTNAIFGKEWRTLYGQDYITDQMLGNDFQIAGPAFYQVNTEMAEKLYQTAIDFAELKKDDVIIDAYSGIGTIGLSVAKHVKEVYGVELIPEAVENSQKNASLNKITNAHYVCDTAENAMKKWLKEGIQPTVILVDPPRKGLTESFIKASAQTGADRIAYISCNVATMARDIKLYQELGYELKKVQPVDLFPQTHHVETVALLSKLDVDKHISVEIELDEMDLTSAESKATYAQIKEYVWNKFELKVSTLYIAQIKKKCGIELREHYNKSKKDKQIIPQCTPEKEEAIMDALRHFKMI

SEQ ID NO: 2041 - DNA, 216 bp, Streptococcus pneumoniae
atggcacttaactataaaccattatggatacagttagcaaaaaaaggactaaagaaaacagatgtaatagctatggcaggacttacaacaaatgttatggcacaaatgggaaaggataaaccaattacatttaagaatttagaaagaatatgtaaggctttatcttgcactcctaatgatattattagttttgaagataattttagtgacgaggaa

SEQ ID NO: 2042 - protein, 72 aa, Streptococcus pneumoniae
  conserved hypothetical protein; Cellular location: cytoplasm; Similar to strain R6 sequence 15902977 (1.E-37)
MALNYKPLWIQLAKKGLKKTDVIAMAGLTTNVMAQMGKDKPITFKNLERICKALSCTPNDIISFEDNFSDEE

SEQ ID NO: 2043 - DNA, 99 bp, Streptococcus pneumoniae
atgaatgatgtagcaataatccttgaaacaaaatcagaagaaagagatattagcaaacaaatttttattgatgagttaatgaaaaatatagacataatt

SEQ ID NO: 2044 - protein, 33 aa, Streptococcus pneumoniae
  hypothetical protein; Cellular location: cytoplasm
MNDVAIILETKSEERDISKQIFIDELMKNIDII

SEQ ID NO: 2045 - DNA, 1023 bp, Streptococcus pneumoniae
atgaaaaacaaattttttctaatagctattttagctatgtgtatagtttttagcgcttgttcttctaattctgttaaaaatgaagaaaatacttctaaagagcatgcgcctgataaaatagttttagatcatgctttcggtcaaactatattagataaaaaacctgaaagagttgcaactattgcttggggaaatcatgatgtagcattagctttaggaatagttcctgttggattttcaaaagcaaattacggtgtaagtgctgataaaggagttttaccatggacagaagaaaaaatcaaagaactaaatggtaaagctaacctatttgacgatttggatggacttaactttgaagcaatatcaaattctaaaccagatgttatcttagcaggttattctggtataactaaagaagattatgacactctatcaaaaattgctcctgtagcagcatacaaatctaaaccttggcaaactttatggagagatatgattaaaattgattcaaaagccttaggtatggaaaaagaaggtgatgagttaatcaaaaatactgaagctcgtatatccaaagaattagaaaaacatccagaaatcaaaggaaaaatcaaaggaaaaaaagtattatttactatgattaatgctgcagatacatcaaaattctggatttatactagcaaagatccaagagcaaattatttaacagatttaggtctagttttccctgaatcattaaaagaatttgagagtgaagatagttttgcaaaggaaatttctgcagaagaagcaaataagataaatgatgctgatgtaatcataacttatggtgatgataaaactcttgaagctttacaaaaagatcctcttttaggtaaaataaatgcaattaaaaatggtgccgttgctgtaattccagataatacaccgttagcagcctcatgcactccaacaccactttcaataaactatactattgaagaatacctaaatcttttaggaaatgcatgcaaaaatgcgaaa

SEQ ID NO: 2046 - protein, 341 aa, Streptococcus pneumoniae
  iron-compound ABC transporter, iron compound-binding protein; Cellular location: lipoprotein; Similar to strain R6 sequence 15902978 (0.E+01)
MKNKFFLIAILAMCIVFSACSSNSVKNEENTSKEHAPDKIVLDHAFGQTILDKKPERVATIAWGNHDVALALGIVPVGFSKANYGVSADKGVLPWTEEKIKELNGKANLFDDLDGLNFEAISNSKPDVILAGYSGITKEDYDTLSKIAPVAAYKSKPWQTLWRDMIKIDSKALGMEKEGDELIKNTEARISKELEKHPEIKGKIKGKKVLFTMINAADTSKFWIYTSKDPRANYLTDLGLVFPESLKEFESEDSFAKEISAEEANKINDADVIITYGDDKTLEALQKDPLLGKINAIKNGAVAVIPDNTPLAASCTPTPLSINYTIEEYLNLLGNACKNAK

SEQ ID NO: 2047 - DNA, 1017 bp, Streptococcus pneumoniae
atgcatgcaaaaatgcgaaataaaaaacaaataaacctaggcataatttttataatctgcctaggtcttcttattacaatatttttgtcattaaagcttggaacaaaagaaattaatatcagagattttttagcagcttttggaatgggtaatacaaatgatgattttattaaatcaattatatataaaagaatacctagaactatttttgcaattttagcaggttctagtcttgccataagcggtgtattgatgcaatcagttactagaaacccaatagctgatccaggtatactcggtataaacacaggagcaagtcttagtgtagtaattggtctttcttttttaggaatttcatcaagcataagccatataagttttgcaatcattggtggcttagtaagtgcaatttttgtatacgcgattgctgtaagcggaaaagcaggccttacccctataaaacttgccttatcaggaacttgtgttagtatggctttaagcagttttgtaagttttttaattttaccgaataataacgtcttagacaaatttagattttggcaaataggtagccttggagcagctacattatcttctatatctacactactaccttttataattttaggtcacttgatagctatatttatttcatcagatttaaacgctttagctatgggtgatgaaatggctgttggtcttggagttaatgttaataggataagatcacttgcaataattgcaagtgtgcttttatgttcaagtattactgcaattggtggacctattggcttcgtaggtcttatagttcctcacttttgtggcttatttataagcaaagatatacgcacaatgaccatttcttcatcttttataggtgcagagctcttgcttatatgtgatataatcggccgtatgttaggtaaaccaggtgaaattgaagtagggataattactgcaataatcgggggtccagtacttatttatgtaactatgaaaaatagaggggttaataac

SEQ ID NO: 2048 - protein, 339 aa, Streptococcus pneumoniae
  iron-compound ABC transporter, permease protein; Cellular location: membrane; Similar to strain R6 sequence 15902979 (0.E+01)
MHAKMRNKKQINLGIIFIICLGLLITIFLSLKLGTKEINIRDFLAAFGMGNTNDDFIKSIIYKRIPRTIFAILAGSSLAISGVLMQSVTRNPIADPGILGINTGASLSVVIGLSFLGISSSISHISFAIIGGLVSAIFVYAIAVSGKAGLTPIKLALSGTCVSMALSSFVSFLILPNNNVLDKFRFWQIGSLGAATLSSISTLLPFIILGHLIAIFISSDLNALAMGDEMAVGLGVNVNRIRSLAIIASVLLCSSITAIGGPIGFVGLIVPHFCGLFISKDIRTMTISSSFIGAELLLICDIIGRMLGKPGEIEVGIITAIIGGPVLIYVTMKNRGVNN

SEQ ID NO: 2049 - DNA, 411 bp, Streptococcus pneumoniae
atgtctgataacaaaactagtaaaattccaaccaatccagctaatattgggcttcttttcttgccaatatttaaggctatgggaccagctaaaaaagatatacaagctattggtcctgtaattgaagtagaaaaagcagttaaagatacagcgcaaaaaattaaaacaagccttgaaagctcgggatttgctccaagtccgattgctatttcttcaccaagttcaataatttctagtcttttattaaaaaataaaactaatatagtagcaataatacttactattagaacaagaggtatgtcatctaactttgtaaaagataaagagccactgagccatctcataacttcttgtaattcatatcttgctactttcaacaataaaaatgaggtgcctgctcttgtgacagct

SEQ ID NO: 2050 - protein, 137 aa, Streptococcus pneumoniae
  hypothetical protein
MSDNKTSKIPTNPANIGLLFLPIFKAMGPAKKDIQAIGPVIEVEKAVKDTAQKIKTSLESSGFAPSPIAISSPSSIISSLLLKNKTNIVAIILTIRTRGMSSNFVKDKEPLSHLITSCNSYLATFNNKNEVPALVTA

SEQ ID NO: 2051 - DNA, 1005 bp, Streptococcus pneumoniae
atgcaaaatttaattataggtattcaaaaaagaaaaaatagaataacactattttcctcactatttttattaataataatcagtctatcatttttcattttacttatcggagatgaaagttattctttttcaactttgattaaagtcttaaatagtgaaactgttcctggagctagtttttcgattatggaaattagattaccaaaattattagcaggaattatagctggctggtcttttggattggcaggatttatctttcaaactatgttaagaaatcctcttgcaagtcctgatataatcggtgtcacaagttcttcatctattgcagcggtcttttgcatattggtattaaaaacaaatagtttaactactggaattatttcaataacttgtggactaacatcatctttaatattatttttactagctaaaaaagatggtttttcagcagcaagactgataatattaggtattggttttcaagctgtcacaagagcaggcacctcatttttattgttgaaagtagcaagatatgaattacaagaagttatgagatggctcagtggctctttatcttttacaaagttagatgacatacctcttgttctaatagtaagtattattgctactatattagttttattttttaataaaagactagaaattattgaacttggtgaagaaatagcaatcggacttggagcaaatcccgagctttcaaggcttgttttaattttttgcgctgtatctttaactgctttttctacttcaattacaggaccaatagcttgtatatcttttttagctggtcccatagccttaaatattggcaagaaaagaagcccaatattagctggattggttggaattttactagttttgttatcagacatattctctcaaaatattttaccagctagatatccagtaggtgttgtaactggcttgttaggttcaccatacttaatatacttactaataaaaatgaacaggaggaatata

SEQ ID NO: 2052 - protein, 335 aa, Streptococcus pneumoniae
  iron-compound ABC transporter, permease protein; Cellular location: membrane; Similar to strain R6 sequence 15902980 (0.E+01)
MQNLIIGIQKRKNRITLFSSLFLLIIISLSFFILLIGDESYSFSTLIKVLNSETVPGASFSIMEIRLPKLLAGIIAGWSFGLAGFIFQTMLRNPLASPDIIGVTSSSSIAAVFCILVLKTNSLTTGIISITCGLTSSLILFLLAKKDGFSAARLIILGIGFQAVTRAGTSFLLLKVARYELQEVMRWLSGSLSFTKLDDIPLVLIVSIIATILVLFFNKRLEIIELGEEIAIGLGANPELSRLVLIFCAVSLTAFSTSITGPIACISFLAGPIALNIGKKRSPILAGLVGILLVLLSDIFSQNILPARYPVGVVTGLLGSPYLIYLLIKMNRRNI

SEQ ID NO: 2053 - DNA, 792 bp, Streptococcus pneumoniae
atgaaaggtctgtggtcaaataatcttacctgcggttatgatgaaaaaataatcttggaaaatataaatataaaaatacctgaagaaaaaatatcagttattattgggtcaaatggttgtgggaaatcaacactcattaaaaccttgtctcgacttataaagccattagagggagaagtattgcttgataataaatcaattaattcttataaagaaaaagatttagcaaaacacatagctatattacctcaatctccaataatccctgaatcaataacagtagctgatcttgtaagccgtggtcgtttcccctacagaaagccttttaagagtcttggaaaagatgaccttgaaataataaacagatcaatggttaaggccaatgttgaagatctagcaaataacctagttgaagaactttctgggggtcaaaggcaaagagtatggatagctctagccctagcccaagatacaagtatcctacttttagatgagccaactacttacttggatatctcatatcaaatagaactattagacctcttgactgatctaaaccaaaaatataagacaaccatttgcatgattttgcacgatataaatctaacagcaagatacgctgattacctatttgcaattaaagaaggtaaacttgttgcagagggaaagcctgaagatatactaaatgataaactagttaaagatatctttaatcttgaagcaaaaattatacgtgaccctatttccaattcgcctctaatgattcctattggcaagcaccatgttaactct

SEQ ID NO: 2054 - protein, 264 aa, Streptococcus pneumoniae
  iron-compound ABC transporter, ATP-binding protein; Cellular location: cytoplasm; Similar to strain R6 sequence 15902982 (e-149)
MKGLWSNNLTCGYDEKIILENINIKIPEEKISVIIGSNGCGKSTLIKTLSRLIKPLEGEVLLDNKSINSYKEKDLAKHIAILPQSPIIPESITVADLVSRGRFPYRKPFKSLGKDDLEIINRSMVKANVEDLANNLVEELSGGQRQRVWIALALAQDTSILLLDEPTTYLDISYQIELLDLLTDLNQKYKTTICMILHDINLTARYADYLFAIKEGKLVAEGKPEDILNDKLVKDIFNLEAKIIRDPISNSPLMIPIGKHHVNS

SEQ ID NO: 2055 - DNA, 90 bp, Streptococcus pneumoniae
ttgtttattatcagtcctgatctttttaatattgctgttattctctatatcctatttttcattcatgatattcttttactaattttatct

SEQ ID NO: 2056 - protein, 30 aa, Streptococcus pneumoniae
  hypothetical protein; Cellular location: membrane
MFIISPDLFNIAVILYILFFIHDILLLILS

SEQ ID NO: 2057 - DNA, 207 bp, Streptococcus pneumoniae
atgaaaattcattgtttaaaattaaaaaataaagaattgaataaagaagtagcattctatttaacttcaattattaggcaagctttaaaaaatactgaatataaagatcaaatatctagcacagtattgccagatatcaaaattaaattaccgatagacagtagaggtactccagattggaattacatggaaagatatagagataga

SEQ ID NO: 2058 - protein, 69 aa, Streptococcus pneumoniae
  type II restriction endonuclease, putative; Cellular location: cytoplasm; Similar to strain R6 sequence 15902983 (1.E-36)
MKIHCLKLKNKELNKEVAFYLTSIIRQALKNTEYKDQISSTVLPDIKIKLPIDSRGTPDWNYMERYRDR

SEQ ID NO: 2059 - DNA, 153 bp, Streptococcus pneumoniae
atgataaataaactatccagatacatggaaagcagtggtaagacctatcaaaaccactatgtgacaatcttaaaatggtatgaagaagataaagacaaactaagacagaaaggtttaaataaaaaaatgaattatgatgtaggagaatcttta

SEQ ID NO: 2060 - protein, 51 aa, Streptococcus pneumoniae
  hypothetical protein; Cellular location: cytoplasm; Similar to strain R6 sequence 15902984 (2.E-26)
MINKLSRYMESSGKTYQNHYVTILKWYEEDKDKLRQKGLNKKMNYDVGESL

SEQ ID NO: 2061 - DNA, 159 bp, Streptococcus pneumoniae
ttggacaatgactggaatggattggctgatttaatagcaaatctgattgcaaaatatgctggtgctttagatttagataatctacccgatccaacgccagcaaaaaatcaagagatgaaaaatagttttgacatggcaaaaacacaaattgagacggac

SEQ ID NO: 2062 - protein, 53 aa, Streptococcus pneumoniae
  hypothetical protein; Cellular location: cytoplasm; Similar to strain R6 sequence 15902985 (2.E-27)
MDNDWNGLADLIANLIAKYAGALDLDNLPDPTPAKNQEMKNSFDMAKTQIETD

SEQ ID NO: 2063 - DNA, 1677 bp, Streptococcus pneumoniae
atgtcaaaagaaaaaataaaagtatacctctatacacgagtatctacgtcaatacagatagaggggtattcgttagaggcacaaaaatcacgaatgaaagcttttgctatttacaacgattatgaaattgttggagagtatgaagatgccgggaagtctgacaagtctattgaaggtagaatacagttcaatcgaatgatggaagatataaaatctggaaaagatggagtatcttttgttcttgtgtttaagttatcaagatttgcaagaaatgccgctgatgttctttctacacttcatataatgcaggattatggagttaatcttatctgcgttgaagatggcattgattcatctaaagatgctgggaaactaatgatttctgttttatcagctgtggctgaaatagaaagagaaaacatcagtattcaaacaatggaaggtcgcattcaaaaagcaggggaaggaaaatggaatggtggctttgctccgtatggatataaacttgaagacggcaagctgtttataaatgaggaagaggcagttgcaataagaacgattttcgaccagtatgtaaatactacgataggagccaatgggatatctaaatacttagagaatcatggaattagaaaaatcccaagacagaatggtaagaatcctttgtttgatgcaggtcttataagaaagatattaaagaatcctgtatataatgggaaaatagcatttggaagaagaactttagaaaaagttcatggtacaagaaatgaatataagcaggttgaacaagatgaatatctaatatctgaagggatacatgaagctatagtttccgatgaagtttggcaagctgctcaggttaagctaaaatctcaagcaaagaaatatgagcatgtgaataaaggaaaagatacacgcacacacttgctttctggaattgtaaaatgcccgatatgtggagtgggaatgtttgggaacaagtgtatcaagaaaaagaaagatggcacaaagtataaagatttttattactatggttgtaaccataggcagatgataagaggtaataagtgtacattcagtaagcaaattagagaagaattgttagatgatgctgttgcagaggtgattgtcaagatagtaagtaatccgaaatttgcttctatgatgcaagaaaaaatcaacatgaaggtggatacctctgaaatagaaaaagaaatagataattaccaaaaggaattgagaaagagtcattctacaaagtttaagctaattgaggaaatagataatttagatgttgaagataagcattataagagaaggaaacaggatttagatgatagactatatcgtatgtatgacaaactagatgaattagaatcatcactaattgatgcgaaagcaaagaaacagactattgaagctgaaaagcttacaggagataacatatataaggttctgatctattttgataagctctataaagtcatgaatgatgtagagcgtaggcagttaatttcagctttgatttctgaaattcaagtttatgaagaaaaacaatctaacggacaatggctaaaatccattacttttaagctaccaattatagaagaaaatctcaacataggtttggacaatgatgaacaagttgaatgtgtaagtttattagagaaacgtagt

SEQ ID NO: 2064 - protein, 559 aa, Streptococcus pneumoniae
  site-specific recombinase, resolvase family; Cellular location: cytoplasm; Similar to strain R6 sequence 15902986 (0.E+01)
MSKEKIKVYLYTRVSTSIQIEGYSLEAQKSRMKAFAIYNDYEIVGEYEDAGKSDKSIEGRIQFNRMMEDIKSGKDGVSFVLVFKLSRFARNAADVLSTLHIMQDYGVNLICVEDGIDSSKDAGKLMISVLSAVAEIERENISIQTMEGRIQKAGEGKWNGGFAPYGYKLEDGKLFINEEEAVAIRTIFDQYVNTTIGANGISKYLENHGIRKIPRQNGKNPLFDAGLIRKILKNPVYNGKIAFGRRTLEKVHGTRNEYKQVEQDEYLISEGIHEAIVSDEVWQAAQVKLKSQAKKYEHVNKGKDTRTHLLSGIVKCPICGVGMFGNKCIKKKKDGTKYKDFYYYGCNHRQMIRGNKCTFSKQIREELLDDAVAEVIVKIVSNPKFASMMQEKINMKVDTSEIEKEIDNYQKELRKSHSTKFKLIEEIDNLDVEDKHYKRRKQDLDDRLYRMYDKLDELESSLIDAKAKKQTIEAEKLTGDNIYKVLIYFDKLYKVMNDVERRQLISALISEIQVYEEKQSNGQWLKSITFKLPIIEENLNIGLDNDEQVECVSLLEKRS

SEQ ID NO: 2065 - DNA, 609 bp, Streptococcus pneumoniae
gtgcttatttacattagcctgataatgaaaatggagagattatcgatggttatattggaattgtaccaaaatgattattctaaagatttagtagcatttgattccatagaagatgggaaagcctttgtagctcaaatcccgggatacactctggaaacagaagatggttttgaagtggagtattttaatcctaaaaacataccggattatatggaaattatttttaacggaaatattgttcctttatctaaatttatgttcgatcctgaggaaaatgtaaacattatttggaaagagatttcaaatttatccctcaaaaatgatagagtgatcgaaggatattcaaaaattgatgcatatgtcgttaacaaccatgaagttaaagcctatgtcgaaacaagagaaacgaactatcgtaaagcaaaagacttcttagaaagccgcggatatgaaatcgacagaagctttttcggaagtgaagacggtgaagcgattctttacagaaaaaaagggatcgaagtttggcatttcttgtgtcacttagacccaatgtttgtagagattgaagatgtagaaggatatgttaaagaagaagttggagagattcaa

SEQ ID NO: 2066 - protein, 203 aa, Streptococcus pneumoniae
  hypothetical protein; Cellular location: cytoplasm; Similar to strain R6 sequence 15902987 (e-116)
MLIYISLIMKMERLSMVILELYQNDYSKDLVAFDSIEDGKAFVAQIPGYTLETEDGFEVEYFNPKNIPDYMEIIFNGNIVPLSKFMFDPEENVNIIWKEISNLSLKNDRVIEGYSKIDAYVVNNHEVKAYVETRETNYRKAKDFLESRGYEIDRSFFGSEDGEAILYRKKGIEVWHFLCHLDPMFVEIEDVEGYVKEEVGEIQ

SEQ ID NO: 2067 - DNA, 195 bp, Streptococcus pneumoniae
gtgatgaaaatggcaaccgataaaaatagaataatgattagcttggatgataaaaatctagagaaacttgaaaatttagtagaagatgctagagatagaaggggaatgcgactaacaaagtcccaggttattgaattactcctaaataccgttgattatttcgatgatattatgggggctatttactcaaaaaaa

SEQ ID NO: 2068 - protein, 65 aa, Streptococcus pneumoniae
  hypothetical protein; Cellular location: cytoplasm; Similar to strain R6 sequence 15902988 (7.E-32)
MMKMATDKNRIMISLDDKNLEKLENLVEDARDRRGMRLTKSQVIELLLNTVDYFDDIMGAIYSKK

SEQ ID NO: 2069 - DNA, 756 bp, Streptococcus pneumoniae
atggttgtttatattagacaaagtaaattaccaagtgaggtttcaattaataaatacaatgctcaagtaggtgcctacttacaaggagaagaagttattttatatcaatctttttctgaaataaaagagttaacaagtgaagatatagttgtagattatataatggagactagagcattactaaaaatgatgggcttaaacgttccggttcatgactatcctattgagcttaaagagttttatggtcgaaagatttatgctggtattttaggagagattgtgaatatacctgataattggggaaaatttattaagcctaaagctggttcaaaagtctttactggaagagttgttaatggaacccatgatttaataggtattggtctacctttcgactatcctatatggattagtgaggttgtagaattcatagctgaatggcgttgttttgtgttagatggtcgcgtattagatgttcgaccctatacaggtgattatcatgcacaatttgatgcaagtgtaattgatgaagcgatatcatgttggaaagatgcgccaatagcttatggactagatatcggtgttactcgcgatggcagaacacttgttgttgaagtaaatgatggttatgcattgggaaattatggcctatctcctttaaaatcaatcaattttcatagagctaggtggaaagaaatggtaaaaccctattttgaaaaaaatgaaatttttaaaatccaacaggatgttattttc

SEQ ID NO: 2070 - protein, 252 aa, Streptococcus pneumoniae
  hypothetical protein; Cellular location: cytoplasm; Similar to strain R6 sequence 15902989 (e-138)
MVVYIRQSKLPSEVSINKYNAQVGAYLQGEEVILYQSFSEIKELTSEDIVVDYIMETRALLKMMGLNVPVHDYPIELKEFYGRKIYAGILGEIVNIPDNWGKFIKPKAGSKVFTGRVVNGTHDLIGIGLPFDYPIWISEVVEFIAEWRCFVLDGRVLDVRPYTGDYHAQFDASVIDEAISCWKDAPIAYGLDIGVTRDGRTLVVEVNDGYALGNYGLSPLKSINFHRARWKEMVKPYFEKNEIFKIQQDVIF

SEQ ID NO: 2071 - DNA, 852 bp, Streptococcus pneumoniae
atgcttggagcaattattggagatattgtcggttctgtttacgaatggaacaatatcaaaacaaaggactttcctttatttcggaaggactgcttttttacagatgacacggttatgacctgtgctgttgcagaagcaattatgaatggtggacaaaaagatgacttcattgacgcgatgaagaaatatggcagaatgtatccgaatgctgattacggtgctcggtttaatgcatggctaaacagcgataaccgtgagccttataatagctttgggaatggatcagctatgcgtatttctccatgtgcttggatcatggactgtggtttttatgcgaaaactggtatatggccatcatctagaggacttacgagtctttctgcagaggtaactcataatcatccagaaggtgtcaaaggcgctatggctacagctgatgctatctttctatgtcgtttttactttggtggttattgtagagagtacgagcaatcaattaacgacaatcctacagagtgtaaaagacgaattaaggattatatagaaaaagaatacgattacaatctatctcaaactttagatgaaatccgtcctaactatcgttttaacgaaacatgtcaggaaactgtccctcaagccattatcgcctttcttgaaagtagagacttcgaagatgcgataagaaatgccatctcacttggtggcgacagtgatactctcgcagcaatcacttgtagcatagcagaggcagcttacggtattcctgattggatcaaggataaggcctattcttacttggatgaacccttaaaggatgtagttaggcgatgggaaaatagaataaaagcgtat

SEQ ID NO: 2072 - protein, 284 aa, Streptococcus pneumoniae
  hydrolase, putative; Cellular location: cytoplasm; Similar to strain R6 sequence 15902990 (e-172)
MLGAIIGDIVGSVYEWNNIKTKDFPLFRKDCFFTDDTVMTCAVAEAIMNGGQKDDFIDAMKKYGRMYPNADYGARFNAWLNSDNREPYNSFGNGSAMRISPCAWIMDCGFYAKTGIWPSSRGLTSLSAEVTHNHPEGVKGAMATADAIFLCRFYFGGYCREYEQSINDNPTECKRRIKDYIEKEYDYNLSQTLDEIRPNYRFNETCQETVPQAIIAFLESRDFEDAIRNAISLGGDSDTLAAITCSIAEAAYGIPDWIKDKAYSYLDEPLKDVVRRWENRIKAY

SEQ ID NO: 2073 - DNA, 882 bp, Streptococcus pneumoniae
atgaaaaaagcaatggtaattatcaaccctacttctggtggcgagaaggctttggattacaaagaaaagctggagaataaagcaaaagaatactttgaatatgttgaaaccaaaattaccgaaaaagcgctggatgcaacacattttgctgaagaagcttctcgtgagcagtatgatgcagtggttgtgtttggtggagatggaactgtcaatgaagtcatttcaggtattgatgagagagactacattcctaagttagggattatcccaggcggtacgggtaacctcattacaaaacttttggaaatcaatcaagacatcgatggcgcaattgacgaactggattttgatttaaccaataagattgatatcggtaaagcaaatgacaactattttggttatatctttagtatcggttctctgcctgaggcgattcacaatgttgaaatagaggacaaaacaaaattcggtattttaacctatgctgtaaataccatgaagtctgtcatgacagatcaggtctttaacattaaggttgagacagaaaatggaaattatgttggtgaagctagccatgttttggtccttttgacaaattacttcgctgataagaaaatctttgaagaaaacaaggacggctatgccaacattttgattctgaaagatgcctctatattctccaaattatccgtcattcctgatttattaaaaggggatgttgtcgcaaatgataatatcgagtatatcaaagcgcgtaatattaaaatctcttcagatagtgaattggagtcagatgttgacggagataaatcagataacctacctgtagaaatcaaagtcctagctcagcgagtagaagtattttcaaaaccgaaagaggat

SEQ ID NO: 2074 - protein, 294 aa, Streptococcus pneumoniae
  conserved hypothetical protein TIGR00147; Cellular location: cytoplasm; Similar to strain R6 sequence 15902991 (e-166)
MKKAMVIINPTSGGEKALDYKEKLENKAKEYFEYVETKITEKALDATHFAEEASREQYDAVVVFGGDGTVNEVISGIDERDYIPKLGIIPGGTGNLITKLLEINQDIDGAIDELDFDLTNKIDIGKANDNYFGYIFSIGSLPEAIHNVEIEDKTKFGILTYAVNTMKSVMTDQVFNIKVETENGNYVGEASHVLVLLTNYFADKKIFEENKDGYANILILKDASIFSKLSVIPDLLKGDVVANDNIEYIKARNIKISSDSELESDVDGDKSDNLPVEIKVLAQRVEVFSKPKED

SEQ ID NO: 2075 - DNA, 1761 bp, Streptococcus pneumoniae
atgaatactttaggagacaaattgatggaattgagtgctatttaccataggcctgagtcggagtatgactatctttataaggataagaaactccatattcgaattcgaactaagaaaggggacattgaaagcatcaacttgcactatggggacccttttatctttatggaggagttttatcaggatacaaaagaaatggtcaagataacttctggtaccttatttgaccattggcaggttgaagtgtcagttgactttgcacgtatccagtatctctttgagctcagagatacagaaggtcaaaatattttgtatggcgataaagggtgtgtggaaaattctctagaaaatcttcatgcaattgggaatggatttaagttgccttagcttcatgagattgatgcctgcaaggttcctgactgggtttcaaatacggtatggtatcagatatttcctgaaagatttgccaatggcaatgctctattaaacccagaagggactttagactgggattcatctgtcacacctaagagcgatgatttctttggtggtgatttacaggggattattgatcatatgaattacttgcaagacttgggtattactggactatatctttgtcccatctttgaatctacaagcaatcacaagtacaatacgacagattactttgaaattgaccgtcattttggagacaaggagacctttcgggaactggtggatcaagcgcatcatcgtggcatgaaagtcatgctggatgcggtatttaatcatattggttcgcaatctcttcaatggaaaaatgtcgtcaaaaatggtgaacagtctgcttataaggattggttccatattcaacaattcccagtgacaactgaaaagctagttaataagagagacttaccctatcatgtttttggtttcgaggactatatgcctaagctaaatacagccaatccagaggtcaagaattatcttttaaaggttgcgacttattggattgaagagtttaatatcgatgcttggcgtttggatgtggctaatgagattgaccatcagttctggaaggattttcgtaaggcagttttagctaaaaatcctgatctttatatcctaggagaagtctggcatacatctcagccttggctaaatggagatgagttccatgccgtcatgaattatcctttatctgatagtatcaaggactatttcttacgaggaattaagaagacagaccagttcatcgatgaaatcaatggagagtctatgtattacaagcagcagatttcagaggtcatgtttaatctcttggattcacatgatacagagcgaatcctgtggacggccaatgaagatgttcaactggttaaatcagccttagcctttctctttttacaaaaaggaacaccgtgcatttattacggaaccgagctagccttgactggaggaccagatccagattgtcgtcgttgtatgccttgggaacgtgtatcaagtgacaatgatatgctgaactttatgaagaggctgattaaaattcggaaatacgcgtcagtaatcatttcgcatggcaagtatagccttcaagaaatcaactctgatctagtagctctggaatggaaatacgaaggacggatcctcaaagcaatattcaaccaatcaacagaagattatcttttagagaaagaagcagtagcactagcaagcaattgccaagaattggataatcagcttgtcatctctccagatggatttatgattttc

SEQ ID NO: 2076 - skipped

SEQ ID NO: 2077 - DNA, 315 bp, Streptococcus pneumoniae
atgaattgtagaggacatgaaacaagacaaagaattgttagagattttgaagttcagcctaaagcacatattaagctgttagcaaatcaacaaaaacatagtgatgcaggagcaactattgaagatgaatattatgtatttatcgctgagagtaaaattgatggcaagaaggaagttattcagtgttgcatgggtgcggcaagggattttttagaactaattaatcacaaagggctacctctttttaatccgcttgtaggtgattctcatgtaaataatagacaagaatatgacaatacagggagtggaaattta

SEQ ID NO: 2078 - protein, 105 aa, Streptococcus pneumoniae
  hypothetical protein; Cellular location: cytoplasm; Similar to strain R6 sequence 15902993 (6.E-59)
MNCRGHETRQRIVRDFEVQPKAHIKLLANQQKHSDAGATIEDEYYVFIAESKIDGKKEVIQCCMGAARDFLELINHKGLPLFNPLVGDSHVNNRQEYDNTGSGNL

SEQ ID NO: 2079 - DNA, 279 bp, Streptococcus pneumoniae
atgtggttgattattttatggaatgctaagccggatacacctttatttaattttaaagacgaagtaattaagtataaaacatatgagccttttgaaagcagtataaaaagagtaaatactactataaagaatggtagtaaagggaaaactctgactgagatgattaatggctacagagcggataacgatattagagatgaaatttgtaactttaatattctgaaaaataaaattcgtgatatgaaaaaccaacaaggaaatacaatggaatcttacttt

SEQ ID NO: 2080 - protein, 93 aa, Streptococcus pneumoniae
  hypothetical protein; Cellular location: cytoplasm; Similar to strain R6 sequence 15902994 (8.E-52)
MWLIILWNAKPDTPLFNFKDEVIKYKTYEPFESSIKRVNTTIKNGSKGKTLTEMINGYRADNDIRDEICNFNILKNKIRDMKNQQGNTMESYF

SEQ ID NO: 2081 - DNA, 111 bp, Streptococcus pneumoniae
atgtggagtgttgctacaacgaaaaaggtgataatccttgatttcaagctattttataagcattttgtctttgtagataaaggcaattttgacaataaaaatcctaaaagg

SEQ ID NO: 2082 - protein, 37 aa, Streptococcus pneumoniae
  hypothetical protein; Cellular location: cytoplasm
MWSVATTKKVIILDFKLFYKHFVFVDKGNFDNKNPKR

SEQ ID NO: 2083 - DNA, 531 bp, Streptococcus pneumoniae
ttggtgcgttatgcttttttatgctataatggatttataaaaataaaggagtttgctatgattggaaagaacataaaatccttgcgtaaaacacatgacttaacacaactcgaatttgcacggattgtaggtatttcacgaaatagtctgagtcgttatgaaaatggaacgagttcagtctctaccgaattaatagacatcatttgtcagaagtttaatgtatcttatgtcgatattgtaggagaagataaaatgctcaatcctgttgaagattatgaattgactttaaaaattgaaattgtgaaagaaagaggtgctaatctattatctcgactctatcgttatcaagatagtcagggaattagcattgatgatgagtctaatccttggattttaatgagtgatgatctatctgatttgattcatacgaatatctatctagtagaaacttttgatgaaatagagagatatagtggctatttggatggaattgaacgtatgttagagatatctgaaaaacggatggtggcc

SEQ ID NO: 2084 - protein, 177 aa, Streptococcus pneumoniae
  transcriptional regulator, putative; Cellular location: cytoplasm; Similar to strain R6 sequence 15902995 (1.E-85)
MVRYAFLCYNGFIKIKEFAMIGKNIKSLRKTHDLTQLEFARIVGISRNSLSRYENGTSSVSTELIDIICQKFNVSYVDIVGEDKMLNPVEDYELTLKIEIVKERGANLLSRLYRYQDSQGISIDDESNPWILMSDDLSDLIHTNIYLVETFDEIERYSGYLDGIERMLEISEKRMVA

SEQ ID NO: 2085 - DNA, 759 bp, Streptococcus pneumoniae
atggaaatccaagattatactgatagtgaattcaaacatgctttagcaaggaatcttcgttcactgacaagaggaaaaaagtccagtaagcaacctatagcgattttgcttggagggcaaagtggtgccggtaagactacaattcatcgtattaaacagaaagaatttcaaggaaatattgttatcatagatggtgatagttttcgttctcagcatccacactatttagaactgcagcaagaatatggcaaagacagtgtagaatataccaaagattttgcaggaaaaatggtagagtctttagtaacaaaattgagtagtttgagatacaatcttttgatagagggaactttacgaacagttgatgttccaaagaaaacagcacaactcttgaaaaataagggatatgaagtacaattggccttaattgcgacaaagcctgaattgtcgtatctaagtactcttatccgttatgaagaactgtacattatcaatccaaatcaagcacgcgcaactccaaaagaacatcatgatttcattgtaaatcatctagttgataacacacgaaaattggaagaactagctatctttgaaagaattcaaatttaccaacgagatagaagttgtgtatatgattcaaaagaaaatacaacttcagcagcagatgttcttcaagagttactctttggggagtggagtcaggtagagaaggagatgttgcaggtgggggaaaagagacttaatgaattacttgaaaaa

SEQ ID NO: 2086 - protein, 253 aa, Streptococcus pneumoniae
  conserved hypothetical protein; Cellular location: cytoplasm; Similar to strain R6 sequence 15902996 (e-141)
MEIQDYTDSEFKHALARNLRSLTRGKKSSKQPIAILLGGQSGAGKTTIHRIKQKEFQGNIVIIDGDSFRSQHPHYLELQQEYGKDSVEYTKDFAGKMVESLVTKLSSLRYNLLIEGTLRTVDVPKKTAQLLKNKGYEVQLALIATKPELSYLSTLIRYEELYIINPNQARATPKEHHDFIVNHLVDNTRKLEELAIFERIQIYQRDRSCVYDSKENTTSAADVLQELLFGEWSQVEKEMLQVGEKRLNELLEK

SEQ ID NO: 2087 - DNA, 774 bp, Streptococcus pneumoniae
atgagagggtttaataacaagataaagtctgtttatcaagaactaacaaattccaaagagaaattcggtagctttcacaagactttaattcatttgcatacacctgtttcttatgattacaagctattttctaattggactgcaacgaaatatagaaaaattactgaagatgaactatatgatatattttttgaaaataagaaaataaaagttgataagacaattttttttagtaattttgataaggttgttttttctagttcaaaagaatatattagttttcttatgttagcagaggcaatcataaaaaatggaatagaaatagttgtagtaactgatcataatactaccaaaggtattaaaaagttacaaatggcagtctcaatcataatgaaaaattatccgatttatgatatacatcctcatattttacatggagtagaaattagtgcagcagataaattgcatattgtatgtatatatgattatgaacaagaatcatgggttaatcaatggttaagtgaaaatattataagtgagaaagatggaagttatcaacattcactgactataatgaaggatttcaataatcaaaaaatagttaactatattgctcatttcaatagttatgacattttgaaaaaaggttctcacttatcaggtgcatataaacgaaaaattttttctaaagaaaatacacgattttggagtttaatattaactcgaaagaatcttcgcaacaacttgatattctctataaagaagttggtgtat

SEQ ID NO: 2088 - protein, 258 aa, Streptococcus pneumoniae
  phosphoesterase, putative; Cellular location: membrane; Similar to strain R6 sequence 15902997 (e-150)
MRGFNNKIKSVYQELTNSKEKFGSFHKTLIHLHTPVSYDYKLFSNWTATKYRKITEDELYDIFFENKKIKVDKTIFFSNFDKVVFSSSKEYISFLMLAEAIIKNGIEIVVVTDHNTTKGIKKLQMAVSIIMKNYPIYDIHPHILHGVEISAADKLHIVCIYDYEQESWVNQWLSENIISEKDGSYQHSLTIMKDFNNQKIVNYIAHFNSYDILKKGSHLSGAYKRKIFSKENTRFWSLILTRKNLRNNLIFSIKKLVY

SEQ ID NO: 2089 - DNA, 375 bp, Streptococcus pneumoniae
ttgggacaaaaagttgtagccatgcttgattttttattagcatatagtgattattctaaagacttcagaccattgattattgatcagcctgaagacaatctagacaatcgttatatttacaggcatttagttcagcagtttagagatgtgaaagctcaacgtcaaattattttagcaacacataatgctacaattgtaacaaattctatgacagatcaagttgttattatggagtcagatggagttaacggatggattgaatcacagggatatgttagtgaaaaatatataaaaaatcatatcatcaatcaattagagggaggaaaagattccttcaagcataaaatgtctatatatgagacggctttatcagag

SEQ ID NO: 2090 - protein, 125 aa, Streptococcus pneumoniae
  conserved domain protein; Cellular location: cytoplasm; Similar to strain R6 sequence 15902998 (1.E-68)
MGQKVVAMLDFLLAYSDYSKDFRPLIIDQPEDNLDNRYIYRHLVQQFRDVKAQRQIILATHNATIVTNSMTDQVVIMESDGVNGWIESQGYVSEKYIKNHIINQLEGGKDSFKHKMSIYETALSE

SEQ ID NO: 2091 - DNA, 354 bp, Streptococcus pneumoniae
atgaaacgagatgtgcgtgatattcggaaacaatttcgtttaacagaagcagaagaaaagcaaattctagctttgatgagagagcggggagagactaatttctctgattttcttcgtaaaagtttactttcctctgatttacaaaaacagatggagacatggtttgccctctggcaatcccaaaaactagaacaaatcagtcgtgacgttcatgaagttttaatcttggcacagtcagaacgtcaagtcacccaagagcatgtatctattctcttaacgtgcgtgcaggaattgattcaagaggttgcaaacaccatacccctcagtaaagaatttcgtgagaagtacatgagg

SEQ ID NO: 2092 - protein, 118 aa, Streptococcus pneumoniae
  Tn5252, Orf 10 protein; Cellular location: cytoplasm; Similar to strain R6 sequence 15902999 (2.E-37)
MKRDVRDIRKQFRLTEAEEKQILALMRERGETNFSDFLRKSLLSSDLQKQMETWFALWQSQKLEQISRDVHEVLILAQSERQVTQEHVSILLTCVQELIQEVANTIPLSKEFREKYMR

SEQ ID NO: 2093 - DNA, 363 bp, Streptococcus pneumoniae
atggaacatcgttaccgaaccaatctcaagaaagtgtttttgtctgatagtgagttgaaccaactaaatataaatatcgatcaaagtggttgtaaatccttttctgaatatgcgagacgaactctactcgatcctggtatgaattttatcacgattgacacaaacggttaccaagatttagtgtttgagttaaagaggattggcaataatatcaaccagattgctcgaagtgttaatcaatctcagttaatttctggtgaagaattgcaggagttgaaaaaaggaattggtgaattgataaaagaagttgataaggaatttaatctgcaagcgcagaagctaaaggagttccatggtcatcac

SEQ ID NO: 2094 - protein, 121 aa, Streptococcus pneumoniae
  Tn5252, Orf 9 protein FRAMESHIFT; Cellular location: cytoplasm; Similar to strain R6 sequence 15903000 (3.E-39)
MEHRYRTNLKKVFLSDSELNQLNINIDQSGCKSFSEYARRTLLDPGMNFITIDTNGYQDLVFELKRIGNNINQIARSVNQSQLISGEELQELKKGIGELIKEVDKEFNLQAQKLKEFHGHH

SEQ ID NO: 2095 - DNA, 1821 bp, Streptococcus pneumoniae
atggtcatcactaaacactttgccattcacggaaagagttaccgcagaaagcttatcaagtacattctcaatcctgagaaaaccaataatcttgccttggtgtcggactatggcatgaagaattttctggactttcctagctatgaggaaatggtgcagatgtatcatgaaaatttcatcagcaacgatacgctttacgattttcgccacgacaggatggaagaaaatcaacgaaaaatacacgctcaccacatcattcagtctttctcgccagaggatcatatcactcctgaacaaatcaatcggataggttatgagactgtgaaggaattaactggtggcaaatttcgttttatcgttgcgacccatgttgataaagaccacctgcacaatcacatcattatcaattcagtagatagcaattctgacaaaaagctcaagtgggactacaaggtggagcgaaatcttcgcatgatttctgaccgtttttctaaaatcgcaggtgctaaaatcattgagaaccgctattctcaccagcggtatgaagtctatcgtaagactaatcacaagtatgaactcaagcagcgactctattttttgatggaacattctagggactttgaggatttcaaaaagaatgctccgctactacatgtggagatggatttccgtcacaagcatgccaccttttttattacggactcaactatgaaacaggtggtgcgtggcaagcaactcaatcgcaagcagccttacacagaagaattttttaagaactactttgccaaaagagaaatagaaagtctcatggaatttttattgctgaaagttgagaatatggatgatttacttcagaaagcaaaactttttggactaactatcaatcctaaacaaaagcatgtttcttttcaatttgcaggagtggaggtaaaggagacagagctagaccagaaaaatctttatgatgtagagtttttccaagattattttaaaaatagaaaagattggcaagctccagaaactgaggatttcgttcaactttatcaagaagaaaagttatccaaagaaaaagaacttccaagcgatgagaagttctgggagtcctatcaagagttcaagagtaacagagatgccgttcatgaatttgaggtggagttgtcactcaatcaaattgaaaaagtagtggatgatggaatttacgtcaaggtcaagtttggtattcgtcaggagggacttatctttgtgccgaacatgcagcttgatatggaagaggataaggtgaaggttttcatcagggaaaccagctcctactatgtctaccacaaagacgctgccgagaaaaattgttatatgaaaggtcgaaccttaattagacagttcagctatgaaaatcaaaccattccattacgcagaaaagcgacagtcgatatgattaaagagaagattgcggaagtggatgctttgattgaactggaagtagaaaatcaatcttatgtcacgattaaagatgagttagtgcatgaactagcagcgtctgaattgagaatcaatgagttgcaagaacgaatgtcaaccttgaatcaagtagcagaatatctactggcttcagttgaaagtaagcaagaaatgaaattaaatctttcaaaactgaatataactgagaatatcagtgctaatattgttgagaaaaaattgaagagcctggggaatcaactggaattggaaaggggcaggtatgaaaagatggtagtcaggctagataaatttataaatcgcttaaatacaggactttcaaaaggagatgggatagattttcaaaaa

SEQ ID NO: 2096 - protein, 607 aa, Streptococcus pneumoniae
  Tn5252, relaxase; Cellular location: cytoplasm; Similar to strain R6 sequence 15903001 (4.E-89)
MVITKHFAIHGKSYRRKLIKYILNPEKTNNLALVSDYGMKNFLDFPSYEEMVQMYHENFISNDTLYDFRHDRMEENQRKIHAHHIIQSFSPEDHITPEQINRIGYETVKELTGGKFRFIVATHVDKDHLHNHIIINSVDSNSDKKLKWDYKVERNLRMISDRFSKIAGAKIIENRYSHQRYEVYRKTNHKYELKQRLYFLMEHSRDFEDFKKNAPLLHVEMDFRHKHATFFITDSTMKQVVRGKQLNRKQPYTEEFFKNYFAKREIESLMEFLLLKVENMDDLLQKAKLFGLTINPKQKHVSFQFAGVEVKETELDQKNLYDVEFFQDYFKNRKDWQAPETEDFVQLYQEEKLSKEKELPSDEKFWESYQEFKSNRDAVHEFEVELSLNQIEKVVDDGIYVKVKFGIRQEGLIFVPNMQLDMEEDKVKVFIRETSSYYVYHKDAAEKNCYMKGRTLIRQFSYENQTIPLRRKATVDMIKEKIAEVDALIELEVENQSYVTIKDELVHELAASELRINELQERMSTLNQVAEYLLASVESKQEMKLNLSKLNITENISANIVEKKLKSLGNQLELERGRYEKMVVRLDKFINRLNTGLSKGDGIDFQK

SEQ ID NO: 2097 - DNA, 864 bp, Streptococcus pneumoniae
gtgggtacactattagcaacaagattaaaaaatagacgaaaagaattaaaaatgtctcagcgagaattagctgagggtatctgtaaacaggggcaaattagtcgattagagagtggagagttcacccctggagcggattttttacatgcccttgctaagaaattaaaagttagtatggactacttttttgatgagcaggttgtagaggaagtcaatgagttatcagagtttaagaagttagcacagacatttatcacaaatcgtaattatgaatctttaaaatatatatatgaattggaaaatgtaaaagcccatcgcttatctctagcagataaattttacatggaatggataaagtctcttatagatttttatttttatggacagaaagaagaggcaattacacgattagagaatatgctacctcagttaaatgtatctgatttgaactaccttcaagtttcaaacactctattcaatttttattatgatattgaagatttagaacgttttaatgagattagagacaagctagagcatcaagtgaatcagcttaatttaaacacaattgaagagttagaactatcaattaagttcaattataacgtttgtcgatacctatggttacagaaaaatattgaagaagctattacgaaaatcacagctacgataaagcaatgtaaggagtacaggacaacttatctattagctgatttgtatttattgatgggaagtgtaagtgaaaatttttcttctaaaagttcagtaaaagaatattttgagactgctcattttctctacaaacttgaggaaaacatgtcaatggctttgaaagtcgaacattattttgcagatataacagaa

SEQ ID NO: 2098 - protein, 288 aa, Streptococcus pneumoniae
  transcriptional regulator PlcR, putative; Cellular location: cytoplasm; Similar to strain R6 sequence 15903805 (4.E-56)
MGTLLATRLKNRRKELKMSQRELAEGICKQGQISRLESGEFTPGADFLHALAKKLKVSMDYFFDEQVVEEVNELSEFKKLAQTFITNRNYESLKYIYELENVKAHRLSLADKFYMEWIKSLIDFYFYGQKEEAITRLENMLPQLNVSDLNYLQVSNTLFNFYYDIEDLERFNEIRDKLEHQVNQLNLNTIEELELSIKFNYNVCRYLWLQKNIEEAITKITATIKQCKEYRTTYLLADLYLLMGSVSENFSSKSSVKEYFETAHFLYKLEENMSMALKVEHYFADITE

SEQ ID NO: 2099 - DNA, 132 bp, Streptococcus pneumoniae
atgagaagtttgtttaggaaaattgttgctttgttagtcataggattaatcctattagggactgctggaggaactcaagttcataagatggctagagggattgatccaggtcctgcgaatggtatttataga

SEQ ID NO: 2100 - protein, 44 aa, Streptococcus pneumoniae
  hypothetical protein; Cellular location: outside
MRSLFRKIVALLVIGLILLGTAGGTQVHKMARGIDPGPANGIYR

SEQ ID NO: 2101 - DNA, 249 bp, Streptococcus pneumoniae
atgagtagtcaaatgaaagctttcttgaatgaacttcaaggaaatatggaagttgttggagaattttttgataatcctgaaaaggtaattagaaaatttggaattgtcggaagagagaaggaagcattgctaatccgtgacttaaatgatatggatgattatgctctttcaattcaaaatagcgttgcatcgccttctggggcacatagtagcacttgccattttgttagacaagatttacaatccgca

SEQ ID NO: 2102 - protein, 83 aa, Streptococcus pneumoniae
  hypothetical protein; Cellular location: cytoplasm
MSSQMKAFLNELQGNMEVVGEFFDNPEKVIRKFGIVGREKEALLIRDLNDMDDYALSIQNSVASPSGAHSSTCHFVRQDLQSA

SEQ ID NO: 2103 - DNA, 309 bp, Streptococcus pneumoniae
gtggccgatatgaaaaataaatacgatgttaaaagaattattccggatgaattatcagaatcactagatatttttctaaaaaattattctgaaactggattgtcagattataatacttatctcttttatggttttatcttgaagtcctataaattgcctcgagaaaatagatatagcataaaattattggtgaaggaattacaaaatagaggactgaaagttacattgattatcaacatttattatcacgctttaaattgtttggctttaaatgatggtctaaaaatttatggagaagatttcttaata

SEQ ID NO: 2104 - protein, 103 aa, Streptococcus pneumoniae
  hypothetical protein; Cellular location: cytoplasm
MADMKNKYDVKRIIPDELSESLDIFLKNYSETGLSDYNTYLFYGFILKSYKLPRENRYSIKLLVKELQNRGLKVTLIINIYYHALNCLALNDGLKIYGEDFLI

SEQ ID NO: 2105 - DNA, 1344 bp, Streptococcus pneumoniae
atgaattacgaaaagtatttaaactatttggactatgaaactgaaatagaagacgcataccataatttattattagaatataaaattagtgataattttagtgatgaacattggttatataatttgccgtctaatatcacccaatctaagggatttaaaatacacctgagcgcttcaatattaaatgctaatttggttgctaaaaaattctttgattttatattttctagagagaagaagataaatttcaaaattttggttagcattaaagaactttctttgcaaaatacagggcttaatggttattcacaagtcgggaaattcattacaatttatccaaaagataataaagagtttcaacgtttgttacacaaattagaaatattgtataaaggtgtaaagggtgtaaacataccatcagatttcagatttcaacttagcgaggttgtatattacagatatggggagttcgtaaaagatagcactttcaaggataaaagagataagaaaatcccttcaaatgtgaatgttccaataagggattactatattccaagatataacactattcctgatcaatatattattttggaagtgatttctaaaaatgccaaaggtggagtttataaagtatttaatactcaaaagcgagtttattctttattaaaagaagctagtgatttatcgttggttgattttacaaatagagattctgtgaatcgtttaataaatgaaagagaaatattagtagaattggaaaaggaggaatttactccaaaagtttttaacgatttttacataaagaattcgtattttgtggaatttgagtttattattgcagataaattaagcgagtataatatggttagtggctcgtatgattggtttttaacattaattgattatatggagataataaactccaaatataatctttcctatagagatttatcatttaataatatacttattgataatagaaataatatttatattatagactttgagcatgccctaaggaaagaaactcaaattgaagaaaaaaagttgcctctatttggaactccagggttttatgaaaccaacttaaatttattgaataatcaaccagaggatattatgggattggttttgttattatattggagtcagaatttagatgattttaacgtcttttcaaaaatgagttttttagaagcgatggagtatgcaatgaattttaattcgcgtcgcttagacacacttgataaatcagattggctttatgatatttataaaaaagcgttcaattataaatatgatactttttctgaattaaaaaaagattttatagaggtattaaaa

SEQ ID NO: 2106 - protein, 448 aa, Streptococcus pneumoniae
  protein kinase, putative; Cellular location: cytoplasm; Similar to strain R6 sequence 15903248 (6.E-19)
MNYEKYLNYLDYETEIEDAYHNLLLEYKISDNFSDEHWLYNLPSNITQSKGFKIHLSASILNANLVAKKFFDFIFSREKKINFKILVSIKELSLQNTGLNGYSQVGKFITIYPKDNKEFQRLLHKLEILYKGVKGVNIPSDFRFQLSEVVYYRYGEFVKDSTFKDKRDKKIPSNVNVPIRDYYIPRYNTIPDQYIILEVISKNAKGGVYKVFNTQKRVYSLLKEASDLSLVDFTNRDSVNRLINEREILVELEKEEFTPKVFNDFYIKNSYFVEFEFIIADKLSEYNMVSGSYDWFLTLIDYMEIINSKYNLSYRDLSFNNILIDNRNNIYIIDFEHALRKETQIEEKKLPLFGTPGFYETNLNLLNNQPEDIMGLVLLLYWSQNLDDFNVFSKMSFLEAMEYAMNFNSRRLDTLDKSDWLYDIYKKAFNYKYDTFSELKKDFIEVLK

SEQ ID NO: 2107 - DNA, 915 bp, Streptococcus pneumoniae
atgaattgtttcttgaaaatgaataatgtaagtgttcgttatgatgacgtaatagctttaaaagatataactttacaaataaataagggagatttcattggcttattaggttcaaatggtgcaggtaaatctacgttaattaattctattgtaggttttcaagagatttatttaggagaaatagagtattgtgataaagatttgatagttagttctcaaccttttgctcatttaggctttactcctcaaaccacagtaattgatttttatactactgtgaaggacaatgtaatattggggctgaaccttgctggaaagtttgggaaaaatgctgagaagttgtgtcaaatagccttagaaattgttgggttagctgataaaaaaaataatttggtagaaacattgtcaggtggacaactgcaacgcgtccagattgctagagcaatagctcataatccagatttttatattttagatgaacctaccgttggtttagatactgaatctgccgaaaaatttttaatgtatttaaaagataagagtttggaaggaaaaactattatcatatcttcacatgacataaatctactcgaaaagttttgtaaaaaaatactttttttacaaaatggctccatatcattttttggtgatatgcgtgactttgtagataattcaactatcaaattaaatttttcaatgcagaatagaatttctagatatcaaattgaatttttagaaaattttagatttaaagttcacatcgaagataatgatagttttacaatagaagtccctatagaagaaaagatcttagatgttatcaatgaggtaggaaaagcatgtgaaattaaaaacttttcaacaagtaaattaaccttacaagaaagttatttgcaaagaataggaggagaaaaa

SEQ ID NO: 2108 - protein, 305 aa, Streptococcus pneumoniae
  ABC transporter, ATP-binding protein; Cellular location: cytoplasm; Similar to strain R6 sequence 15903535 (1.E-29)
MNCFLKMNNVSVRYDDVIALKDITLQINKGDFIGLLGSNGAGKSTLINSIVGFQEIYLGEIEYCDKDLIVSSQPFAHLGFTPQTTVIDFYTTVKDNVILGLNLAGKFGKNAEKLCQIALEIVGLADKKNNLVETLSGGQLQRVQIARAIAHNPDFYILDEPTVGLDTESAEKFLMYLKDKSLEGKTIIISSHDINLLEKFCKKILFLQNGSISFFGDMRDFVDNSTIKLNFSMQNRISRYQIEFLENFRFKVHIEDNDSFTIEVPIEEKILDVINEVGKACEIKNFSTSKLTLQESYLQRIGGEK

SEQ ID NO: 2109 - DNA, 798 bp, Streptococcus pneumoniae
atgaaggctgatcaattaaggcacaaatcggacttaggtttaagaggtctagcgattattgctaaaaatgagattattgctttttttagaagtaaaggtttaattatttctcagtttctacaaccaatcttatatgttgtttttataataataggattaaattcttcgataaagaacattcagtttaatgatataaaaacctcttatgcagaatatacaatcattggtgttatagctttattgataatcgggcagatgactcaagttatttatagggtgacaatagataaaaaatatgggctacttgctcttaagttatgcagtggagttcgtcctttatattatattttagggatgagtatctattctatattagggttgatagttcaagaaattattatatatataattacgttagcgtttgagataaatatcgcaatggatagatttttttatacagttttgttatctattgttgttttattattttgggactcccttgcaattttacttacaatgtttatcaatgattacagaagacgtgatattgtaatacgttttgtactaacaccgcttggttttacagctcctgttttctacttaatagattctgctcctagtattgtgagatggattggtcagttaaatcccttaacttatcaattaactattttgagaaacttttattttaaaaattcaacaactttggaattagttttcttattgttaacatcattacttgtccttatatctgtatcttttattataccaaagataaaattgatactgatagaaaga

SEQ ID NO: 2110 - protein, 266 aa, Streptococcus pneumoniae
  ABC-2 transporter, permease protein, putative; Cellular location: membrane
MKADQLRHKSDLGLRGLAIIAKNEIIAFFRSKGLIISQFLQPILYVVFIIIGLNSSIKNIQFNDIKTSYAEYTIIGVIALLIIGQMTQVIYRVTIDKKYGLLALKLCSGVRPLYYILGMSIYSILGLIVQEIIIYIITLAFEINIAMDRFFYTVLLSIVVLLFWDSLAILLTMFINDYRRRDIVIRFVLTPLGFTAPVFYLIDSAPSIVRWIGQLNPLTYQLTILRNFYFKNSTTLELVFLLLTSLLVLISVSFIIPKIKLILIER

SEQ ID NO: 2111 - DNA, 471 bp, Streptococcus pneumoniae
atgagagaggataatcaaagtttatcacataccacatggaattgtaaatatcatattgtttttgcacccaaatatcgtcgtcaaatcatttatggcagatacaaagctagtatcggaagaatcatacgtgacttatgtgagcgtaagggtgtaataatccatgaagcgaatgcttgttcagaccatattcacatgcttatcagtattcctccgaaacttagtgtttcgtcctttatgggctatttaaagggcaagagcagtttgatgatttttgataagcatgcgaatttaaaatacaaatatggcaatcgcaagttttggtgtagaggctattatgtagatacggtaggccgtaatcagaaagtgatagctgaatatattcagaatcaattacaagaagacagagtagcagaccagctcacgttattcgagtcagtagatccgtttactggcgaaataaataagaggaag

SEQ ID NO: 2112 - protein, 157 aa, Streptococcus pneumoniae
  transposase, IS200 family; Cellular location: cytoplasm
MREDNQSLSHTTWNCKYHIVFAPKYRRQIIYGRYKASIGRIIRDLCERKGVIIHEANACSDHIHMLISIPPKLSVSSFMGYLKGKSSLMIFDKHANLKYKYGNRKFWCRGYYVDTVGRNQKVIAEYIQNQLQEDRVADQLTLFESVDPFTGEINKRK

SEQ ID NO: 2113 - DNA, 192 bp, Streptococcus pneumoniae
atgaatgatgaagcaagtaaacaattgagcgatagccgtttcaagatccttgtaggtgttcagcgcacgacttttgaagagatgttagctgtgttaaaaacagcttatcaacgtaaacgcgcaaaaggtggacgaaaaagcaaattaagcctagacgatctccttatggtaactattcaatacatgcgagaa

SEQ ID NO: 2114 - protein, 64 aa, Streptococcus pneumoniae
  IS1381, transposase OrfA, truncation POINT MUTATION
MNDEASKQLSDSRFKILVGVQRTTFEEMLAVLKTAYQRKRAKGGRKSKLSLDDLLMVTIQYMRE

SEQ ID NO: 2115 - DNA, 1227 bp, Streptococcus pneumoniae
atgaagattagtaagaggcacttattaaattattccatcttgattccctacttgcttttatctattttgggcttgattgtggtctattcgaccaccagtgctattttaattgaagaaggcaagagcgccttgcagttggttcgaaaccaaggaatcttttggattgttagtttgatactgattgccttaatttataaattgagactagattttttgagaaatgagcgactaatcattttagttatattaatagaaatgcttttattgttcttggctcgttttattggtatttccgtaaacggggcatacggttggatttcggttgcaggaataactattcagccagctgagtacttaaaaatcattattatttggtatttagctcaccgattctccaaacagcaagaagaaatagctacttatgattttcaagttttgactcaaaatcaatggcttccccgtgcttttaatgattggcgattcgttctcctagttctgattggaagtttgggaattttccctgatttaggaaatgcgactattttagtcttggtttccttgattatgtatacagttagtggaatcgcttatcgctggttttcaaccattctggcgctcgtatctgccgcttctgtctttgtcttgaccactatcagcctaatcggtgttgagaccttttcaaaaattccagtattcggctatgtagccaagcgctttagtgccttttttaatccttttgccgatcgtgctgatgcaggtcaccagttagctaattcttattttgccatggtcaatggcggttggtttggtctaggtcttggaaactcgattgaaaaacgaggttatttgccagaagctcatacagactttgtcttttctatcgtgattgaagaatttggctttgttggtgccagtcttattttagctctcttgtttttcatgattttgcggattatcttggtcggtatccgagcggagaatcctttcaatgccatggttgcactcggtgtcggagggatgatgttggttcaggtatttgtcaatatcggagggatttcgggcttgattccatctacaggagtgactttccccttcttatcccagggtggaaatagtcttctagtcttatcagtggcagtagcctttgtcttaaatattgatgccagtgaaaaacgcgctaaattgtaccgagaattggaaaatcaaccaatgaaccttctgttgaag

SEQ ID NO: 2116 - protein, 409 aa, Streptococcus pneumoniae
  cell division protein FtsW, putative; Cellular location: membrane; Similar to strain R6 sequence 15903017 (0.E+01)
MKISKRHLLNYSILIPYLLLSILGLIVVYSTTSAILIEEGKSALQLVRNQGIFWIVSLILIALIYKLRLDFLRNERLIILVILIEMLLLFLARFIGISVNGAYGWISVAGITIQPAEYLKIIIIWYLAHRFSKQQEEIATYDFQVLTQNQWLPRAFNDWRFVLLVLIGSLGIFPDLGNATILVLVSLIMYTVSGIAYRWFSTILALVSAASVFVLTTISLIGVETFSKIPVFGYVAKRFSAFFNPFADRADAGHQLANSYFAMVNGGWFGLGLGNSIEKRGYLPEAHTDFVFSIVIEEFGFVGASLILALLFFMILRIILVGIRAENPFNAMVALGVGGMMLVQVFVNIGGISGLIPSTGVTFPFLSQGGNSLLVLSVAVAFVLNIDASEKRAKLYRELENQPMNLLLK

SEQ ID NO: 2117 - DNA, 2694 bp, Streptococcus pneumoniae
atgtctcttcaaaaattagaaaattatagtaataaaagtgttgtgcaagaagaagtcttgattctaacagaattactggaagatattactaaaaatatgcttgccccagagacctttgaaaaaataatacagttgaaagaattatcaacgcaggaagattatcaaggtctaaaccgtctagtgactagcttatcaaatgatgaaatggtctatatttcacgctatttctctatcttgcctcttttgattaatatttcagaggatgtggatttagcttatgaaatcaatcatcaaaataatattgatcaggactatttaggtaaattatctacaacgattaaattggtagcagaaaaggaaaatgccgttgagatcctagaacacttgaatgttgtccctgttttgacagcccatccaacacaagtgcaacgcaaaagtatgttggatttaacaaatcatattcatagtcttttgcgtaaataccgtgatgttaagttggggttgatcaataaagataaatggtacaatgatttgcgtcgttacatcgaaattatcatgcagacagacatgattcgtgagaaaaaattaaaagtgactaacgaaatcacgaatgctatggaatattataacagctcctttttgaaagctgtacctcatttgacgacggagtataagcgcttagcgcaagcgcatggtctgaatttaaaacaggctaaaccaatcaccatgggtatgtggataggtggtgaccgtgatggaaatccatttgttacagcaaagaccttgaagcagtctgcactcactcagtgtgaagtcatcatgaactactatgataaaaagatttaccaactttatcgtgaattttctctttcaactagcattgtcaacgtcagcaagcaagtcagagaaatggctcgtcaatccaaggataactcgatttaccgcgaaaaagagctttaccgtcgtgccttgtttgatattcaatcaaaaattcaggcaactaaaacctatctgattgaggatgaagaagttgggactcgttatgaaaccgccaatgatttctacaaggatttgattgccattcgagattctctactagaaaataagggcgagtccttgatttcaggtgattttgtggaattattgcaggcagtagagatatttggtttttacttagcatcaattgatatgcgacaagactctagcgtctatgaagcctgtgtggcagaactcttgaaatcagcaggaattcattctcgttatagcgagttgagcgaagaagaaaagtgtgaccttctcttgaaagaattagaagaagatccccgaattctttctgcgactcacgcagaaaaatcagaattattagcaaaagaattagctatttttaagacggctcgtgttttgaaagataagttgggagatgatgtcatccgtcagaccatcatttcacatgcaaccagcctttctgatatgctagaattagctattctgttaaaagaagtaggactggtggatacggaaagggcgcgtgttcagattgttcccctttttgaaacaattgaagacttggatcattcagaggaaacaatgagaaaatatctttctcttagccttgccaaaaaatggattgactcacgaaataactaccaagaaatcatgcttggctactctgacagtaataaagatggcggttacttgtcatcatgttggaccctctacaaggctcaacaacaattgactgctattggagatgaatttggcgttaaggttaccttcttccatggtcgtggtggtactgtcggtcgtggtggtgggccaacctatgaagccattacatctcaaccgctcaagtctatcaaggatcgtatccgcttgacggagcagggtgaagtaattgggaataaatacggtaacaaagacgccgcttactataaccttgaaatgctagtatcggcagctattaaccgtatgattactcagaagaagagcgataccaataccccaaatcgttatgaaaccattatggatcaagtagtggaccgtagttacgatatctaccgtgatttggtctttggtaatgagcatttctatgattatttcttcgagtcaagtccaatcaaggctatttcaagttttaatattggttctcgtccagccgctcgtaagactattactgaaatcggtggtttgcgtgccatcccttgggtattctcatggtcacagagtcgtgttatgttccctggatggtacggggttggttcaagcttcaaggaatttatcaataaaaatccagagaatattgctatcttacgagatatgtaccaaaattggcctttcttccaatcgcttctttcaaatgttgatatggttttgtcaaaatcaaatatgaatattgcttttgaatatgctaaactttgtgaagacgagcaagttaaggccatctatgagactattttaaatgaatggcaagttactaagaacgttatcttggctattgaaggacatgacgaactcttagctgacaatccatatctaaaagctagtctggattaccgtatgccttactttaatattctcaactatattcagttggagttgattaaacgccaacgtcgtggagaattgtccagtgatcaagaacgattgattcatatcaccatcaacggaattgcgacaggattgcgtaattcaggt

SEQ ID NO: 2118 - protein, 898 aa, Streptococcus pneumoniae
  phosphoenolpyruvate carboxylase (ppc); Cellular location: cytoplasm; Similar to strain R6 sequence 15903018 (0.E+01)
MSLQKLENYSNKSVVQEEVLILTELLEDITKNMLAPETFEKIIQLKELSTQEDYQGLNRLVTSLSNDEMVYISRYFSILPLLINISEDVDLAYEINHQNNIDQDYLGKLSTTIKLVAEKENAVEILEHLNVVPVLTAHPTQVQRKSMLDLTNHIHSLLRKYRDVKLGLINKDKWYNDLRRYIEIIMQTDMIREKKLKVTNEITNAMEYYNSSFLKAVPHLTTEYKRLAQAHGLNLKQAKPITMGMWIGGDRDGNPFVTAKTLKQSALTQCEVIMNYYDKKIYQLYREFSLSTSIVNVSKQVREMARQSKDNSIYREKELYRRALFDIQSKIQATKTYLIEDEEVGTRYETANDFYKDLIAIRDSLLENKGESLISGDFVELLQAVEIFGFYLASIDMRQDSSVYEACVAELLKSAGIHSRYSELSEEEKCDLLLKELEEDPRILSATHAEKSELLAKELAIFKTARVLKDKLGDDVIRQTIISHATSLSDMLELAILLKEVGLVDTERARVQIVPLFETIEDLDHSEETMRKYLSLSLAKKWIDSRNNYQEIMLGYSDSNKDGGYLSSCWTLYKAQQQLTAIGDEFGVKVTFFHGRGGTVGRGGGPTYEAITSQPLKSIKDRIRLTEQGEVIGNKYGNKDAAYYNLEMLVSAAINRMITQKKSDTNTPNRYETIMDQVVDRSYDIYRDLVFGNEHFYDYFFESSPIKAISSFNIGSRPAARKTITEIGGLRAIPWVFSWSQSRVMFPGWYGVGSSFKEFINKNPENIAILRDMYQNWPFFQSLLSNVDMVLSKSNMNIAFEYAKLCEDEQVKAIYETILNEWQVTKNVILAIEGHDELLADNPYLKASLDYRMPYFNILNYIQLELIKRQRRGELSSDQERLIHITINGIATGLRNSG

SEQ ID NO: 2119 - DNA, 1032 bp, Streptococcus pneumoniae
atgttaaaggaaataaaaaggagaaacagaatgaaaaataaacgtttaattggaattattgctgcattagcagtcttagtagcaggaagcttgatttattcttcaatgaataaatcagaagctcagaataataaggatgagaagaaaataaccaagattggtgtgcttcaatttgtgagccatccatcccttgatttgatttataaagggatccaagatggacttgcagaagaaggatataaagatgatcaagttaaaattgattttatgaactcagaaggtgaccaaagtaaggttgcgacaatgagtaaacaattggttgcaaatgggaatgaccttgtggttggtatcgcaacaccagcagcccaagggttggctagtgcaacaaaagacctaccggttatcatggccgctattacagacccaattggtgctaacttggttaaagatttgaaaaaaccaggtggcaacgttacaggggtatctgaccacaatccagctcaacaacaagttgaactcatcaaggctctgacaccgaatgtgaaaacaatcggagctctttactcaagtagcgaagacaattcaaaaacacaggtcgaagaatttaaggcttatgctgaaaaagcaggtctgacagtggaaacatttgcagttccttcaacaaatgaaattgcctcaactgtcactgttatgactagcaaggtagatgctatttgggttccaattgataacaccattgcatcaggatttccaacggttgtctctagcaatcaaagttctaagaaaccaatttatcccagtgcgacagctatggtagaagtaggtggtttggcatcagttgtaattgaccaacatgaccttggtgtggcaacaggtaaaatgattgtgcaagtcttgaaaggtgcaaaaccagccgataccccagtcaatgtcttttcaactggtaagtcagtcatcaataaaaaaatagcacaagaactaggtattactattcctgagtctgttctcaaagaagcaggacaagtcatcgaa

SEQ ID NO: 2120 - protein, 344 aa, Streptococcus pneumoniae
  conserved hypothetical protein (ABC transporter); Cellular location: outside; Similar to strain R6 sequence 15903019 (0.E+01)
MLKEIKRRNRMKNKRLIGIIAALAVLVAGSLIYSSMNKSEAQNNKDEKKITKIGVLQFVSHPSLDLIYKGIQDGLAEEGYKDDQVKIDFMNSEGDQSKVATMSKQLVANGNDLVVGIATPAAQGLASATKDLPVIMAAITDPIGANLVKDLKKPGGNVTGVSDHNPAQQQVELIKALTPNVKTIGALYSSSEDNSKTQVEEFKAYAEKAGLTVETFAVPSTNEIASTVTVMTSKVDAIWVPIDNTIASGFPTVVSSNQSSKKPIYPSATAMVEVGGLASVVIDQHDLGVATGKMIVQVLKGAKPADTPVNVFSTGKSVINKKIAQELGITIPESVLKEAGQVIE

SEQ ID NO: 2121 - DNA, 864 bp, Streptococcus pneumoniae
atgattgtttccattatttctcaaggatttgtctgggctattctaggtctgggaatctttatgacatttaggattttaaactttccagatatgacgacagaaggttccttccctcttgggggagctgttgctgtcactttgataaccaaaggcgtgaacccatttttagcgacacttgttgctgtaggagcaggttgtttggctggaatggcagcaggccttctttatacaaaagggaagatcccaaccttgctctcagggattttggtgatgacttcttgtcactcaatcatgctcttgattatgggacgtgcgaatttaggcctgcttggaaccaagcaaattcaggatgttttgccttttgattcggatttgaatcaactcttgacaggtctcatctttgtgagtattgttattgctctcatgctctttttcttggacactaaactcggacaagcctatattgctacaggggataatcctgatatggctagaagtttcgggattcatactggacgcatggagctcatgggcttggtcttatcaaatggtgtgattgcccttgcaggtgccctcattgctcagcaagaaggttatgccgatgtgtctcgagggatcggggttatcgttgtggggcttgcaagtttgattattggagaagttattttcaagagtttgagcttggcagagcgtttggttactatcgttgtaggttctatcgcttatcaatttttagtgtgggcagttatcgcacttggctttaatacaagttaccttcgtttatacagtgccttgattttagcagtctgcctcatgattccaacatttaagcaaacaatcttgaaaggagccaagttaagcaaa

SEQ ID NO: 2122 - protein, 288 aa, Streptococcus pneumoniae
  conserved hypothetical protein (ABC transporter); Cellular location: membrane; Similar to strain R6 sequence 15903020 (e-157)
MIVSIISQGFVWAILGLGIFMTFRILNFPDMTTEGSFPLGGAVAVTLITKGVNPFLATLVAVGAGCLAGMAAGLLYTKGKIPTLLSGILVMTSCHSIMLLIMGRANLGLLGTKQIQDVLPFDSDLNQLLTGLIFVSIVIALMLFFLDTKLGQAYIATGDNPDMARSFGIHTGRMELMGLVLSNGVIALAGALIAQQEGYADVSRGIGVIVVGLASLIIGEVIFKSLSLAERLVTIVVGSIAYQFLVWAVIALGFNTSYLRLYSALILAVCLMIPTFKQTILKGAKLSK

SEQ ID NO: 2123 - DNA, 756 bp, Streptococcus pneumoniae
atgacagcaattgtagaattaaaaaatgcaaccaaaatcgttaaaaatggctttgatgaagaaaagattattttaaatgatgtttccttagaaatttttgaacgggactttatcacgattttgggcggaaatggtgctggaaaatcaactctctttaacactatagcagggaccttatcactaactagtggaactatccgtattttaggtgaagatctcactaagttttcacccgagaagcgtgccaagtacctgtctcgtgtcttccaagatccaaagatggggacagctccccgtatgacggtcgctgaaaatcttttaatcgccaagtttcgtggtgaaaagcgtggattgttaccacgacgcttgactagctataaggatgaatttcaggcaaccattgaaaaagtaggaaatggtcttgagaaacacttgaatacaccgattgagttcttatcaggtggacaaagacaggctttgagtctcttgatggcaaccttgaagcgacctgaattactcctgttagatgagcatactgctgccctggatccaaagactagtgttgctttgatggaattgacagatgaatttgttaagaaagatcagctaacagcccttatgattactcatcatatggaagatgctctcaaatacggcaatcgcttgattgtcatgaaagaaggacgaattatccaagatttaaaccaagaagaaaaagcaaaaatgaaaatctctgattattatcaactctttgaa

SEQ ID NO: 2124 - protein, 252 aa, Streptococcus pneumoniae
  ABC transporter, ATP-binding protein; Cellular location: cytoplasm; Similar to strain R6 sequence 15903021 (e-136)
MTAIVELKNATKIVKNGFDEEKIILNDVSLEIFERDFITILGGNGAGKSTLFNTIAGTLSLTSGTIRILGEDLTKFSPEKRAKYLSRVFQDPKMGTAPRMTVAENLLIAKFRGEKRGLLPRRLTSYKDEFQATIEKVGNGLEKHLNTPIEFLSGGQRQALSLLMATLKRPELLLLDEHTAALDPKTSVALMELTDEFVKKDQLTALMITHHMEDALKYGNRLIVMKEGRIIQDLNQEEKAKMKISDYYQLFE

SEQ ID NO: 2125 - DNA, 1773 bp, Streptococcus pneumoniae
atggaggtattgtgtatggttgacaaacaagtcattgaagaaatcaaaaacaatgccaacattgtggaagtcataggagatgtgatttctttacaaaaggcaggacggaactatctagggctctgtccttttcatggtgaaaaaacaccatctttcaatgttgtagaggacaagcagttttatcactgtttcggttgtggtcgctcaggtgatgtctttaagttcatcgaggagtaccaaggggttccctttatagaagcagtccaaatcttaggtcagcgtgttggaattgaggttgaaaaaccgctttatagtgagcagaagtcagcctcacctcaccaagctctttatgatatgcacgaagatgcagccaaattttaccatgctattctcatgacaacgactatgggcgaagaggccagaaattacctttatcagcgggggttgacagatgaagtgcttaaacatttttggattggtttagcacctccagaacgaaactatctctatcaacgtttgtctgatcagtatcgtgaagaggatttactggattcaggcctgttttatctctcggatgccaatcaatttgtagacacctttcacaatcgcattatgtttcccctgacaaatgaccaaggaaaggtcattgccttctcaggtcgtatctggcaaaaaacggattcacaaacttctaagtataaaaacagccgatcgactgcaatttttaacaaaagttacgaattatatcatatggatagggcaaaaagatcttctggaaaagctagtgagatttacctgatggaaggattcatggatgttattgcagcctatcgggctggaatcgaaaatgctgtggcgtcgatgggaacagccttgagtcgagagcatgttgagcatctgaaaaggttaaccaagaaattggttcttgtttacgatggagataaggctgggcaagccgcgacattgaaagcattggatgaaattggtgatatgcctgtgcaaatcgtcagcatgcctgataacttggatcctgatgagtatctacaaaaaaatggtccagaagacttggcctatctattaacgaaaactcgtattagtccgattgagttctacattcatcagtacaaacctgaaaacagtgaaaatctgcaggctcagattgagtttcttgaaaaaatagctcccttgattgttcaagaaaagtccatcgctgctcaaaacagctatattcatattttagctgacagtctggcgtcctttgattatacccagattgagcagattgttaatgagagtcgtcaggtgcaaaggcagaatcgcatggaaggaatttccagaccgacgccaatcaccatgcctgtcaccaagcagttatcggctattatgagggcagaagcccatctactctatcggatgatggaatcccctcttgttttgaacgattaccgtttgcgagaagactttgcatttgctacacctgaatttcaggtcttatatgacttgcttggccagtatggaaatcttcctccagaagttttagcagagcagacagaggaagttgaaagagcttggtaccaagttttagctcaggatttgcctgctgagatatcgccgcaggaacttagtgaagtagagatgactcgaaacaaggctctcttgaatcaggacaatatgagaatcaaaaagaaggtgcaggaagctagccatgtaggagatacagatacagccctagaagaattggaacgtttaatttcccaaaagagaagaatggag

SEQ ID NO: 2126 - protein, 591 aa, Streptococcus pneumoniae
  DNA primase (dnaG); Cellular location: cytoplasm; Similar to strain R6 sequence 15903022 (0.E+01)
MEVLCMVDKQVIEEIKNNANIVEVIGDVISLQKAGRNYLGLCPFHGEKTPSFNVVEDKQFYHCFGCGRSGDVFKFIEEYQGVPFIEAVQILGQRVGIEVEKPLYSEQKSASPHQALYDMHEDAAKFYHAILMTTTMGEEARNYLYQRGLTDEVLKHFWIGLAPPERNYLYQRLSDQYREEDLLDSGLFYLSDANQFVDTFHNRIMFPLTNDQGKVIAFSGRIWQKTDSQTSKYKNSRSTAIFNKSYELYHMDRAKRSSGKASEIYLMEGFMDVIAAYRAGIENAVASMGTALSREHVEHLKRLTKKLVLVYDGDKAGQAATLKALDEIGDMPVQIVSMPDNLDPDEYLQKNGPEDLAYLLTKTRISPIEFYIHQYKPENSENLQAQIEFLEKIAPLIVQEKSIAAQNSYIHILADSLASFDYTQIEQIVNESRQVQRQNRMEGISRPTPITMPVTKQLSAIMRAEAHLLYRMMESPLVLNDYRLREDFAFATPEFQVLYDLLGQYGNLPPEVLAEQTEEVERAWYQVLAQDLPAEISPQELSEVEMTRNKALLNQDNMRIKKKVQEASHVGDTDTALEELERLISQKRRME

SEQ ID NO: 2127 - DNA, 1107 bp, Streptococcus pneumoniae
atggcaacaaaacaaaaagaagtaacaacatttgacgtacaggtagcagaatttatccgtaatcataagcaaaaagggacagcaacagatgatgaaatcaatgcaagtctggttattccttttaccttggacgctgatgggattgaagatctcttgcaacggattcaggatgcaggcatttctatcacagataacgaaggaaatccaagtgcgcgtgttctcagcaatgaagaagaaccagaactcagcgatgaggacttgattgggtcaacttctgctaaggtcaatgaccctgtccgtatgtacttgaaagaaataggggtcgttcctctcttgaccaatgaagaggagaaagagttggcactggctgttgaagctggtgatatcgaagccaaacaacgtcttgcggaagccaatcttcgtttggttgtttccattgccaaacgctatgtcggtcgtggtatgcagttccttgacttgattcaagaaggaaatatgggcttgatgaaggcggttgacaagtttgactattctaaagggttcaagttttcaacttatgcaacttggtggattcgtcaggctatcactcgtgctattgcggaccaagctcgtaccatccgtatcccagttcacatggttgaaactatcaataaattggttcgtgaacagcggaatctccttcaagaattggggcaagatccgacaccagaacagattgctgaacgaatggatatgacacctgataaggttcgtgaaatcttgaagattgcccaagaaccagtatctcttgaaactcctatcggtgaagaggacgatagccaccttggagactttatcgaagatgaagtgattgaaaatccagtggattatacgactcgtatcgtcttgcgtgagcaattggatgaaatcttagatactcttacagaccgtgaagaaaatgttctgcgtctacgttttggactagatgatggaaaaatgcgcacacttgaagatgtggggaaagtctttaacgtaactcgtgagcgtatccgtcagattgaagcaaaggctttgagaaaactacgccaaccaagtcgtagcaaaccgcttcgtgattttattgaagac

SEQ ID NO: 2128 - protein, 369 aa, Streptococcus pneumoniae
  RNA polymerase sigma-70 factor (rpoD); Cellular location: cytoplasm; Similar to strain R6 sequence 15903023 (0.E+01)
MATKQKEVTTFDVQVAEFIRNHKQKGTATDDEINASLVIPFTLDADGIEDLLQRIQDAGISITDNEGNPSARVLSNEEEPELSDEDLIGSTSAKVNDPVRMYLKEIGVVPLLTNEEEKELALAVEAGDIEAKQRLAEANLRLVVSIAKRYVGRGMQFLDLIQEGNMGLMKAVDKFDYSKGFKFSTYATWWIRQAITRAIADQARTIRIPVHMVETINKLVREQRNLLQELGQDPTPEQIAERMDMTPDKVREILKIAQEPVSLETPIGEEDDSHLGDFIEDEVIENPVDYTTRIVLREQLDEILDTLTDREENVLRLRFGLDDGKMRTLEDVGKVFNVTRERIRQIEAKALRKLRQPSRSKPLRDFIED

SEQ ID NO: 2129 - DNA, 327 bp, Streptococcus pneumoniae
atggcttatacagaagagcaaattgaaaacatcaaaacacggattttaacagccttggaagaagtcatcgaccctgagttgggaatcgatattgtcaatcttggtttgatctatgagattcgttttgacggtgacacagggcaaacagagattgacatgactttgacaactatgggttgtcccttagcagaccttttgacagaccagatttatgatgctatgatagaggttccagaagtaacggatactgaggttaaattagtctggtatccagcctggacagttgaaaaaatgagtcgctatgcccgcattgccctaggcattaag

SEQ ID NO: 2130 - protein, 109 aa, Streptococcus pneumoniae
  conserved hypothetical protein; Cellular location: cytoplasm; Similar to strain R6 sequence 15903024 (3.E-59)
MAYTEEQIENIKTRILTALEEVIDPELGIDIVNLGLIYEIRFDGDTGQTEIDMTLTTMGCPLADLLTDQIYDAMIEVPEVTDTEVKLVWYPAWTVEKMSRYARIALGIK

SEQ ID NO: 2131 - DNA, 1014 bp, Streptococcus pneumoniae
atgttgagttcaagtgagaaagtagcaggacagggagtttcaggtgcttaccgtgaattagttcgtcttcttcaccgtgctgccaaggaccaattgattgttacagaaaatcttccaatcgaggcagatgtgactcactttcatacgattgattttccctattatttatcaaccttccaaaagaaacgctcagggagaaagattggctatgtgcatttcttgccagctacacttgagggaagtttgaaaattccatttttcttaaagggaattgtgaaacgctatgtattttctttttacaaccggatggagcacttggttgtggtcaatcctatgtttattgaggatttggtagcagctggtattccacgtgaaaaagtgacctatattcctaactttgtcaacaaggaaaaatggcatcctctaccacaagaagaggtagtcagactgcgcacagatcttggtcttagtgacaatcagtttatcgtagtaggtgctgggcaagttcagaaacgtaaagggattgatgactttatccgtctggctgaggaattgcctcagattacctttatctgggctggtggcttctcttttggtggtatgacagatggttatgaacactataagaaaattatggaaaatccccctaaaaatttgatttttccaggcattgtatcgccagagcggatgcgcgaattgtatgctctagcggatcttttcttgttgcctagttacaatgagctctttcctatgactattttagaagctgcgagttgtgaggctcctattatgttgcgtgatttagatctctataaggtgattttggagggaaattatcgggcgacagcgggtagagaagagatgaaagaggctattttggaatatcaagcaaatcctgctgtcttaaaagatctcaaagaaaaggctaagaatatttccagagagtattctgaagagcatctgttacaaatctggttggacttttatgagaaacaagccgctttagggagaaag

SEQ ID NO: 2132 - protein, 338 aa, Streptococcus pneumoniae
  glycosyl transferase CpoA (cpoA); Cellular location: membrane; Similar to strain R6 sequence 15903025 (0.E+01)
MLSSSEKVAGQGVSGAYRELVRLLHRAAKDQLIVTENLPIEADVTHFHTIDFPYYLSTFQKKRSGRKIGYVHFLPATLEGSLKIPFFLKGIVKRYVFSFYNRMEHLVVVNPMFIEDLVAAGIPREKVTYIPNFVNKEKWHPLPQEEVVRLRTDLGLSDNQFIVVGAGQVQKRKGIDDFIRLAEELPQITFIWAGGFSFGGMTDGYEHYKKIMENPPKNLIFPGIVSPERMRELYALADLFLLPSYNELFPMTILEAASCEAPIMLRDLDLYKVILEGNYRATAGREEMKEAILEYQANPAVLKDLKEKAKNISREYSEEHLLQIWLDFYEKQAALGRK

SEQ ID NO: 2133 - DNA, 1323 bp, Streptococcus pneumoniae
atgcgaattggtttatttacagatacctattttcctcaggtttctggtgttgcgaccagtattcgaaccttgaaaacagaacttgaaaagcagggacatgctgtttttatctttacgacgacagataaggatgtcaatcgctacgaagattggcaaattatccgcattccaagtgttcctttctttgcttttaaggatcgtcgctttgcctaccgaggttttagcaaggcacttgaaattgctaaacagtatcagctagatattatccatactcagacagaattttctcttggcctgttggggatttggattgcgcgtgaattgaaaattccagtcatccatacctatcacacccagtatgaagactatgtccattatattgctaaggggatgttgatccggccgagtatggtcaagtatctggttagaggtttcctgcatgatgtggatggggttatttgccctagtgagattgtccgtgacttgctatctgattataaggtcaaggttgaaaaacgggtcattcctactgggattgaattagccaagtttgagcgtccggaaatcaagcaggaaaatttgaaagaactgcgtagtaaactagggattcaagatggtgaaaagacgttgcttagtctttcgagaatctcctatgaaaaaaatattcaagcagttttagcagcctttgctgatgttctgaaagaggaagacaaggttaaactggtagtagctggggatggcccttatctgaatgacctcaaagagcaagcccagaacctagagattcaagactcagtcatctttacagggatgattgctcctagtgagacggctctttactataaagcggcggatttcttcatttcggcatcgacaagcgaaacgcaaggtttgacctacttggaaagcttagccagtggaacacctgtcattgctcacggaaatccttatttgaacaacctcatcagtgataaaatgtttggaaccttgtactatggagaacatgatttggctggtgctattttggaagccctgattgcaacaccagacatgaacgagcataccttatcagagaaattgtatgagatttcagctgagaactttgggaaacgagtgcatgagttttatctggatgccattatttcaaataacttccagaaagatttggctaaagatgatacggtcagtcagcgtatctttaagacagttttgtatcttcagcaacaggtggttgctgtacctgtaaaaggatctagacgcatgttgaaggcttcaaaaacacagttgatcagtatgagagactattggaaagaccatgaagaa

SEQ ID NO: 2134 - protein, 441 aa, Streptococcus pneumoniae
  glycosyl transferase, group 1; Cellular location: cytoplasm; Similar to strain R6 sequence 15903026 (0.E+01)
MRIGLFTDTYFPQVSGVATSIRTLKTELEKQGHAVFIFTTTDKDVNRYEDWQIIRIPSVPFFAFKDRRFAYRGFSKALEIAKQYQLDIIHTQTEFSLGLLGIWIARELKIPVIHTYHTQYEDYVHYIAKGMLIRPSMVKYLVRGFLHDVDGVICPSEIVRDLLSDYKVKVEKRVIPTGIELAKFERPEIKQENLKELRSKLGIQDGEKTLLSLSRISYEKNIQAVLAAFADVLKEEDKVKLVVAGDGPYLNDLKEQAQNLEIQDSVIFTGMIAPSETALYYKAADFFISASTSETQGLTYLESLASGTPVIAHGNPYLNNLISDKMFGTLYYGEHDLAGAILEALIATPDMNEHTLSEKLYEISAENFGKRVHEFYLDAIISNNFQKDLAKDDTVSQRIFKTVLYLQQQVVAVPVKGSRRMLKASKTQLISMRDYWKDHEE

SEQ ID NO: 2135 - DNA, 174 bp, Streptococcus pneumoniae
atgagaagcggtcgtgataaaaagattgcgggtgtttgtgctggggtggcccattatctggatatggatccgactatcgttcaagtcatttggggtgttcttacttgctgttacggagctggaattgtagcttacattattttatggattatcgcaccagtagcaactgactat

SEQ ID NO: 2136 - protein, 58 aa, Streptococcus pneumoniae
  conserved domain protein; Cellular location: membrane; Similar to strain R6 sequence 15903027 (1.E-30)
MRSGRDKKIAGVCAGVAHYLDMDPTIVQVIWGVLTCCYGAGIVAYIILWIIAPVATDY

SEQ ID NO: 2137 - DNA, 132 bp, Streptococcus pneumoniae
atggcatttggagataatggaaatcgtaaaaaaactatgtttgagaaaataaccttgtttatcgtgattatcatgctagtagcaagtttattgggaatttttgcaactgcaattggtgccctcagtaatcta

SEQ ID NO: 2138 - protein, 44 aa, Streptococcus pneumoniae
  hypothetical protein; Cellular location: membrane
MAFGDNGNRKKTMFEKITLFIVIIMLVASLLGIFATAIGALSNL

SEQ ID NO: 2139 - DNA, 1308 bp, Streptococcus pneumoniae
atgagtatgtttttagatacagctaagattaaggtcaaggctggtaatggtggcgatggtatggttgcctttcgtcgtgaaaaatatgtccctaatggaggcccttggggtggtgatggtggtcgtggaggcaatgtggtcttcgttgtagacgaaggactacgtaccttgatggatttccgctacaatcgtcatttcaaggctgattctggtgaaaaagggatgaccaaagggatgcatggtcgtggtgctgaggaccttagagttcgagtaccacaaggtacgactgttcgtgatgcggagactggcaaggttttaacagatttgattgaacatgggcaagaatttatcgttgcccacggtggtcgtggtggacgtggaaatattcgtttcgcgacaccaaaaaatcctgcaccggaaatctctgaaaatggagaaccaggtcaggaacgtgagttacaattggaactaaaaatcttggcagatgtcggtttagtaggattcccatctgtagggaagtcaacacttttaagtgttattacctcagctaagcctaaaattggtgcctaccactttaccactattgtaccaaatttaggtatggttcgcacccaatcaggtgaatcctttgcagtagccgacttgccaggtttgattgaaggggctagtcaaggtgttggtttgggaactcagttcctccgtcacatcgagcgtacacgtgttatccttcacatcattgatatgtcagctagcgagggccgtgatccatatgaggactacctagctatcaataaagagctggagtcttacaatcttcgcctcatggagcgtccacagattattgtagctaataagatggacatgcctgagagtcaggaaaatcttgaagactttaagaaaaaattggctgaaaattatgatgaatttgaagagttaccagctatcttcccaatttctggattgaccaagcaaggtctggcaacacttttagatgctacagctgaattgttagacaagacaccagaatttttgctctacgacgagtccgatatggaagaagaagcttactatggatttgacgaagaagaaaaagcctttgaaattagtcgtgatgacgatgcgacatgggtactttctggtgaaaaactcatgaaactctttaatatgaccaactttgatcgtgatgaatctgtcatgaaatttgcccgtcagcttcgtggtatgggggttgatgaagcccttcgtgcgcgtggagctaaagatggggatttggtccgcattggtaaatttgagtttgaatttgtagac

SEQ ID NO: 2140 - protein, 436 aa, Streptococcus pneumoniae
  GTP-binding protein, GTP1/Obg family; Cellular location: cytoplasm; Similar to strain R6 sequence 15903028 (0.E+01)
MSMFLDTAKIKVKAGNGGDGMVAFRREKYVPNGGPWGGDGGRGGNVVFVVDEGLRTLMDFRYNRHFKADSGEKGMTKGMHGRGAEDLRVRVPQGTTVRDAETGKVLTDLIEHGQEFIVAHGGRGGRGNIRFATPKNPAPEISENGEPGQERELQLELKILADVGLVGFPSVGKSTLLSVITSAKPKIGAYHFTTIVPNLGMVRTQSGESFAVADLPGLIEGASQGVGLGTQFLRHIERTRVILHIIDMSASEGRDPYEDYLAINKELESYNLRLMERPQIIVANKMDMPESQENLEDFKKKLAENYDEFEELPAIFPISGLTKQGLATLLDATAELLDKTPEFLLYDESDMEEEAYYGFDEEEKAFEISRDDDATWVLSGEKLMKLFNMTNFDRDESVMKFARQLRGMGVDEALRARGAKDGDLVRIGKFEFEFVD

SEQ ID NO: 2141 - DNA, 156 bp, Streptococcus pneumoniae
atgggagataaaccgatatctttccgagatgcggatggtaattttgtttccgccgcagacgtttggaatgaaaagaaattggaagaactatttaatcgtctcaatccaaatcgtgccttgagattggcacgaactaaaaaggaaaatccatctcag

SEQ ID NO: 2142 - protein, 52 aa, Streptococcus pneumoniae
  hypothetical protein; Cellular location: cytoplasm; Similar to strain R6 sequence 15903029 (1.E-25)
MGDKPISFRDADGNFVSAADVWNEKKLEELFNRLNPNRALRLARTKKENPSQ

SEQ ID NO: 2143 - DNA, 123 bp, Streptococcus pneumoniae
atgaaaatcaaagatcaaactaggaaactagccgcaggttgctcaaaacactgttttgaggttgtagatggaactgacgtagtcagtatcctacacatacgacaaggcgatattgacgtgatt

SEQ ID NO: 2144 - protein, 41 aa, Streptococcus pneumoniae
  box element
MKIKDQTRKLAAGCSKHCFEVVDGTDVVSILHIRQGDIDVI

SEQ ID NO: 2145 - DNA, 1257 bp, Streptococcus pneumoniae
atgagaaaaattgttatcaatggtggattaccactgcaaggtgaaatcactattagtggtgctaaaaatagtgtcgttgccttaattccagctattatcttggctgatgatgtggtgactttggattgcgttccagatatttcggatgtagccagtcttgtcgaaatcatggaattgatgggagctactgttaagcgttatgacgatgtattggagattgacccaagaggtgttcaaaatattccaatgccttatggtaaaattaacagtcttcgtgcatcttactatttttatgggagcctcttaggccgttttggtgaagcgacagttggtctaccgggaggatgtgatcttggtcctcgtccgattgacttacaccttaaggcgtttgaagctatgggtgccactgctagctacgagggagataacatgaagttatctgctaaagatacaggacttcatggtgcaagtatttacatggatacggttagtgtgggagcaacgattaatacgatgattgctgcggttaaagcaaatggtcgtactattattgaaaatgcagcccgtgaacctgagattattgatgtagctactctcttgaataatatgggtgcccatatccgtggggcaggaactaatatcatcattattgatggtgttgaaagattacatgggacacgtcatcaggtgattccagaccgcattgaagctggaacatatatatctttagctgctgcagttggtaaaggaattcgtataaataatgttctttacgaacacctggaagggtttattgctaagttggaagaaatgggagtgagaatgactgtatctgaagacagcatttttgtcgaggaacagtctaatttgaaagcaatcaatattaagacagctccttacccaggctttgcaactgatttgcaacaaccgcttacccctcttttactaagagcgaatggtcgtggtacaattgtcgatacgatttacgaaaaacgtgtaaatcatgtttttgaactagcaaagatggatgcggatatttcgacaacaaatggtcatattttgtacacgggtggacgtgatttacgtggggccagtgttaaagcgaccgacttaagagctggggctgcactagtcattgctgggcttatggctgaaggtaaaactgaaattaccaatatcgagtttatcttacgtggttattctgatattatcgaaaaattacgtaatttaggagcggatattagacttgttgaggat

SEQ ID NO: 2146 - protein, 419 aa, Streptococcus pneumoniae
  UDP-N-acetylglucosamine 1-carboxyvinyltransferase (murA); Cellular location: membrane; Similar to strain R6 sequence 15903033 (0.E+01)
MRKIVINGGLPLQGEITISGAKNSVVALIPAIILADDVVTLDCVPDISDVASLVEIMELMGATVKRYDDVLEIDPRGVQNIPMPYGKINSLRASYYFYGSLLGRFGEATVGLPGGCDLGPRPIDLHLKAFEAMGATASYEGDNMKLSAKDTGLHGASIYMDTVSVGATINTMIAAVKANGRTIIENAAREPEIIDVATLLNNMGAHIRGAGTNIIIIDGVERLHGTRHQVIPDRIEAGTYISLAAAVGKGIRINNVLYEHLEGFIAKLEEMGVRMTVSEDSIFVEEQSNLKAINIKTAPYPGFATDLQQPLTPLLLRANGRGTIVDTIYEKRVNHVFELAKMDADISTTNGHILYTGGRDLRGASVKATDLRAGAALVIAGLMAEGKTEITNIEFILRGYSDIIEKLRNLGADIRLVED

SEQ ID NO: 2147 - DNA, 549 bp, Streptococcus pneumoniae
atgaatatttggaccaaattagcaatgttttctttttttgaaacggatcgcttgtatttgcgtcctttcttttttagtgatagtcaggacttccgcgagatagcttcaaatccagaaaatcttcaatttattttcccaacgcaggcaagtctggaagaaagtcaatatgcactggccaattactttatgaagtcccctttgggagtgtgggcaatttgtgaccagaaaaatcaacaaatgattggttctattaaatttgagaagttagatgaaatcaaaaaagaagctgagcttggctattttttgagaaaagatgcttggtcgcaaggatttatgacagaggttgttagaaaaatttgtcagctttcttttgaggaatttggcttaaaacaattatttatcattacccaccttgaaaataaagctagccaaagagttgctcttaagtctggatttagtttgttccgtcagtttaagggaagtgatcgttacacaagaaaaatgcgggattatcttgaatttcggtatgtaaaaggagagttcaatgag

SEQ ID NO: 2148 - protein, 183 aa, Streptococcus pneumoniae
  acetyltransferase, GNAT family; Cellular location: cytoplasm; Similar to strain R6 sequence 15903034 (e-103)
MNIWTKLAMFSFFETDRLYLRPFFFSDSQDFREIASNPENLQFIFPTQASLEESQYALANYFMKSPLGVWAICDQKNQQMIGSIKFEKLDEIKKEAELGYFLRKDAWSQGFMTEVVRKICQLSFEEFGLKQLFIITHLENKASQRVALKSGFSLFRQFKGSDRYTRKMRDYLEFRYVKGEFNE

SEQ ID NO: 2149 - DNA, 1275 bp, Streptococcus pneumoniae
atgagtaagcatcaggaaattctaagctatttggaggaattaccagtaggtaaaagggtcagtgttcgtagcatttcgaatcatctaggagttagtgatggaacagcctatcgggctattaaagaagctgaaaaccgtggaattgtggagacccgtcctagaagtggaacaattcgtgttaaatcccagaaagttgctatagagagattaacgtttgctgaaattgcagaagtgacttcttctgaggttctggctgggcaagaaggtttagagagagaatttagtaagttttcaattggtgccatgactgaacaaaatatcttgtcttaccttcatgatggggggctcttgattgtcggagaccgaacccgtattcagttgctagccttggaaaatgaaaatgcagttctggttacagggggatttcaggttcatgatgatgtgcttaaactggccaatcaaaaagggattcctgttctaagaagtaagcatgatacctttaccgtcgcgaccatgatcaataaagccttgtcaaatgtccaaatcaagactgatattctgacagttgagaaactttatcgccctagtcatgagtatggttttctgagagagacagatacagttaaagattatttggacttggttcgtaagaatcgtagcagccgtttccctgttatcaatcaacatcaggtcgttgttggtgttgtaaccatgagagacgctggtgataaatcaccaagcacgacaattgataaggttatgtctcgtagtctatttttggttggattatcgacaaatattgccaatgtgagtcaacggatgatcgcagaagactttgaaatggtaccagttgttcgaagcaatcaaactttgcttggcgttgtgacgcgacgagatgtcatggagaagatgagccgttcccaagtttcggctctaccaactttttctgagcagattggacaaaagctctcttatcaccatgatgaagtagtcattacagtggaaccctttatgctagaaaaaaatggagttttggctaatggtgtattggcagaaattctgacccacatgacccaagatttagttgttaatagtggtcgcaatctcattatcgagcagatgctgatctactttttgcaggctgttcagatagatgatatattgcgcattcaggcacggattattcatcatacgagacggtcagctataattgattacgatatttatcatggtcaccagattgtttcaaaagcaaatgtgactgttaaaattaat

SEQ ID NO: 2150 - protein, 425 aa, Streptococcus pneumoniae
  conserved hypothetical protein; Cellular location: cytoplasm; Similar to strain R6 sequence 15903035 (0.E+01)
MSKHQEILSYLEELPVGKRVSVRSISNHLGVSDGTAYRAIKEAENRGIVETRPRSGTIRVKSQKVAIERLTFAEIAEVTSSEVLAGQEGLEREFSKFSIGAMTEQNILSYLHDGGLLIVGDRTRIQLLALENENAVLVTGGFQVHDDVLKLANQKGIPVLRSKHDTFTVATMINKALSNVQIKTDILTVEKLYRPSHEYGFLRETDTVKDYLDLVRKNRSSRFPVINQHQVVVGVVTMRDAGDKSPSTTIDKVMSRSLFLVGLSTNIANVSQRMIAEDFEMVPVVRSNQTLLGVVTRRDVMEKMSRSQVSALPTFSEQIGQKLSYHHDEVVITVEPFMLEKNGVLANGVLAEILTHMTQDLVVNSGRNLIIEQMLIYFLQAVQIDDILRIQARIIHHTRRSAIIDYDIYHGHQIVSKANVTVKIN

SEQ ID NO: 2151 - DNA, 858 bp, Streptococcus pneumoniae
atgataacattaaaatcagctcgtgaaatcgaagctatggacaaggctggtgattttctagcaagtattcatataggcttacgtgatttgattaagccaggcgtagatatgtgggaagttgaagaatatgtccgccgtcgttgtaaagaagaaaatttccttccacttcagattggggttgacggtgccatgatggactatccttatgctacctgttgctctcttaacgatgaagtggctcacgctttccctcgtcattatatcttgaaagatggtgatttgctcaaagttgatatggttttgggaggtcccattgctaaatctgacctaaatgtctcaaaattaaacttcaacaatgttgaacaaatgaaaaaatacactcagagctattctggtggtttagcagactcatgttgggcttatgctgttggtacaccgtccgaagaagtcaaaaacttgatggatgtaaccaaagaagctatgtacaagggtattgagcaagctgttgttggaaatcgtatcggtgatatcggtgcggctattcaagaatacgctgaaagtcgtggttacggtgtagtgcgtgatttggttggtcatggtgttggcccaactatgcacgaagaaccaatggttcctaactatggtattgcaggtcgtggactccgtcttcgtgaaggaatggtcttaaccattgaaccaatgatcaatacaggcgattgggaaattgatacagatatgaaaactggttgggcgcataagaccattgacggtggattgtcatgtcagtatgaacaccaatttgtcattacgaaagatggacctgttatcttgactagccaaggtgaagaaggaacttat

SEQ ID NO: 2152 - protein, 286 aa, Streptococcus pneumoniae
  methionine aminopeptidase, type I (map); Cellular location: cytoplasm; Similar to strain R6 sequence 15903036 (e-170)
MITLKSAREIEAMDKAGDFLASIHIGLRDLIKPGVDMWEVEEYVRRRCKEENFLPLQIGVDGAMMDYPYATCCSLNDEVAHAFPRHYILKDGDLLKVDMVLGGPIAKSDLNVSKLNFNNVEQMKKYTQSYSGGLADSCWAYAVGTPSEEVKNLMDVTKEAMYKGIEQAVVGNRIGDIGAAIQEYAESRGYGVVRDLVGHGVGPTMHEEPMVPNYGIAGRGLRLREGMVLTIEPMINTGDWEIDTDMKTGWAHKTIDGGLSCQYEHQFVITKDGPVILTSQGEEGTY

SEQ ID NO: 2153 - DNA, 386 bp, Streptococcus pneumoniae
atgaatgatgaagcaagtaaacaactaactgatgcacgatttaagcgtcttgttggtgttcagcgtaccacttttgaagagatgttagctgtattaaaaacagcttatcaacttaaacacgcaaaaggtggacgaaaacctaaattaagcctagaagaccttcttatgcccactcttcaatagtgcgagaatatcgaacttatgaagaaattgcggctgattttggtattcacgaaagcaactttatccgtcggagccaatgggttgaaataactcttgttcaaagtggttttacggtttcaagaactcctctcagttctgaggacacggtaatgattgatgcgacggaagtaaaaatcaatcgccctaaaaaaacaattagcgaa

SEQ ID NO: 2154 - protein, 60 aa, Streptococcus pneumoniae
  IS1381, transposase OrfA FRAMESHIFT
MNDEASKQLTDARFKRLVGVQRTTFEEMLAVLKTAYQLKHAKGGRKPKLSLEDLLMPTLQ

SEQ ID NO: 2155 - DNA, 204 bp, Streptococcus pneumoniae
gtgcgagaatatcgaacttatgaagaaattgcggctgattttggtattcacgaaagcaactttatccgtcggagccaatgggttgaaataactcttgttcaaagtggttttacggtttcaagaactcctctcagttctgaggacacggtaatgattgatgcgacggaagtaaaaatcaatcgccctaaaaaaacaattagcgaa

SEQ ID NO: 2156 - protein, 68 aa, Streptococcus pneumoniae
  transposase, putative, FRAMESHIFT
MREYRTYEEIAADFGIHESNFIRRSQWVEITLVQSGFTVSRTPLSSEDTVMIDATEVKINRPKKTISE

SEQ ID NO: 2157 - DNA, 387 bp, Streptococcus pneumoniae
atgaaggctcaagcgattgtcacaagtcaagggagaattgtttctttggatatcgctgtgaactatagtcatgatatgaagttgttcaaaatgagtcgtagaaatatcgaacaagctggtaaaatcttggctgacagtggttatcaagggctcatgaagatatatcctcaagcacaaactccacgtaaatccagcaaactcaagccgctaacagctgaagataaagcctataaccatgcgctatctaaggaaagaagcaaggttgagaacatctttgccaaagtaaaaacgtttaaaatattttcaacaacctatcgaaatcatcgtaaacgcttcggattacgaatgaatttgagtgctggtattatcaatcatgaactaggattc

SEQ ID NO: 2158 - protein, 129 aa, Streptococcus pneumoniae
  IS1381, transposase OrfB FRAMESHIFT; Cellular location: cytoplasm; Similar to strain R6 sequence 15903988 (9.E-69)
MKAQAIVTSQGRIVSLDIAVNYSHDMKLFKMSRRNIEQAGKILADSGYQGLMKIYPQAQTPRKSSKLKPLTAEDKAYNHALSKERSKVENIFAKVKTFKIFSTTYRNHRKRFGLRMNLSAGIINHELGF

SEQ ID NO: 2159 - DNA, 2289 bp, Streptococcus pneumoniae
atgaacgcattattaaatggaatgaatgaccgtcaggctgaggcggtgcaaacgacagaaggtcccttgctaatcatggcaggggctggttctggaaagactcgtgttttgacccaccgtatcgcttatttgattgatgaaaagctggtcaatccttggaatatcttggccattacctttaccaacaaggctgcgcgtgagatgaaagagcgtgcttatagcctcaatccagcgactcaggactgtctgattgcgaccttccactccatgtgtgtgcgtattttgcgtcgcgatgcggaccatattggctacaatcgtaattttacaattgtggatcctggtgaacagcgaacgctcatgaaacgtattctcaaacagttgaacttggaccctaaaaaatggaatgaacgaactattttggggaccatttccaatgctaagaatgatttgattgatgatgttgcttatgctgcccaagctggcgatatgtatacgcaaattgtggcccagtgttatacagcctatcaaaaagaacttcgtcagtctgaatccgttgactttgatgatttgattatgctgaccttgcgtctctttgatcaaaatcctgatgttttgacctactaccagcaaaaattccaatacatccacgttgatgagtaccaagataccaaccacgctcagtaccaattggtcaaactcttggcttcccgttttaaaaatatctgtgtggttggggatgcggaccagtctatctacggttggcgtggtgctgatatgcagaatatcttggactttgaaaaggattaccccaaagccaaggttgttttgttggaggaaaattaccgctcaaccaaaaccattctccaagcggccaacgaggttattaaaaataataaaaatcgccgtcctaaaaatctctggactcaaaacgctgatggggagcaaatcgtttactatcgtgccgatgatgagctggatgaggctgtatttgtagccagaaccatcgatgaacttagtcgcagtcaaaacttccttcataaggattttgcagttctctatcggactaatgcccagtcccgtacaattgaggaagccctgctcaagtctaacattccttataccatggttggcggaaccaaattctacagccgtaaggaaattcgcgatattattgcttatctcaaccttattgctaatttgagtgacaatattagttttgagcgtattatcaacgagcctaaacgtggaattggtctaggtacagttgagaaaatccgtgattttgcaaatttgcaaaatatgtctatgctggatgcttctgctaatattatgttgtctggtatcaagggtaaggcagcccaatctatctgggattttgccaatatgatgcttgatttgcgggagcagctagaccacttaagcattacagagttggttgagtccgtcctagaaaaaacaggttatgtcgatattcttaactcccaagcgactctagaaagcaaggcacgggttgaaaatatcgaagagtttctttctgttacgaagaactttgatgacaccacggatgtgacagaagaggaaactggtctggacaaactgagtcgtttcttaaatgacttggctttgattgccgacacagattcaggtagtcaggagacatcagaagtgaccttgatgaccctgcatgctgccaaaggtctcgaatttccagttgtctttttgattgggatggaagaaaatgtctttccacttagtcgtgcgactgaagattcagatgaattagaagaagagcgccgtctagcctatgtaggtatcacgcgtgcagagaaaattctctatctgaccaatgccaactcacgcttgctttttggtcgtaccaattataaccgtccgactcgttttattaacgaaatcagttcagacttgcttgagtatcaaggtctggctcgtcctgcaaatacaagctttaaggcatcatatagcagtggtagtatttcctttggtcaaggtatgagtttggctcaggctcttcaagaccgtaaacgcggtgctgccccaaaatcaatccagtcaagcggtcttccatttggtcaatttacagctggcgcaaaaccagcatctagcgaggcaaattggtccattggtgatattgctctccacaagaaatggggagagggaaccgttctggaagtttcaggtagcggtgctaggcaggaattgaaaatcaatttcccagaagtaggtttgaaaaaacttttagccagtgtggctccaattgagaaaaaaatc

SEQ ID NO: 2160 - protein, 763 aa, Streptococcus pneumoniae
  ATP-dependent DNA helicase PcrA (pcrA); Cellular location: cytoplasm; Similar to strain R6 sequence 15903039 (0.E+01)
MNALLNGMNDRQAEAVQTTEGPLLIMAGAGSGKTRVLTHRIAYLIDEKLVNPWNILAITFTNKAAREMKERAYSLNPATQDCLIATFHSMCVRILRRDADHIGYNRNFTIVDPGEQRTLMKRILKQLNLDPKKWNERTILGTISNAKNDLIDDVAYAAQAGDMYTQIVAQCYTAYQKELRQSESVDFDDLIMLTLRLFDQNPDVLTYYQQKFQYIHVDEYQDTNHAQYQLVKLLASRFKNICVVGDADQSIYGWRGADMQNILDFEKDYPKAKVVLLEENYRSTKTILQAANEVIKNNKNRRPKNLWTQNADGEQIVYYRADDELDEAVFVARTIDELSRSQNFLHKDFAVLYRTNAQSRTIEEALLKSNIPYTMVGGTKFYSRKEIRDIIAYLNLIANLSDNISFERIINEPKRGIGLGTVEKIRDFANLQNMSMLDASANIMLSGIKGKAAQSIWDFANMMLDLREQLDHLSITELVESVLEKTGYVDILNSQATLESKARVENIEEFLSVTKNFDDTTDVTEEETGLDKLSRFLNDLALIADTDSGSQETSEVTLMTLHAAKGLEFPVVFLIGMEENVFPLSRATEDSDELEEERRLAYVGITRAEKILYLTNANSRLLFGRTNYNRPTRFINEISSDLLEYQGLARPANTSFKASYSSGSISFGQGMSLAQALQDRKRGAAPKSIQSSGLPFGQFTAGAKPASSEANWSIGDIALHKKWGEGTVLEVSGSGARQELKINFPEVGLKKLLASVAPIEKKI

SEQ ID NO: 2161 - DNA, 693 bp, Streptococcus pneumoniae
gtgaggaggatttttatgtacagtatttcattccaagaagattcactattaccaagagaaaggctggccaaggaaggagttgaagcgcttagtaaccaagagttgctagctattttactcaggacaggaacacgtcaagctagcgtttttgaaattgcccaaaaagtcttgaacaatctttcaagcctaacggatttgaaaaaaatgaccctgcaggaattgcagagtttgtctggtattgggcgtgttaaggccatagaattacaagctatgattgaactggggcatcgtattcacaaacacgagactcttgaaatggaaagtattctcagcagtcaaaagttggccaagaagatgcagcaggaattaggggataaaaaacaagagcacctggtggcactctatctcaatactcaaaatcaaatcatccatcagcagaccatttttatcgggtctgtaactcgtagtatcgctgaaccgcgagagattcttcactatgcaatcaagcatatggcgacttctcttatcttggtccacaatcatccttcaggagcggtagcgcctagccaaaatgatgatcatgtcactaaacttgttaaagaagcctgcgaattgatggggattgttctcttggaccatttgattgtctctcattctaattactttagttatcgtgaaaagacagatttaatc

SEQ ID NO: 2162 - protein, 231 aa, Streptococcus pneumoniae
  DNA repair protein RadC (radC); Cellular location: cytoplasm; Similar to strain R6 sequence 15903040 (e-123)
MRRIFMYSISFQEDSLLPRERLAKEGVEALSNQELLAILLRTGTRQASVFEIAQKVLNNLSSLTDLKKMTLQELQSLSGIGRVKAIELQAMIELGHRIHKHETLEMESILSSQKLAKKMQQELGDKKQEHLVALYLNTQNQIIHQQTIFIGSVTRSIAEPREILHYAIKHMATSLILVHNHPSGAVAPSQNDDHVTKLVKEACELMGIVLLDHLIVSHSNYFSYREKTDLI

SEQ ID NO: 2163 - DNA, 687 bp, Streptococcus pneumoniae
atgaaaaaaccagttattgggattacaggaaacgaaaaaactcatccagatgatgacatcatgatgagctacgcagcaaaaggctttgttgaaggcgttaaagatgctggagggattcccatcatcctaccgattggtgatcaagaaatggcctgccactatatcagtttgattgacaagctcatcttgacaggtgggcaaaatgtcgatccaaaattttatggcgaacccaaaaccattgatagtgatgactatcaccttcaaagagatatcttcgaactggccctcatcaaggaagctattaaacagaaaaagcccattttctctgtctgccgtggtacccaactctttaacgttgccatgggtggaactttgtaccaagatatcgaagaccattggcaggattcttctgttgagtacacaactcaacgcttggtaacagaaccagataccgttctccaagaaatctatggagaaatctctcatatcaactccttccaccaccagagcatcaaggacttagcaccaaatttaaaagttgtggctcatgatcctaaagatggtatcattgaggctgtcatgagtacggatgatgtcgcctttctcggtgtccaatggcatccagaacttctttttgaaaatcgtcccaaagataaaaaactctttgactatgtcgttaatgaactt

SEQ ID NO: 2164 - protein, 229 aa, Streptococcus pneumoniae
  glutamine amidotransferase, class I; Cellular location: cytoplasm; Similar to strain R6 sequence 15903041 (e-133)
MKKPVIGITGNEKTHPDDDIMMSYAAKGFVEGVKDAGGIPIILPIGDQEMACHYISLIDKLILTGGQNVDPKFYGEPKTIDSDDYHLQRDIFELALIKEAIKQKKPIFSVCRGTQLFNVAMGGTLYQDIEDHWQDSSVEYTTQRLVTEPDTVLQEIYGEISHINSFHHQSIKDLAPNLKVVAHDPKDGIIEAVMSTDDVAFLGVQWHPELLFENRPKDKKLFDYVVNEL

SEQ ID NO: 2165 - DNA, 639 bp, Streptococcus pneumoniae
gtgaaagataaacagtttgctattccaaaagctacagcaaaaagactctctctctactatcgaatttttaagagatttcatgcagaaaagattgaacgtgccaactctaagcaaattgcagaggctatcggtattgattcagcgaccgtacgtcgtgatttttcctattttggtgaacttggtcgtcgtggttttggctatgatgtcaaaaaactaatgacattttttgccgatttgctcaatgacaactctattaccaatgtcatgctggttggtattggaaatatgggccatgcccttctccactaccgcttccacgaacgtaacaagatgaagattatcatggcctttgacctagacgaccatcctgaagtcggtacccaaactcctgacgggattcccatttacgggatttctcagatcaaggataaaatcaaggatgctgatgtgaagactgctatcctaactgttcccagcgtcaagtcacaagaggttgctaatctcttggttgatgctggtgtgaaaggaattctcagtttttcaccagtccatctgcatttaccaaaagacgtggtcgttcagtatgtcgatttgacaagtgaactccaaaccctcctctacttcatgcgaaaagaggat

SEQ ID NO: 2166 - protein, 213 aa, Streptococcus pneumoniae
  conserved hypothetical protein; Cellular location: cytoplasm; Similar to strain R6 sequence 15903042 (e-119)
MKDKQFAIPKATAKRLSLYYRIFKRFHAEKIERANSKQIAEAIGIDSATVRRDFSYFGELGRRGFGYDVKKLMTFFADLLNDNSITNVMLVGIGNMGHALLHYRFHERNKMKIIMAFDLDDHPEVGTQTPDGIPIYGISQIKDKIKDADVKTAILTVPSVKSQEVANLLVDAGVKGILSFSPVHLHLPKDVVVQYVDLTSELQTLLYFMRKED

SEQ ID NO: 2167 - DNA, 90 bp, Streptococcus pneumoniae
atgcagattttttacatcaaaactaagatttttcttagttttttcttatttttgttgattttttcacaatgtttctataaaatagaagaa

SEQ ID NO: 2168 - protein, 30 aa, Streptococcus pneumoniae
  hypothetical protein; Cellular location: membrane
MQIFYIKTKIFLSFFLFLLIFSQCFYKIEE

SEQ ID NO: 2169 - DNA, 249 bp, Streptococcus pneumoniae
gtggtgtctttacaaaatcggaaagatagagccaaaatgtttgaactgacctataaggactgctatcatgtagagcgtactctcaagtatgaggatcatgaggctctcatgttgactttgtcaggatgtgtaaccttaccagatacactttatgtgacttctctgacttttaggggcaaaaaagtttatcaggggctggtcggagacctctaccgttttctatctcatgcagattttttacatcaaaac

SEQ ID NO: 2170 - protein, 83 aa, Streptococcus pneumoniae
  hypothetical protein; Cellular location: cytoplasm; Similar to strain R6 sequence 15903043 (4.E-45)
MVSLQNRKDRAKMFELTYKDCYHVERTLKYEDHEALMLTLSGCVTLPDTLYVTSLTFRGKKVYQGLVGDLYRFLSHADFLHQN

SEQ ID NO: 2171 - DNA, 345 bp, Streptococcus pneumoniae
atggcatttgaaaaaatcattcagttaaaaaattgtcgttacgattacactcttagcccttctgttaaaaaattcaccctcaaagataacaccttttttgaaactaaggttggtaactatgaactgactcgccttttggaaaaagtgccaaacagcggtgaaggcttccaactcaaaatcatcattaacaaggaacttacaggggctaaaatcaatatcactgacaagtttggccttcgtctagttgatattttcaaatcagaagaccaccatattcatcaggaaaaattctacttcctcatggatagcttggtagaacgtggtgtctttacaaaatcggaaaga

SEQ ID NO: 2172 - protein, 115 aa, Streptococcus pneumoniae
  hypothetical protein; Cellular location: cytoplasm; Similar to strain R6 sequence 15903044 (3.E-63)
MAFEKIIQLKNCRYDYTLSPSVKKFTLKDNTFFETKVGNYELTRLLEKVPNSGEGFQLKIIINKELTGAKINITDKFGLRLVDIFKSEDHHIHQEKFYFLMDSLVERGVFTKSER

SEQ ID NO: 2173 - DNA, 1080 bp, Streptococcus pneumoniae
atgtcagcagttgctatttcagctatgaccaaggttatgcaagaaacccacggaaatccttctagtattcatggtcatggtcgtcaagctggcaaactcttgcgagaagcccgtcaggaactagcccagttactaaggacaaaacctcaacatatctttttcacttctggtgggactgaaggcaataatactaccatcattggctactgtcttcgtcaccaagaacaaggaaaacatatcatcacaactgccatcgagcaccatgctgtccttgaaacaattgattacttggttcaacactttgggtttgaagcaaccattatccagccagaaaatcaagaaatcacagcccagcaaattcaaaaggctttacgtgacgatacgattttggtttctaccatgtttgtcaataatgagacaggaaacctactgcccatcgctgaaattggccaaatactcaagcaacaccctgctgcctatcatgttgatgcagttcaggctattggtaaaatcccaattcattcagaagaattgggcattgattttctcactgcttctgcccacaaattccatggtcctaagggaatcggttttctctacgcatctagcatggactttgattcctatctacatggcggagaccaggaacagaaaaaacgtgcaggaactgaaaatctgcctgccattgtaggcatggttgcagccctaaaagaagacctagaaaaacaagaagaacattttcaacatgtacaaaatctagaaactgcctttctggcagagctggagggcattcagtattacctgaatagaggaaaacatcatctcccttatgttctcaatattggatttcctggtcagaaaaatgacctcttactccttcggctagatttagctggaatttcaatctctactggctcagcctgtactgcaggcgttgtccaatccagccatgttcttgaagccatgtatggcgcaaattcagaacgcttgaaggaatcccttcgcatcagtttgtcgccacaaaataccgttgaagacctacaaaccctcgcaaaaaccttaaaagaaattatcggaggt

SEQ ID NO: 2174 - protein, 360 aa, Streptococcus pneumoniae
  aminotransferase, class-V; Cellular location: cytoplasm; Similar to strain R6 sequence 15903045 (0.E+01)
MSAVAISAMTKVMQETHGNPSSIHGHGRQAGKLLREARQELAQLLRTKPQHIFFTSGGTEGNNTTIIGYCLRHQEQGKHIITTAIEHHAVLETIDYLVQHFGFEATIIQPENQEITAQQIQKALRDDTILVSTMFVNNETGNLLPIAEIGQILKQHPAAYHVDAVQAIGKIPIHSEELGIDFLTASAHKFHGPKGIGFLYASSMDFDSYLHGGDQEQKKRAGTENLPAIVGMVAALKEDLEKQEEHFQHVQNLETAFLAELEGIQYYLNRGKHHLPYVLNIGFPGQKNDLLLLRLDLAGISISTGSACTAGVVQSSHVLEAMYGANSERLKESLRISLSPQNTVEDLQTLAKTLKEIIGG

SEQ ID NO: 2175 - DNA, 957 bp, Streptococcus pneumoniae
atgtcagatagaaaaaacatgaaacttttcgcactcaactctaaccaagagattgcacaaaaaattgcccaagctgttggtgtcccacttggaaaactatcatcacgtcaattttcagacggagaaatccaagtaaatatcgaagaaagtgtccgtggttatgatgtttacatcatccaatcaacaagtttccctgtcaacaaccacctaatggaattgttaatcatggtcgatgcttgtgtgcgtgcaagtgcccacagtatcaacgttgtccttccatattttggctatgcacgtcaagaccgcattgcttgtcctcgtgagccacttacagcaaaactagttgccaatatgctggttaaggctggagttgatcgtatcctgactcttgatttgcatgccgttcaggttcaaggtttctttgatattccagtggataatcttttcactgttcccctattcgcaaaacattactgcgataaaggattgcttggttcagatgttgttgtcgttagccctaaaaattcaggtgtcaaacgtgcgcgtagcctggctgaatatcttgatgctcctatcgccattatcgactaccctcaagacgatgcaactcgtaacgaaggttatattattggtgatgttgaaggtaagaaagctatcttgattgatgatattttaaatacaggacgtaccttctctgaagcttctaaaatcgttgaacgtgaaggagctacagaaatttatgctgtttctagccacggtctcttcgtcgagggagctgctgagcttcttgacaatactaatattaaagaaattcttgtgactgattcagtagcaacaaaagaaaaaactcctaaaaatgtatgctacatcactgctagtgagttaattggtgatgctatcgtccgtattcacgaaagaaaaccagtcagcccactctttgcctacaataaaaagaaa

SEQ ID NO: 2176 - protein, 319 aa, Streptococcus pneumoniae
  ribose-phosphate pyrophosphokinase (prsA); Cellular location: cytoplasm; Similar to strain R6 sequence 15903046 (e-180)
MSDRKNMKLFALNSNQEIAQKIAQAVGVPLGKLSSRQFSDGEIQVNIEESVRGYDVYIIQSTSFPVNNHLMELLIMVDACVRASAHSINVVLPYFGYARQDRIACPREPLTAKLVANMLVKAGVDRILTLDLHAVQVQGFFDIPVDNLFTVPLFAKHYCDKGLLGSDVVVVSPKNSGVKRARSLAEYLDAPIAIIDYPQDDATRNEGYIIGDVEGKKAILIDDILNTGRTFSEASKIVEREGATEIYAVSSHGLFVEGAAELLDNTNIKEILVTDSVATKEKTPKNVCYITASELIGDAIVRIHERKPVSPLFAYNKKK

SEQ ID NO: 2177 - DNA, 567 bp, Streptococcus pneumoniae
atgaaacatttagaaattgaattgaaaacactattgaaaaaagatgaatacaatcgtctaaaagaccagttcacaggtgtcactcctgttcttcaaacaaattactacatcgacacgcctgattttgaactgcgagaaaagaaagtcgctatgcgcattcgaacctttgaagactgggctgagttgacactcaaagtcccgcagagtgttggaaacatggaatacaaccaaaaattgcaactaaaagatgctgagaactatctgagtaaggaagaacttcctcaagggctagtactggatgaattggcgaaacatggtatccaaagtaagaactggcaggttcttggttgtctaacaacgcttcgctatgaaatgaaaacagctattggtctcatggcactggatcagagccgatactttgatataacagattacgaattggagcttgaagtggaaaatcatgagcaaggcaaacaggattttcgacaatttttagagaaaaatcagatttcctatcaaaaagctccttcaaaattggttcgatttgtcaaaagtatgaaaaatagc

SEQ ID NO: 2178 - protein, 189 aa, Streptococcus pneumoniae
  conserved hypothetical protein; Cellular location: cytoplasm; Similar to strain R6 sequence 15903047 (e-107)
MKHLEIELKTLLKKDEYNRLKDQFTGVTPVLQTNYYIDTPDFELREKKVAMRIRTFEDWAELTLKVPQSVGNMEYNQKLQLKDAENYLSKEELPQGLVLDELAKHGIQSKNWQVLGCLTTLRYEMKTAIGLMALDQSRYFDITDYELELEVENHEQGKQDFRQFLEKNQISYQKAPSKLVRFVKSMKNS

SEQ ID NO: 2179 - DNA, 669 bp, Streptococcus pneumoniae
atgaccttagaatgggaagaatttctagatccttacattcaagctgttggtgagttaaagattaaacttcgtggtattcgtaagcaatatcgtaagcaaaataagcattctccaattgagtttgtgaccggtcgagtcaagccaattgagagcatcaaagaaaaaatggctcgtcgtggcattacttatgcgaccttggaacacgatttgcaggatattgctggcttacgtgtgatggttcagtttgtagatgacgtcaaggaagtagtggatattttgcacaagcgtcaggatatgcgaatcatacaggagcgagattacattactcatagaaaagcatcaggctatcgttcctatcatgtggtagtagaatatacggttgataccatcaatggagctaagactattttggcagaaattcaaattcgtactttggccatgaatttctgggcaacgatagaacattctctcaactacaagtaccaaggggatttcccagatgagattaagaagcgactggaaattacagctagaatcgcccatcagttggatgaagaaatgggtgaaattcgtgatgatatccaagaagcccaggcactttttgatcctttgagtagaaaattaaatgacggtgtaggaaacagtgacgatacagatgaagaatacagg

SEQ ID NO: 2180 - protein, 223 aa, Streptococcus pneumoniae
  conserved hypothetical protein; Cellular location: cytoplasm; Similar to strain R6 sequence 15903048 (e-127)
MTLEWEEFLDPYIQAVGELKIKLRGIRKQYRKQNKHSPIEFVTGRVKPIESIKEKMARRGITYATLEHDLQDIAGLRVMVQFVDDVKEVVDILHKRQDMRIIQERDYITHRKASGYRSYHVVVEYTVDTINGAKTILAEIQIRTLAMNFWATIEHSLNYKYQGDFPDEIKKRLEITARIAHQLDEEMGEIRDDIQEAQALFDPLSRKLNDGVGNSDDTDEEYR

SEQ ID NO: 2181 - DNA, 816 bp, Streptococcus pneumoniae
atgaagaatacaggtaaacgaattgatctgatagccaatagaaaaccgcagagtcaaagggttttgtatgaattgcgagatcgtttgaagagaaatcagtttatactcaatgataccaatccggatattgtcatttccattggcggggatggtatgctcttgtcggcctttcataagtacgaaaatcagcttgacaaggtccgctttatcggtcttcatactggacatttgggcttctatacagattatcgtgattttgagttggacaagctagtgactaatttgcagctagatactggggcaagggtttcttaccctgttctgaatgtgaaggtctttcttgaaaatggtgaagttaagattttcagagcactcaacgaagccagcatccgcaggtctgatcgaaccatggtggcagatattgtaataaatggtgttccctttgaacgttttcgtggagacgggctaacagtttcgacaccgactggtagtactgcctataacaagtctcttggcggtgctgttttacaccctaccattgaagctttgcaattaacggaaattgccagccttaataatcgtgtctatcgaacactgggctcttccattattgtgcctaagaaggataagattgaacttattccaacaagaaacgattatcatactatttcggttgacaatagcgtttattctttccgtaatattgagcgtattgagtatcaaatcgaccatcataagattcactttgtcgcgactcctagccataccagtttctggaaccgtgttaaggacgcctttatcggcgaggtggatgaa

SEQ ID NO: 2182 - protein, 272 aa, Streptococcus pneumoniae
  conserved hypothetical protein; Cellular location: cytoplasm; Feature of note: RGD motif; Similar to strain R6 sequence 15903049 (e-156)
MKNTGKRIDLIANRKPQSQRVLYELRDRLKRNQFILNDTNPDIVISIGGDGMLLSAFHKYENQLDKVRFIGLHTGHLGFYTDYRDFELDKLVTNLQLDTGARVSYPVLNVKVFLENGEVKIFRALNEASIRRSDRTMVADIVINGVPFERFRGDGLTVSTPTGSTAYNKSLGGAVLHPTIEALQLTEIASLNNRVYRTLGSSIIVPKKDKIELIPTRNDYHTISVDNSVYSFRNIERIEYQIDHHKIHFVATPSHTSFWNRVKDAFIGEVDE

SEQ ID NO: 2183 - DNA, 894 bp, Streptococcus pneumoniae
atgaggtttgaatttatcgcagatgaacatgtcaaggttaagaccttcttaaaaaagcacgaggtttctaagggattgctggccaagattaagtttcgaggtggagctattctggtcaataatcaaccgcaaaatgcaacgtatctattggacgttggagactacgttaccattgacattcccgctgagaaaggctttgaaaccttggaggctattgagcttccattagatattctctatgaggatgaccactttctagtcttgaataaaccctatggagtggcttctattcctagtgtcaatcactctaataccattgccaattttatcaagggttactatgtcaagcaaaattatgaaaatcagcaggttcacattgttaccagactagatagggatacttctggcttgatgctctttgccaagcacggttatgcccatgcacgattagacaagcagttgcagaagaaatctatcgagaaacgctactttgctttggttaagggagatggacatttggagccagaaggggaaattattgctccgattgcgcgtgatgaagattccattattaccagacgagtggctaaaggcggaaagtatgcccatacttcatacaagattgtagcttcttatggaaatattcacttggtctatattcacctgcacactggtcgaacccatcaaatccgagtccatttttctcatatcggttttcctttgctgggagatgatttgtatggtggtagtctggaagatggtattcaacgtcaggctctgcattgccattacctatccttttatcatccatttttagagcaagacttgcagttagaaagtcccttgccggatgattttagtaaccttattacccagttatcaactaatactcta

SEQ ID NO: 2184 - protein, 298 aa, Streptococcus pneumoniae
  ribosomal large subunit pseudouridine synthase, RluD subfamily; Cellular location: cytoplasm; Similar to strain R6 sequence 15903050 (e-175)
MRFEFIADEHVKVKTFLKKHEVSKGLLAKIKFRGGAILVNNQPQNATYLLDVGDYVTIDIPAEKGFETLEAIELPLDILYEDDHFLVLNKPYGVASIPSVNHSNTIANFIKGYYVKQNYENQQVHIVTRLDRDTSGLMLFAKHGYAHARLDKQLQKKSIEKRYFALVKGDGHLEPEGEIIAPIARDEDSIITRRVAKGGKYAHTSYKIVASYGNIHLVYIHLHTGRTHQIRVHFSHIGFPLLGDDLYGGSLEDGIQRQALHCHYLSFYHPFLEQDLQLESPLPDDFSNLITQLSTNTL

SEQ ID NO: 2185 - DNA, 972 bp, Streptococcus pneumoniae
atggaagtttttgaaagtctcaaagccaaccttgttggtaaaaatgctcgtatcgttctccctgaaggggaagagcctcgtattcttcaagcaacaaaacgcttagtaaaagaaacagaagtgattcctgttttgcttggaaatcctgaaaaaattaaaatttatcttgaaattgaaggaatcatggatggttatgaggtcatcgaccctcaacattatcctcaatttgaagaaatggtttctgccttggtggagcgtcgcaagggcaaaatgactgaagaagatgtacgcaaggttttggttgaagatgtcaactactttggtgtgatgttggtttacttgggcttggttgatggaatggtgtcaggagcgattcactcaacagcttcaacagttcgcccagctctacaaatcatcaaaactcgtccaaatgtaactcgtacttcaggagccttcctcatggttcgtggtacggaacgttacctatttggagactgtgccattaacatcaatccagatgcagaagccttggctgaaattgccatcaactcagcaatcacagctaagatgtttggcatcgaacctaaaattgccatgttgagctattctactaaaggttcagggtttggtgaaagcgttgataaggtcgttgaagcaactaaaattgctcacgacttgcgtcctgaccttgaaatcgatggtgagttgcaatttgatgcagcctttgttcctgaaactgcagctctgaaagctcctggaagtacggtagctggtcaagcaaatgtcttcatcttcccaggtatcgaggcaggaaatattggttacaagatggctgaacgcctgggtggctttgcggctgtaggacctgttttgcaaggtttaaacaagccagttaatgatctttctcgtggatgtaatgcagatgatgtttacaagttgaccctcatcacagcagctcaagcagttcatcaa

SEQ ID NO: 2186 - protein, 324 aa, Streptococcus pneumoniae
  phosphate acetyltransferase (pta); Cellular location: membrane; Similar to strain R6 sequence 15903051 (0.E+01)
MEVFESLKANLVGKNARIVLPEGEEPRILQATKRLVKETEVIPVLLGNPEKIKIYLEIEGIMDGYEVIDPQHYPQFEEMVSALVERRKGKMTEEDVRKVLVEDVNYFGVMLVYLGLVDGMVSGAIHSTASTVRPALQIIKTRPNVTRTSGAFLMVRGTERYLFGDCAININPDAEALAEIAINSAITAKMFGIEPKIAMLSYSTKGSGFGESVDKVVEATKIAHDLRPDLEIDGELQFDAAFVPETAALKAPGSTVAGQANVFIFPGIEAGNIGYKMAERLGGFAAVGPVLQGLNKPVNDLSRGCNADDVYKLTLITAAQAVHQ

SEQ ID NO: 2187 - DNA, 525 bp, Streptococcus pneumoniae
atgagtcgtgtgcgtgtccaaatcatgaatcagtttcatcgaaaatcccatgaatacaaggctatcaagcgctactggaaactcattcaacaggatagccgtaaactgagtgataagcgattttatcgtcctatttttcgtatgcacttaaccaataaagagattttaaacaagcttttgagctattcggaagacttgaaacaccactatcagctctatcaactcttgctttttcacttccagaataaggaaccagagaaatttttcggacttattgaggacaatcttaagcaggttcatcctatttttcagactgtctttaaaaccttcctcaaagataaagaaaagattatcaacgcccttcaactacactattctaacgccaaactggaagcgaccaataatctcatcaaacttatcaagcgcaatgcctttggttttcggaactttgaaaacttcaaaaaacggatttttatcgctctgaatatcaaaaaagaaaggatgaaatttgtcctttctcgagct

SEQ ID NO: 2188 - protein, 175 aa, Streptococcus pneumoniae
  transposase
MSRVRVQIMNQFHRKSHEYKAIKRYWKLIQQDSRKLSDKRFYRPIFRMHLTNKEILNKLLSYSEDLKHHYQLYQLLLFHFQNKEPEKFFGLIEDNLKQVHPIFQTVFKTFLKDKEKIINALQLHYSNAKLEATNNLIKLIKRNAFGFRNFENFKKRIFIALNIKKERMKFVLSRA

SEQ ID NO: 2189 - DNA, 285 bp, Streptococcus pneumoniae
atgagctttattgcgcaagattttaacaatctcaatatcatcactgttcttgaaggtagaacacaagctgtcatccgagatcactttcttaaatatgatagagccgtccgatgtcgcgtcaaaatcattactatggatatgtttagcccttactatgacttggctaaacagcttcgctttcaaatttctaggctcaggctgaaacagtctcccaggctgtttcactcccgaatgctaaaatcgttcttgatcgctttcacattgtacaacatcttagccgtgcta

SEQ ID NO: 2190 - protein, 95 aa, Streptococcus pneumoniae
  transposase-related
MSFIAQDFNNLNIITVLEGRTQAVIRDHFLKYDRAVRCRVKIITMDMFSPYYDLAKQLRFQISRLRLKQSPRLFHSRMLKSFLIAFTLYNILAVL

SEQ ID NO: 2191 - DNA, 1324 bp, Streptococcus pneumoniae
atggaacaattacattttatcacaaaattactagacattaaagaccctaatatccagattttagacatcgtcaataaggatacacacaaggaaatcatcgccaaactggactatgaagctccatcttgtcctgagtgcggaagtcaaatgaagaaatatgactttcaaaaaccttctaaaattccttatcttgaaacaactggtatgcctactagaattctccttagaaagcgtcgtttcaagtgctatcattgttctaaaattatggttgctgaaacttctatcgtcaagaagaatcatcaaatccctcgtatcatcaaccaaaagattgctcaaaagttaattgaaaagatttctatgactgatattgcccatcagctttccatctcaacttcaactgtcattcgaaagctcaatgacttccactttgagtgtaattttagaaatctgcctaagattatgtcttgggacgttgaaacagtccggggagtgactgtttcaatcgggagatggagatgagctttattgcgcaagattttaacaatctcaatatcatcactgttcttgaaggtagaacacaagctgtcatccgagatcactttcttaaatatgatagagccgtccgatgtcgcgtcaaaatcattactatggatatgtttagcccttactatgacttggctaaacagcttcgctttcaaatttctaggctcaggctgaaacagtctcccaggctgtttcactcccgaatgctaaaatcgttcttgatcgctttcacattgtacaacatcttagccgtgctatgagtcgtgtgcgtgtccaaatcatgaatcagtttcatcgaaaatcccatgaatacaaggctatcaagcgctactggaaactcattcaacaggatagccgtaaactgagtgataagcgattttatcgtcctatttttcgtatgcacttaaccaataaagagattttaaacaagcttttgagctattcggaagacttgaaacaccactatcagctctatcaactcttgctttttcacttccagaataaggaaccagagaaatttttcggacttattgaggacaatcttaagcaggttcatcctatttttcagactgtctttaaaaccttcctcaaagataaagaaaagattatcaacgcccttcaactacactattctaacgccaaactggaagcgaccaataatctcatcaaacttatcaagcgcaatgcctttggttttcggaactttgaaaacttcaaaaaacggatttttatcgctctgaatatcaaaaaagaaaggatgaaatttgtcctttctcgagct

SEQ ID NO: 2192 - protein, 172 aa, Streptococcus pneumoniae
  IS1167, transposase FRAMESHIFT
MEQLHFITKLLDIKDPNIQILDIVNKDTHKEIIAKLDYEAPSCPECGSQMKKYDFQKPSKIPYLETTGMPTRILLRKRRFKCYHCSKIMVAETSIVKKNHQIPRIINQKIAQKLIEKISMTDIAHQLSISTSTVIRKLNDFHFECNFRNLPKIMSWDVETVRGVTVSIGRWR

SEQ ID NO: 2193 - DNA, 288 bp, Streptococcus pneumoniae
atgcaaaacatgatgcgtcaagcacaaaaacttcaaaaacaaatggaacaaagccaagctgaacttgctgctatgcaatttgttggcaaatctgctcaagatcttgtccaagcgaccttaactggcgataagaaagttgtcagcattgatttcaatccagctgtcgttgacccagaggaccttgagactctttctgatatgaccgttcaagccatcaactctgctcttgaacaaatcgatgaaactaccaagaaaaaactgggtgctttcgctgggaaattacctttc

SEQ ID NO: 2194 - protein, 96 aa, Streptococcus pneumoniae
  conserved hypothetical protein TIGR00103; Cellular location: cytoplasm; Similar to strain R6 sequence 15903054 (4.E-49)
MQNMMRQAQKLQKQMEQSQAELAAMQFVGKSAQDLVQATLTGDKKVVSIDFNPAVVDPEDLETLSDMTVQAINSALEQIDETTKKKLGAFAGKLPF

SEQ ID NO: 2195 - DNA, 105 bp, Streptococcus pneumoniae
ttgggcttgatggctatgctactaataacaattaggagagaaaatcaggcacttgttaacaacaaggattatccccttgagatgaaaggaactttagaaatctta

SEQ ID NO: 2196 - protein, 35 aa, Streptococcus pneumoniae
  hypothetical protein
MGLMAMLLITIRRENQALVNNKDYPLEMKGTLEIL

SEQ ID NO: 2197 - DNA, 702 bp, Streptococcus pneumoniae
atgggaggtaaaatgaggttattacctataagaaaaatatcacgtcagtctaaaaggttagcactttttttgacgttttgtgctggatatgtggatgcttacacttttattgttcgcgggaatacccttgtagctggacaaactggaaatgttgtctttctttcagtagaattaattaaaaataatgtttcggatgttagggacaaggttctcaccttgctagcgtttatgatgggagtctttttattaacgatttataaggaaaaattgagaattgtgaaaaaacctattctgtccttgattcccttggcaatcttatcaatcattattgcttttgtgccgcaaactgtggataatatctatctagtgccgcccttggccttctgtatgggactggtgacaactgcttttggagaagtgtcgggtattgcctataataacgcttttatgacagggaatatcaaacggaccatgctggcttttggagattatttccgaaccaagcacactccttttttgcgtgaaggattcatatttgttagcctgcttagtagttttgtccttggcgttgtcttttcagcctatttgacgattttctatcatgaaaagaccattcttggtgttcctattatgatgagcgttttttacctcagcatgctttttgcctcttggcagaaaaaagtaaaagaaaaagcttcattt

SEQ ID NO: 2198 - protein, 234 aa, Streptococcus pneumoniae
  hypothetical protein; Cellular location: membrane; Similar to strain R6 sequence 15903055 (e-130)
MGGKMRLLPIRKISRQSKRLALFLTFCAGYVDAYTFIVRGNTLVAGQTGNVVFLSVELIKNNVSDVRDKVLTLLAFMMGVFLLTIYKEKLRIVKKPILSLIPLAILSIIIAFVPQTVDNIYLVPPLAFCMGLVTTAFGEVSGIAYNNAFMTGNIKRTMLAFGDYFRTKHTPFLREGFIFVSLLSSFVLGVVFSAYLTIFYHEKTILGVPIMMSVFYLSMLFASWQKKVKEKASF

SEQ ID NO: 2199 - DNA, 387 bp, Streptococcus pneumoniae
gtggttcgtcccacgatgctaggcgagtcttcacaaaaaatcggggaaacccataaaaatcataggaggtgcataatgagcacatacgcaattatcaaaactggcggaaaacaagttaaagttgaagttggtcaagcagtttacgttgaaaaattgaacgttgaagctggtcaagaagttacttttaacgaagttgttcttgttggtggtgaaaacactgttgtcggaactccacttgttgctggagctactgtagttggaactgttgaaaaacaaggaaaacaaaagaaagtggttacttacaagtacaaacctaaaaaaggtagccaccgtaaacaaggtcaccgtcaaccatatacaaaagttgtcatcaacgcaatcaacgct

SEQ ID NO: 2200 - protein, 129 aa, Streptococcus pneumoniae
  ribosomal protein L21 (rplU); Cellular location: membrane; Similar to strain R6 sequence 15903056 (2.E-55)
MVRPTMLGESSQKIGETHKNHRRCIMSTYAIIKTGGKQVKVEVGQAVYVEKLNVEAGQEVTFNEVVLVGGENTVVGTPLVAGATVVGTVEKQGKQKKVVTYKYKPKKGSHRKQGHRQPYTKVVINAINA

SEQ ID NO: 2201 - DNA, 342 bp, Streptococcus pneumoniae
atgatacaggcagtctttgagagagccgaagatggcgagctgaggagtgcggaaattactggacacgccgagagtggcgaatacggcttagatgtcgtgtgtgcatcggtttctacgcttgccattaactttatcaattctattgagaaatttgcaggctatgaaccaatcctagaattaaacgaagatgaaggtggctatctgatggttgaaataccaaaagatcttccttcacaccagagagaaatgacccagttattctttgaatcatttttcttaggtatggcaaacttatcggagaactattctgagttcgtccaaaccagagttatcacagaaaac

SEQ ID NO: 2202 - protein, 114 aa, Streptococcus pneumoniae
  conserved hypothetical protein; Cellular location: membrane; Similar to strain R6 sequence 15903057 (2.E-60)
MIQAVFERAEDGELRSAEITGHAESGEYGLDVVCASVSTLAINFINSIEKFAGYEPILELNEDEGGYLMVEIPKDLPSHQREMTQLFFESFFLGMANLSENYSEFVQTRVITEN

SEQ ID NO: 2203 - DNA, 291 bp, Streptococcus pneumoniae
atgttaaaaatgactcttaacaacttgcaacttttcgcccacaaaaaaggtggaggttctacatcaaacggacgtgattcacaagcaaaacgtcttggagctaaagcagctgacggacaaactgtaacaggtggatcaatcctttaccgtcaacgtggtacacacatctatccaggtgtaaacgttggtcgtggtggagatgatactttgttcgctaaagttgaaggcgtagtacgctttgaacgtaaaggacgcgataaaaaacaagtttctgtttacccaatcgctaaa

SEQ ID NO: 2204 - protein, 97 aa, Streptococcus pneumoniae
  ribosomal protein L27 (rpmA); Cellular location: cytoplasm; Similar to strain R6 sequence 15903058 (2.E-47)
MLKMTLNNLQLFAHKKGGGSTSNGRDSQAKRLGAKAADGQTVTGGSILYRQRGTHIYPGVNVGRGGDDTLFAKVEGVVRFERKGRDKKQVSVYPIAK

SEQ ID NO: 2205 - DNA, 168 bp, Streptococcus pneumoniae
atgactgctttccaacaactcccatctagtgtgcttcagactgggctatttttctctccatctgttagcttggattctcagaccgtttcagctaaagaatatcttttcccttatcagaaggaacggctcaagccattcagacaagtgaagggacgacaagccaatatt

SEQ ID NO: 2206 - protein, 56 aa, Streptococcus pneumoniae
  hypothetical protein; Similar to strain R6 sequence 15903059 (2.E-27)
MTAFQQLPSSVLQTGLFFSPSVSLDSQTVSAKEYLFPYQKERLKPFRQVKGRQANI

SEQ ID NO: 2207 - DNA, 117 bp, Streptococcus pneumoniae
atgtttgaagaatttcctaaactccctgatttgaagcaagtcactttccctaatgacaaagaaaaaagccaaaacagcaaagaaaaactagatgactgctttccaacaactcccatc

SEQ ID NO: 2208 - protein, 39 aa, Streptococcus pneumoniae
  hypothetical protein; Cellular location: cytoplasm
MFEEFPKLPDLKQVTFPNDKEKSQNSKEKLDDCFPTTPI

SEQ ID NO: 2209 - DNA, 915 bp, Streptococcus pneumoniae
atgattattactattcctataaaaaaccaaaaagatattggcacaccatctgattcagtcgttgttctcggctattttgatggcatacataaggggcatcaagaattatttcgtgttgccaacaaggctgcgagaaaggatttgttgcctatcgtcgttatgacctttaatgaatctccaaagatcgctttagagccttatcatccagatttgtttttgcatattttgaaccctgctgaacgtgaaagaaaattaaagcgcgaaggtgtagaagaattatatctccttgattttagtagtcaattcgctagtctcactgcacaagaattctttgcaacttatatcaaggctatgaatgccaaaattattgttgcaggttttgattatacatttggttctgacaaaaaaacagcagaagatttaaagaattactttgatggagaagttatcattgttccacctgtagaagatgagaaaggaaagattagttcaactcgtatccgtcaagctattttagatggaaatgtgaaagaagcaggaaaacttttgggggcaccgcttccatcaagaggtatggtggttcatggtaatgctcgtggtcgtacaattggttatccgacagcgaatttagtgcttttagaccgtacttatatgccagcagatggcgtttatgttgttgatgttgagattcaaagacagaagtatcgtgctatggctagtgtcgggaaaaatgtgacctttgatggagaagaagcacgttttgaagtcaatatttttgattttaatcaagatatttatggggaaaccgtcatggtttattggcttgatcgcattcgagatatgaccaaatttgactcagttgaccaattagtggatcagttaaaggctgatgaagaagtaactcggaattggtct

SEQ ID NO: 2210 - protein, 305 aa, Streptococcus pneumoniae
  macrolide-efflux protein; Cellular location: cytoplasm; Similar to strain R6 sequence 15903061 (e-175)
MIITIPIKNQKDIGTPSDSVVVLGYFDGIHKGHQELFRVANKAARKDLLPIVVMTFNESPKIALEPYHPDLFLHILNPAERERKLKREGVEELYLLDFSSQFASLTAQEFFATYIKAMNAKIIVAGFDYTFGSDKKTAEDLKNYFDGEVIIVPPVEDEKGKISSTRIRQAILDGNVKEAGKLLGAPLPSRGMVVHGNARGRTIGYPTANLVLLDRTYMPADGVYVVDVEIQRQKYRAMASVGKNVTFDGEEARFEVNIFDFNQDIYGETVMVYWLDRIRDMTKFDSVDQLVDQLKADEEVTRNWS

SEQ ID NO: 2211 - DNA, 846 bp, Streptococcus pneumoniae
atgattaaaaaaatttaccccatttttaccattttactaggtgctgctatttatgcttttggactgacttattttgtagttccccatcatctctttgaaggaggggcgacaggcattaccctcatcaccttttatctttttaaaatccctgtttccctcatgaacctgctgattaatattccccttttcatcctagcttggaagatttttggagccaaatccctctattctagtttactaggaaccttagctttgtccggctggttagctttttttgagcatattccccttcatattgatcttcaaggtgatttactaatcacagcccttatagcgggaatcctattgggaattggccttggaattatttttaatgctggaggtacaactggcggaactgatattctagctcgtattctcaacaaatacactcatatatccataggaaaactgctctttatcttagatttttgtattctcatgttgattctcctaatcttcaaggatttgagattggtttcctacacgcttttgtttgattttattgtttctcgtgttattgatttgattggtgaaggaggatatgccggcaaaggctttatgattatcacaaaacgtcctgaccaacttgctaaggcgattaatgatgacctcggaagaggtgttacttttatttctggtcaaggctactatagtaaagaaaatttgaaaatcatctactgtattgtcggaagaaatgaaattgtgaaaacgaaggaaatgattcatcgaatcgatcctcaagcctttataactattacagaagcccatgaaatcctaggagaaggcttcacctttgaaaaagaa

SEQ ID NO: 2212 - protein, 282 aa, Streptococcus pneumoniae
  conserved hypothetical protein; Cellular location: membrane; Similar to strain R6 sequence 15903062 (e-159)
MIKKIYPIFTILLGAAIYAFGLTYFVVPHHLFEGGATGITLITFYLFKIPVSLMNLLINIPLFILAWKIFGAKSLYSSLLGTLALSGWLAFFEHIPLHIDLQGDLLITALIAGILLGIGLGIIFNAGGTTGGTDILARILNKYTHISIGKLLFILDFCILMLILLIFKDLRLVSYTLLFDFIVSRVIDLIGEGGYAGKGFMIITKRPDQLAKAINDDLGRGVTFISGQGYYSKENLKIIYCIVGRNEIVKTKEMIHRIDPQAFITITEAHEILGEGFTFEKE

SEQ ID NO: 2213 - DNA, 837 bp, Streptococcus pneumoniae
atgacaaaaattaagattgtaaccgattcatctgttactattgaacctgaactagtaaagcaattagatattacaattgttccattatctgtaatgattgataatgttgtttattctgatgcggatttgaaagaagaaggtaaatttcttcagttgatgcaagaaagtaagaatcttccgaaaacaagtcagccacctgtaggtgtctttgctgagatttttgaagacctatgcaaagatggtggccagattcttgctattcatatgtcccatgctctttcgggtacggtagaagcagcacgccaaggtgctagcctatctactgcagatgtgactgttgttgatagttccttcactgaccaagccctgaaattccaagttgttgaggctgcgaagttagctcaagaaggtaaagatatggaggcaattttatctcatgtagaagaggttaaaaaccatacagagctttatattggtgtttcaactttggaaaatcttgtcaaaggtggacgaattagccgtgtaactggcttgttgagctctcttctcaatatccgtgctgtcatgcaaatgaaagaccatgaattgcagccaatggttaaaggtcgtggaactaaaacatttaaaaaatggttagatgagttgataacatcgctttctgaacgtgctgtagcagagattggaatttcatattctggtagtgatgattgggcaaaagagatgaaagaaagcttacaagcttatgttgaaaagccaatttctgttttggaaacgggttccattattcaaactcacacgggtgagaacgcttgggctattttgatacgttaccactcc

SEQ ID NO: 2214 - protein, 279 aa, Streptococcus pneumoniae
  degV family protein; Cellular location: cytoplasm; Similar to strain R6 sequence 15903063 (e-153)
MTKIKIVTDSSVTIEPELVKQLDITIVPLSVMIDNVVYSDADLKEEGKFLQLMQESKNLPKTSQPPVGVFAEIFEDLCKDGGQILAIHMSHALSGTVEAARQGASLSTADVTVVDSSFTDQALKFQVVEAAKLAQEGKDMEAILSHVEEVKNHTELYIGVSTLENLVKGGRISRVTGLLSSLLNIRAVMQMKDHELQPMVKGRGTKTFKKWLDELITSLSERAVAEIGISYSGSDDWAKEMKESLQAYVEKPISVLETGSIIQTHTGENAWAILIRYHS

SEQ ID NO: 2215 - DNA, 273 bp, Streptococcus pneumoniae
atggcaaacaaacaagatttgatcgctaaagtagcagaagctacagaattgactaagaaagactcagcagcagcagttgaagctgtatttgcagcagtagctgactatcttgcagctggtgaaaaagttcaattgatcggttttggtaactttgaagttcgtgagcgcgcagaacgtaaaggtcgcaacccacaaactggtaaagaaatgacaattgcagcttctaaagtaccagcattcaaagctggtaaagctcttaaagacgctgttaaa

SEQ ID NO: 2216 - protein, 91 aa, Streptococcus pneumoniae
  DNA-binding protein HU (hup); Cellular location: membrane; Similar to strain R6 sequence 15903064 (9.E-46)
MANKQDLIAKVAEATELTKKDSAAAVEAVFAAVADYLAAGEKVQLIGFGNFEVRERAERKGRNPQTGKEMTIAASKVPAFKAGKALKDAVK

SEQ ID NO: 2217 - DNA, 1899 bp, Streptococcus pneumoniae
atgattattttacaagctaataaaattgaacgttcttttgcaggagaggttcttttcgataatatcaacctgcaggttgatgaacgagatcggattgctcttgttgggaaaaatggtgcaggtaagtctactcttttgaagattttagttggagaagaggagccaactagcggagaaatcaataagaaaaaagatatttctctgtcttacctagcccaagatagccgttttgagtctgaaaataccatctacgatgaaatgcttcatgtctttaatgatttgcgtcggacggagagacaactgcgtcagatggagctggagatgggtgaaaagtctggtgaggatttggataaactgatgtcagattatgaccgcttatctgagaattttcgccaagcaggtggctttacctatgaagctgatattcgagcgattttgaatggattcaagtttgacgagtctatgtggcagatgaaaattgctgagctttctggtggtcaaaatactcgtttggcacttgccaaaatgctccttgaaaagcccaatctcttggtcttggacgagccaactaaccacttggatattgaaaccatcgcctggctagagaattacttggtaaactatagcggtgccctcattatcgtcagccacgaccgttatttcttggacaaggttgcgacaattacgctagatttgaccaagcattccttggatcgctatgtggggaattactctcgttttgtcgaattgaaggagcaaaagctagttactgaggcaaaaaactatgaaaagcaacagaaggaaatcgctgctctggaagactttgtcaatcgcaatctagttcgtgcttcaacgactaaacgtgctcaatctcgccgtaaacaactggaaaaaatggaacgtttggacaagcctgaagctggcaagaaatcagccaacatgaccttccagtctgaaaaaacgtcgggcaatgttgttttgactgttgaaaatgcagctgttggctatgacggggaagtcttgtcacaaccgattaacctagatcttcgtaagatgaatgctgtcgctatcgttggtccaaatggtatcggcaagtcaacctttatcaagtctattgtggaccagattccttttatcaagggagaaaagcgctttggcgctaatgttgaggttggttactatgaccaaacccaaagcaagctgacaccaagtaatacggtgctggatgaactctggaatgatttcaaactgacaccagaagttgaaatccgcaaccgtcttggagccttccttttctcaggagatgatgttaaaaaatcagtcggcatgctatctggtggcgaaaaagctcgtttgcttttagctaaattgtctatggaaaacaataactttttgattctggatgagccgaccaaccacttggatattgatagtaaggaagtgctagaaaatgccttgattgactttgatggaaccttgctgtttgtcagtcatgatcgttactttatcaatcgtgtggcaactcatgttttggaattgtctgagaatggttcaactctctaccttggagattacgactactatgttgagaagaaagcaacagcagaaatgagtcagactgaggaagcttcaactagcaatcaagcaaaggaagcaagtccagtcaatgactatcaggcccagaaagaaagtcaaaaagaagttcgcaaactcatgcgacaaatcgaaagtctagaagctgaaattgaagagctagaaagtcaaagccaagccatttctgaacaaatgttggaaacaaacgatgccgacaaactcatggaattacaggctgagctggacaaaatcagccatcgtcaggaagaagctatgcttgagtgggaagaattatcagagcaggtg

SEQ ID NO: 2218 - protein, 633 aa, Streptococcus pneumoniae
  ABC transporter, ATP-binding protein; Cellular location: cytoplasm; Similar to strain R6 sequence 15903065 (0.E+01)
MIILQANKIERSFAGEVLFDNINLQVDERDRIALVGKNGAGKSTLLKILVGEEEPTSGEINKKKDISLSYLAQDSRFESENTIYDEMLHVFNDLRRTERQLRQMELEMGEKSGEDLDKLMSDYDRLSENFRQAGGFTYEADIRAILNGFKFDESMWQMKIAELSGGQNTRLALAKMLLEKPNLLVLDEPTNHLDIETIAWLENYLVNYSGALIIVSHDRYFLDKVATITLDLTKHSLDRYVGNYSRFVELKEQKLVTEAKNYEKQQKEIAALEDFVNRNLVRASTTKRAQSRRKQLEKMERLDKPEAGKKSANMTFQSEKTSGNVVLTVENAAVGYDGEVLSQPINLDLRKMNAVAIVGPNGIGKSTFIKSIVDQIPFIKGEKRFGANVEVGYYDQTQSKLTPSNTVLDELWNDFKLTPEVEIRNRLGAFLFSGDDVKKSVGMLSGGEKARLLLAKLSMENNNFLILDEPTNHLDIDSKEVLENALIDFDGTLLFVSHDRYFINRVATHVLELSENGSTLYLGDYDYYVEKKATAEMSQTEEASTSNQAKEASPVNDYQAQKESQKEVRKLMRQIESLEAEIEELESQSQAISEQMLETNDADKLMELQAELDKISHRQEEAMLEWEELSEQV

SEQ ID NO: 2219 - DNA, 891 bp, Streptococcus pneumoniae
gtgggaagaattatcagagcaggtgtaaagatggaacatcttggaaaagtatttcgtgaatttcgaacaagtggaaattattctttaaaggaagcagcaggcgaatcctgctctacctctcagttatctcgctttgagcttggggagtctgacctggcagtctcccgtttctttgagattttggataacattcatgtaacaatcgaaaatttcatggataaggcaaggaattttcataatcatgaacatgtgtctatgatggcacagattatcccactttactattcaaacgatattgcaggttttcaaaagcttcaaagagaacaacttgaaaagtctaagagttcgacgactcccctttattttgagctgaactggattttgctacaaggtctgatttgtcaaagagatgcgagttatgatatgaagcaggatgatttgggtaaggtagcagattatctcttcaaaacagaagaatggaccatgtatgagttgattcttttcggtaacctctatagtttctacgatgtagactatgtcactcggattggtagagaagttatggagagggaggaattttaccaagagattagtcgccataagagattagtgttgattttggccctcaattgttaccagcattgtttagagcattcttctttttataatgccaactattttgaggcttatacagagaagattattgacaaaggtattaagctttatgagcgtaatgttttccattatttaaaaggttttgccttatatcaaaaaggacagtgtaaagaaggctgtaagcagatgcaagaggccatgcatatttttgatgtgttaggtcttccagagcaagtagcctattatcaggaacactacgaaaaatttgtcaaaagt

SEQ ID NO: 2220 - protein, 297 aa, Streptococcus pneumoniae
  transcriptional regulator MutR, putative; Cellular location: cytoplasm; Similar to strain R6 sequence 15903066 (e-169)
MGRIIRAGVKMEHLGKVFREFRTSGNYSLKEAAGESCSTSQLSRFELGESDLAVSRFFEILDNIHVTIENFMDKARNFHNHEHVSMMAQIIPLYYSNDIAGFQKLQREQLEKSKSSTTPLYFELNWILLQGLICQRDASYDMKQDDLGKVADYLFKTEEWTMYELILFGNLYSFYDVDYVTRIGREVMEREEFYQEISRHKRLVLILALNCYQHCLEHSSFYNANYFEAYTEKIIDKGIKLYERNVFHYLKGFALYQKGQCKEGCKQMQEAMHIFDVLGLPEQVAYYQEHYEKFVKS

SEQ ID NO: 2221 - DNA, 1176 bp, Streptococcus pneumoniae
atgaatcgctatgcagtgcagttgattagccgtggggctatcaataaaatgggaaatatgctctatgattatggaaatagtgtctggttggcttctatggggactataggacagacagttttaggaatgtatcagatttctgagctcgtcacatctattctcgtcaatccctttggcggagttatttcagaccgtttttctcgtcgtaagattttaatgacggcagatcttgtttgtgggattctttgtctggctatttctttcataaggaatgatagctggatgattggcgctttgattgttgctaacattgtgcaggctattgcttttgccttttctcgcacagccaataaagctatcataactgaagtggtggagaaagatgagattgtgatctataattctcgcttagagctggttttgcaggttgtaggtgttagctctcctgttctttccttccttgttttacagtttgcaagtctccatatgacgctactgctagactcgctgacttttttcattgcttttgttctagtggctttccttccaaaagaggaagcaaaagttcaagagaaaaaggcttttactgggagagatatttttgtagatatcaaggatgggttacactatatctggcatcagcaagaaattttcttccttttgctggtagcttccagcgttaatttcttttttgcagcttttgaatttctacttcccttttcgaatcagctttacgggtcagaaggagcctatgcaagtattttaactatgggggctattggttccatcattggggctcttctagctagtaaaattaaagctaatatttataatcttttgattttactggctttgacaggtgtcggagtttttatgatgggattaccacttccaacttttctttccttttctggaaatttagtttgtgaattgtttatgacgatttttaatattcacttttttactcaagtacaaaccaaggttgagagcgaatttcttggaagagtactgagtacaatttttaccttagctattctatttatgcctattgcaaaaggatttatgacagtcttgccaagtgtccatctttattctttcttgattattggacttggagttgtagccttatatttcttagctctcggatatgttcgaactcattttgaaaaattgata

SEQ ID NO: 2222 - protein, 392 aa, Streptococcus pneumoniae
  transporter, putative; Cellular location: membrane; Similar to strain R6 sequence 15903067 (0.E+01)
MNRYAVQLISRGAINKMGNMLYDYGNSVWLASMGTIGQTVLGMYQISELVTSILVNPFGGVISDRFSRRKILMTADLVCGILCLAISFIRNDSWMIGALIVANIVQAIAFAFSRTANKAIITEVVEKDEIVIYNSRLELVLQVVGVSSPVLSFLVLQFASLHMTLLLDSLTFFIAFVLVAFLPKEEAKVQEKKAFTGRDIFVDIKDGLHYIWHQQEIFFLLLVASSVNFFFAAFEFLLPFSNQLYGSEGAYASILTMGAIGSIIGALLASKIKANIYNLLILLALTGVGVFMMGLPLPTFLSFSGNLVCELFMTIFNIHFFTQVQTKVESEFLGRVLSTIFTLAILFMPIAKGFMTVLPSVHLYSFLIIGLGVVALYFLALGYVRTHFEKLI

SEQ ID NO: 2223 - DNA, 1956 bp, Streptococcus pneumoniae
atgaataaaagaatgaatgagttagtcgctttgctcaatcgctatgcgactgagtactataccagcgataatccctcggtttcagacagtgagtatgaccgcctttaccgtgagttggtcgagttagaaactgcttatccagagcaagtgctagcagacagtccgactcatcgtgttggtggcaaggttttagatggttttgaaaaatacagtcatcagtatcctctttatagtttgcaggatgctttttcatgtgaggagctagatgcttttgatgcgcgtgttcgtaaggaagtggctcatccgacctatatttgtgagctgaaaatcgatggcttatctatctcgctgacttatgaaaaggggattttggttgctggggtaacacgtggagatggttcaattggtgaaaatatcacagaaaacctcaagcgtgttaaggacatccctttgactttgccagaagaactagatatcacagttcgtggggaatgttacatgccacgcgcttcctttgaccaagttaaccaagcgcgccaagaaaatggagagcctgaatttgctaatcctcgtaatgcggcagcaggaactctgcgtcagttggatacagcagtagttgccaagcgtaatcttgcaacgtttctctatcaagaagccagcccttcaactcgtgatagccaagaaaagggtttgaagtacctagaacaactaggttttgtggtcaatcctaagcgaatcttggctgaaaacatagatgaaatctggaattttatccaagaagtaggacaggaacgggaaaatctgccttacgatattgatggagtggtaatcaaggtcaacgacctagcaagtcaagaagaacttggttttacagttaaggctccaaagtgggcagtagcctacaagttccctgccgaagaaaaagaagctcaactcttatcagttgactggacagttggccgtaccggtgttgtaactccaactgctaatctaacaccagtacaacttgccggtacgactgttagccgtgcgaccctgcacaatgtagattatattgctgaaaaagatatccgaaaagacgatacggtcattgtatataaggctggtgacatcatccctgccgttttacgtgtggtagagtccaaacgggtttctgaagaaaaactagatatccctacaaactgtccaagttgtaactctgacttgttgcactttgaagatgaagtggccctacgttgtatcaatccgcgttgccctgctcaaatcatggaaggcttgattcactttgcttctcgtgatgctatgaatattacaggccttggtccatctattgttgagaagctttttgctgctaatttagtcaaggatgtggcggatatttatcgtttgcaagaagaggatttcctccttttagagggagttaaggaaaagtccgctgctaaactgtatcaggctatccaagcatcaaaggaaaattctgccgagaagctcttatttggtttgggaattcgtcatgtcggaagcaaggttagtcagcttttacttcaatatttccattcaattgaaaatctgtctcaggcagattcagaggaagtggctagtattgaaagtctaggtggcgtgattgccaaaagtcttcagacttattttgcgacagaaggctctgaaattctgctcagagaattgaaagaaactggggtcaatctggactataaaggacagacggtagtagcggatgcggccttgtcaggtttgaccgtggtattgacaggaaaattggaacgactcaagcgctcagaagctaaaagtaaactcgaaagtctgggtgccaaagtgacaggtagtatttctaaaaagaccgacctcgtcgtggtaggtgcagacgctggaagtaaactgcaaaaagcacaagaacttggtatccaggtcagagatgaggcatggctagaaagtttg

SEQ ID NO: 2224 - protein, 652 aa, Streptococcus pneumoniae
  DNA ligase, NAD-dependent (ligA); Cellular location: cytoplasm; Similar to strain R6 sequence 15903068 (0.E+01)
MNKRMNELVALLNRYATEYYTSDNPSVSDSEYDRLYRELVELETAYPEQVLADSPTHRVGGKVLDGFEKYSHQYPLYSLQDAFSCEELDAFDARVRKEVAHPTYICELKIDGLSISLTYEKGILVAGVTRGDGSIGENITENLKRVKDIPLTLPEELDITVRGECYMPRASFDQVNQARQENGEPEFANPRNAAAGTLRQLDTAVVAKRNLATFLYQEASPSTRDSQEKGLKYLEQLGFVVNPKRILAENIDEIWNFIQEVGQERENLPYDIDGVVIKVNDLASQEELGFTVKAPKWAVAYKFPAEEKEAQLLSVDWTVGRTGVVTPTANLTPVQLAGTTVSRATLHNVDYIAEKDIRKDDTVIVYKAGDIIPAVLRVVESKRVSEEKLDIPTNCPSCNSDLLHFEDEVALRCINPRCPAQIMEGLIHFASRDAMNITGLGPSIVEKLFAANLVKDVADIYRLQEEDFLLLEGVKEKSAAKLYQAIQASKENSAEKLLFGLGIRHVGSKVSQLLLQYFHSIENLSQADSEEVASIESLGGVIAKSLQTYFATEGSEILLRELKETGVNLDYKGQTVVADAALSGLTVVLTGKLERLKRSEAKSKLESLGAKVTGSISKKTDLVVVGADAGSKLQKAQELGIQVRDEAWLESL

SEQ ID NO: 2225 - DNA, 2277 bp, Streptococcus pneumoniae
atgtataactaccctatgcgcattcattaccatcgtaagaatggagaatatgacacttgctcctttgtaaaaagtcaggatcaacgaattgatttgctaacctacaaagaagattattttggagctttatttagctttgaacacccaagttcacatgttatagaaagcttgaattttgtggttcatacaggtcaaactagtaaagaatattctatccgttttaatcactatcccctattaacagaggtctggattttggaaggcgatgataggatttattactctgaaaatcctgctattgccagtcctttctataaaaatcaaaatccttttgcctttgataaggccattaacagtgctagttttgatcatcattggggttaccaaggagaattgggttgccgtgtagaggacaatcaggctcatttttctctctggtcacctacagcgacagaagtgcaagttgtcgtttatgaatcagctgctaatgatgcacccgtttggaagacttttgagatgaaaagaggcaatagctactcttataatcataaggacaatacaatcggtgtctggagtttggatgttgaagaagatttggtaggtaagacttatcagtatcaagtccaattccctcatcaccaaacactgacacgtgatccttatacaatcgcgaccagccctgatggcaaacgttcagctattctgagccatgtagaaaagcaagttgaaaacttcgaggttaagcacggttcggaggctacttggcgcttggaaaatccatgtaaggcagttatctgtgaaatgcacattcgtgatttgactaaatcacctacatcgggtgtagatgaacatcttcgaggaactttcttgggtgctgctcaggctggaacagttaaccaatacggccagtcaactgcttttgattacatcaagaagctgggctacaattatgttcaattgcaaccaattgcagaccgtcataaagaatacgatgaggatggaaatgtaacctacaactggggttatgatccacaaaactataacgcgccagaaactagtttttcaactaatccagatgatccagctcaggtcattcgtgatttgaaggtgatggttcaagcttatcacgatgcgggtattggagtcattatggatgtagtctataaccataccttctcagttgttgatgcaccattccaaacaacagtccctgattactattatcgtatgaatccagatggtaccttccagaatggaacgggtgttggaaatgaaacagccagtgaacacgaaatgtttcgcaagtatatgattgattctcttctatactgggtgcaggaatataatattgacggcttccgttttgacttgatggggattcatgatgtcaagaccatgcagatgattcgtcaaagcttggatgaaatcgactccaacattatcctctatggagaaggatgggatatgggaacaggtcttgccccttatgataaggccaagaaggacaatgcctaccagatgccaaatattggtttctttaatgacaatcagcgcgatgctgtcaaagggggagaagtttatggtgctatcaagtcaggttttgtcagtggtgctgcgacagagccaattctagctaaagcaatcctaggaagtcgtgaattaggaagctatacacatccaaatcaggtgcttaactatgtagaagcccatgacaattacaatcttcacgatttattggcaacccttcatccagaccaaagttcagagcaaatcatgcgcaaggtcgaaactgccacagccatgaatctgctcatgcaggggatggcctttatggaaatcggtcaagaatttggtcgtaccaaactggttgcgactggtgaaaatggtgagttgacccatgatgatagagagcgtgcgatgaatagctataatgctcctgacagtgtgaaccaagtgaactggaacttgattaatgagcgtcaagacagtattgagtttatccgtcaagtcatccgattgaagacaaaaactggtgccttttcttactctagctatgatgaaatttaccatcatgtctttgtgcattctgcgattgaacatagcggctaccttatctatgaagttcacggcaaagaacacctcttggtggttgtgaatgctaaatcagaaccctatcaatttgaaaatgcaggaaatttagctatgttggtaaccaacagtcgctcaaaagaagataatgttttaaatgatattagtctagctgtcttgagtgtttta

SEQ ID NO: 2226 - protein, 759 aa, Streptococcus pneumoniae
  pullulanase, putative; Cellular location: cytoplasm; Similar to strain R6 sequence 15903069 (0.E+01)
MYNYPMRIHYHRKNGEYDTCSFVKSQDQRIDLLTYKEDYFGALFSFEHPSSHVIESLNFVVHTGQTSKEYSIRFNHYPLLTEVWILEGDDRIYYSENPAIASPFYKNQNPFAFDKAINSASFDHHWGYQGELGCRVEDNQAHFSLWSPTATEVQVVVYESAANDAPVWKTFEMKRGNSYSYNHKDNTIGVWSLDVEEDLVGKTYQYQVQFPHHQTLTRDPYTIATSPDGKRSAILSHVEKQVENFEVKHGSEATWRLENPCKAVICEMHIRDLTKSPTSGVDEHLRGTFLGAAQAGTVNQYGQSTAFDYIKKLGYNYVQLQPIADRHKEYDEDGNVTYNWGYDPQNYNAPETSFSTNPDDPAQVIRDLKVMVQAYHDAGIGVIMDVVYNHTFSVVDAPFQTTVPDYYYRMNPDGTFQNGTGVGNETASEHEMFRKYMIDSLLYWVQEYNIDGFRFDLMGIHDVKTMQMIRQSLDEIDSNIILYGEGWDMGTGLAPYDKAKKDNAYQMPNIGFFNDNQRDAVKGGEVYGAIKSGFVSGAATEPILAKAILGSRELGSYTHPNQVLNYVEAHDNYNLHDLLATLHPDQSSEQIMRKVETATAMNLLMQGMAFMEIGQEFGRTKLVATGENGELTHDDRERAMNSYNAPDSVNQVNWNLINERQDSIEFIRQVIRLKTKTGAFSYSSYDEIYHHVFVHSAIEHSGYLIYEVHGKEHLLVVVNAKSEPYQFENAGNLAMLVTNSRSKEDNVLNDISLAVLSVL

SEQ ID NO: 2227 - DNA, 1422 bp, Streptococcus pneumoniae
ttgacaagatatcagaatttagtaaatggaaaatggaaatcatctgaacaagaaattacgatttattcaccaatcaatcaagaagaattgggtacagttccagccatgactcagactgaagctgatgaggctatgcaagctgcgcgtgcagccctgccagcatggcgagctttatcagcagttgaacgtgcggcttatttgcataaaacagcagctattttagaacgcgataaggaagaaattggtactatccttgccaaagaagtagcaaaagggattaaagcagcaattggagaagtagtgcgtacagcagacttgattcgttatgctgctgaggaaggtctccgtatcactggacaagcaatggaaggtggtggttttgaggcaacaagtaaaaacaaactggctgttgtccgtcgtgaaccagttggtatcgtgctagcgattgctccctttaattatccagttaatttatctgcttctaaaattgcacctgccttgattgcagggaatgtggtcatgtttaagccaccaacacaaggttccatttctggactcttgttggctaaagcatttgaagaagcagggattccggcaggtgttttcaacaccattacaggtcgtggttcagaaattggggattatatcattgagcacaaagaagtcaacttcatcaactttacaggttcaactcctattggagaacgtattggtcgtttagctggtatgcgtcctatcatgttggaacttggtgggaaagatgcagctcttgtactagaagatgcagatttggaacatgctgccaagcaaattgttgcgggagcctttagctactcaggacaacgttgcacggccattaaacgtgtcattgttctcgaaagtgtagcagataaattagctactttgcttcaggaagaagtttctaaattaacagttggtgatccatttgacaatgctgatattacacctgttattgacaatgcttcagccgacttcatttggggcttgattgaggatgcacaagaaaaagaagctcaggctcttacaccaatcaaacgtgagggcaatcttctctggccagtgctttttgaccaagttacaaaagatatgaaagtggcatgggaagagccatttggtcctgttttaccaatcattcgtgtggctagtgtagaggaagctattgcctttgccaacgaatctgaattcggccttcaatcatcagtctttacaaatgatttcaaaaaagcctttgaaattgctgaaaaacttgaagtaggtacagtccacattaataataaaacccagcgtggtccagataatttcccattccttggtgtcaaaggttctggagctggagtgcaaggaattaaatatagcattgaagcgatgacaaatgtcaaatccattgtttttgatgtgaaa

SEQ ID NO: 2228 - protein, 474 aa, Streptococcus pneumoniae
  glyceraldehyde-3-phosphate dehydrogenase, NADP-dependent (gapN); Cellular location: cytoplasm; Similar to strain R6 sequence 15903072 (0.E+01)
MTRYQNLVNGKWKSSEQEITIYSPINQEELGTVPAMTQTEADEAMQAARAALPAWRALSAVERAAYLHKTAAILERDKEEIGTILAKEVAKGIKAAIGEVVRTADLIRYAAEEGLRITGQAMEGGGFEATSKNKLAVVRREPVGIVLAIAPFNYPVNLSASKIAPALIAGNVVMFKPPTQGSISGLLLAKAFEEAGIPAGVFNTITGRGSEIGDYIIEHKEVNFINFTGSTPIGERIGRLAGMRPIMLELGGKDAALVLEDADLEHAAKQIVAGAFSYSGQRCTAIKRVIVLESVADKLATLLQEEVSKLTVGDPFDNADITPVIDNASADFIWGLIEDAQEKEAQALTPIKREGNLLWPVLFDQVTKDMKVAWEEPFGPVLPIIRVASVEEAIAFANESEFGLQSSVFTNDFKKAFEIAEKLEVGTVHINNKTQRGPDNFPFLGVKGSGAGVQGIKYSIEAMTNVKSIVFDVK

SEQ ID NO: 2229 - DNA, 102 bp, Streptococcus pneumoniae
atgtttttattatactacctttttagagaagattcaagtaaattactatacttctttaattattttgaaaatctacaacaagttcacttactcgttcaattg

SEQ ID NO: 2230 - protein, 34 aa, Streptococcus pneumoniae
  hypothetical protein; Cellular location: cytoplasm
MFLLYYLFREDSSKLLYFFNYFENLQQVHLLVQL

SEQ ID NO: 2231 - DNA, 738 bp, Streptococcus pneumoniae
atggataatagagaagcattaaaaacctttatgacgggtgaaaatttttatctccaacattatctaggagcacatagggaagaactaaatggagagcatggctataccttccgtgtttgggcacctaatgctcaggctgttcacttggttggtgattttaccaactggattgaaaatcagattccaatggtaagaaatgattttggggtctgggaagtctttaccaatatggctcaagaagggcatatttacaaatatcatgtcacacgtcaaaatggtcatcaactgatgaagattgacccttttgctgtcaggtatgaggctcgtccaggaacaggggcaatcgtaacagagcttcctgagaagaaatggaaggatggactttggctggcacgaagaaaacgttggggctttgaagagcgtcctgtcaatatttatgaagttcacgctggatcatggaaaagaaattctgatggcagtccttatagttttgcccagctcaaggatgaactcattccttatctcgttgaaatgaactatactcatattgagtttatgcccttgatgtcccatcctttgggcttgagttgggggtatcagcttatgggttacttcgctttagagcatgcttatggccgaccagaggagtttcaagattttgtcgaggagtgtcatacccataatattggggttattgtggactgggtaccagtcactttaccatcaacgatgatgcct

SEQ ID NO: 2232 - protein, 246 aa, Streptococcus pneumoniae
  1,4-alpha-glucan branching enzyme, FRAMESHIFT (glgB); Cellular location: cytoplasm; Similar to strain R6 sequence 15903073 (0.E+01)
MDNREALKTFMTGENFYLQHYLGAHREELNGEHGYTFRVWAPNAQAVHLVGDFTNWIENQIPMVRNDFGVWEVFTNMAQEGHIYKYHVTRQNGHQLMKIDPFAVRYEARPGTGAIVTELPEKKWKDGLWLARRKRWGFEERPVNIYEVHAGSWKRNSDGSPYSFAQLKDELIPYLVEMNYTHIEFMPLMSHPLGLSWGYQLMGYFALEHAYGRPEEFQDFVEECHTHNIGVIVDWVPVTLPSTMMP

SEQ ID NO: 2233 - DNA, 1035 bp, Streptococcus pneumoniae
ttggatggtattcgtgtggatgctgttagcaacatgctctatttggactatgatgatgctccatggacacctaataaagatggcggaaatctcaactatgaaggttattatttccttcagcgcttgaatgaggttattaagttagaatatccagatgtgatgatgattgcagaagaaagttcgtctgcgatcaagattacgggaatgaaagagattggtggtctaggatttgactacaaatggaacatgggctggatgaatgatatcctccgtttctacgaagaagatccgatctatcgtaaatatgactttaacctggtgactttcagctttatgtatgttttcaaggagaattatctcttgccattctcgcacgatgaagtggttcatggcaagaagagtatgatgcataagatgtggggagatcgttacaatcaattcgcaggcttgcgcaatctctatacgtaccaaatttgtcaccctggtaagaaattgctcttcatgggtagcgaatacggtcaattcctagaatggaaatctgaagaacagttggaatggtctaacctagaagacccaatgaatgctaagatgaagtatttcgcttctcagctaaaccagttttacaaagatcatcgctgtctgtgggaaattgataccagctatgatggtattgaaatcattgatgcggataatcgagaccagagtgttctttcctttattcgtaagggtaaaaagggagaaatgttagtctgtatctttaatatggtacctgttgagcggaaagattttacaatcggactacccgttgcaggaatttacgaagaagtatggaatactgagttggaagagtggggaggcgtttggaaagaacataatcaaactgttcaaacgcaagaaggactatggaaagattatgagcagaccttaacctttaccctaccggctatgggagcaagtgtatggaaaatcaaacgtcgcttgaaatctactaaaaccgtcacaaataaaaaccaaaaaggagtagaaaatgaaaaa

SEQ ID NO: 2234 - protein, 345 aa, Streptococcus pneumoniae
  1,4-alpha-glucan branching enzyme-related
MDGIRVDAVSNMLYLDYDDAPWTPNKDGGNLNYEGYYFLQRLNEVIKLEYPDVMMIAEESSSAIKITGMKEIGGLGFDYKWNMGWMNDILRFYEEDPIYRKYDFNLVTFSFMYVFKENYLLPFSHDEVVHGKKSMMHKMWGDRYNQFAGLRNLYTYQICHPGKKLLFMGSEYGQFLEWKSEEQLEWSNLEDPMNAKMKYFASQLNQFYKDHRCLWEIDTSYDGIEIIDADNRDQSVLSFIRKGKKGEMLVCIFNMVPVERKDFTIGLPVAGIYEEVWNTELEEWGGVWKEHNQTVQTQEGLWKDYEQTLTFTLPAMGASVWKIKRRLKSTKTVTNKNQKGVENEK

SEQ ID NO: 2235 - DNA, 1140 bp, Streptococcus pneumoniae
atgaaaaatgaaatgttagctttgattcttgctggtgggcaaggaactcgtctcggtaaactcactcaaagcatcgcaaaaccagctgtgcaatttggtgggcgctaccgtatcattgactttgccctatcaaactgtgccaactcagggattcacaatgttggggtcgttacacagtatcaaccacttgctctcaacaaccatattgggaatggttcaagctggggactagacggtattaattcaggtgtctctattcttcaaccttattctgcaagtgaaggaaatcgttggtttgaggggactagtcacgctatttaccaaaatatcgactatatcgacagtgtcaatcctgagtatgtcttgattttgtctggggatcacatctacaaaatggactatgatgatatgctccagtctcataaggataataatgccagcttgacagtagcagttttagacgtccctcttaaagaagcaagccgttttggtatcatgaacacagatgctaacaatcgtattgttgaatttgaagaaaaaccagctcaacctaaatctacaaaagcttctatgggaatctacatttttgattggcaacgccttcgtaatatgttagtcgctgctgaaaagagcaaggttggcatgtcagactttggtaaaaatgtcattccaaattaccttgagtcaggtgaaagtgtttatgcttacgaatttagtggttattggaaagatgttggtactattgagtcactttgggaagcgaacatggagtatatttctccagaaaatgccttggatagtcgtaaccgtcaatggaagatttactcaagaaacttgatttcaccaccaaacttcctcggggcaaatgctcatgtggaagactcattagttgtagacggatgtttcgttgatggaactgttaaacattctatcctttcaacaggcgcgcaagttcgcgaaggagcggaagtccttgattcagttatcatgagtggagctatcattggtcaaggagctaagattaaacgtgccattattggtgaaggtgcgattatttctgacggtgtcgaaattgatggaacagatgaagtacaagttgtaggatataatgaagtagtgggggtagcaacagatgaagat

SEQ ID NO: 2236 - protein, 380 aa, Streptococcus pneumoniae
  glucose-1-phosphate adenylyltransferase (glgC); Cellular location: cytoplasm; Similar to strain R6 sequence 15903074 (0.E+01)
MKNEMLALILAGGQGTRLGKLTQSIAKPAVQFGGRYRIIDFALSNCANSGIHNVGVVTQYQPLALNNHIGNGSSWGLDGINSGVSILQPYSASEGNRWFEGTSHAIYQNIDYIDSVNPEYVLILSGDHIYKMDYDDMLQSHKDNNASLTVAVLDVPLKEASRFGIMNTDANNRIVEFEEKPAQPKSTKASMGIYIFDWQRLRNMLVAAEKSKVGMSDFGKNVIPNYLESGESVYAYEFSGYWKDVGTIESLWEANMEYISPENALDSRNRQWKIYSRNLISPPNFLGANAHVEDSLVVDGCFVDGTVKHSILSTGAQVREGAEVLDSVIMSGAIIGQGAKIKRAIIGEGAIISDGVEIDGTDEVQVVGYNEVVGVATDED

SEQ ID NO: 2237 - DNA, 1137 bp, Streptococcus pneumoniae
atgaagattgataaatattctgccattttaggaaatacagttggttttcacaatatgtcgacattgacggaccaccgtccagtagcaagtttgccatttggtgggaaatatcgtttgattgacttcccactttcaagccttgctaatgcaggtgttcgtagtgtctttggtattttccagcaggataatatcagctcagtatttgaccatattcgttcaggacgcgagtggggcttatcaacccttcttagccattactatctaggaatttacaatacccgtgtagaaagtagtacagttggaaaagaatactaccaacagcttcttacttatttgaaacgttctggctcaaaccaaacggttgccctcaactgcgatgttcttattaacattgatttgaaccaagttttccacctacatagtacaacaaaagagcctatcactgtagtttataaaaaactagctaagaaagatatttcagaagtaaatgcaatcttggatgtagatgaaacagaccatgttctttctcataaactctttgatagcaagtcaacagctgaaacgttcaatatgtctacagatatctttgtcgttgatacaccttggttgattgaacacttggaagaagaagctaaaaaagaacatccagagaaattgcgctatgttttacgggatttggctgtaaaagagggagctttcgcctacgagtacacgggctatctagccaatattcactctgttaaatcttattatcaagcgaatatcgatatgcttgaatcacaaaaattctattctcttttctcaccaaaccaaaagatttatacaaaggtcaaaaacgaagagccaacttactatgctaatacatctaaggtaagcacttctcagtttgcctctggtagtattattgaaggtcaagtagctaattctgttctatcacgtaatattcatgtccataaggatagcttggttaaagatagcctgctcttccctcgtgttgttattggagaaggggctcaggtcgaatatgctatcttggacaaaggggttgaagttgagcatggtgttgtgattcgaggaactgcagaacatccagttgtggttaagaaaggtgctaaagtaacagaggatattcattca

SEQ ID NO: 2238 - protein, 379 aa, Streptococcus pneumoniae
  glycogen biosynthesis protein GlgD (glgD); Cellular location: cytoplasm; Similar to strain R6 sequence 15903075 (0.E+01)
MKIDKYSAILGNTVGFHNMSTLTDHRPVASLPFGGKYRLIDFPLSSLANAGVRSVFGIFQQDNISSVFDHIRSGREWGLSTLLSHYYLGIYNTRVESSTVGKEYYQQLLTYLKRSGSNQTVALNCDVLINIDLNQVFHLHSTTKEPITVVYKKLAKKDISEVNAILDVDETDHVLSHKLFDSKSTAETFNMSTDIFVVDTPWLIEHLEEEAKKEHPEKLRYVLRDLAVKEGAFAYEYTGYLANIHSVKSYYQANIDMLESQKFYSLFSPNQKIYTKVKNEEPTYYANTSKVSTSQFASGSIIEGQVANSVLSRNIHVHKDSLVKDSLLFPRVVIGEGAQVEYAILDKGVEVEHGVVIRGTAEHPVVVKKGAKVTEDIHS

SEQ ID NO: 2239 - DNA, 1431 bp, Streptococcus pneumoniae
atgaaaattttatttgtagcagcagagggtgcacccttttcaaaaacaggtggtttgggagacgtcattggcgctcttccaaaatcactggtaaaagctgggcacgaagttgcagtgattttaccctactatgatatggtagaggctaaatttggaaatcagattgaagatgtgcttcattttgaggtgagcgttggttggcgcagacagtattgtggaattaagaaaacagtattaaatggtgtaaccttctactttattgacaatcaatattatttcttccgtggtcatgtttacggtgattttgatgacggagaacgctttgcctttttccaactggctgccattgaggctatggaaaggattgactttattcctgatcttctccatgttcatgactaccatacagctatgattcctttcttgttgaaggaaaaataccgttggattcaagcctatgaggacattgaaacagttttaaccattcataatttagaattccaaggacaattttcagaaggaatgttgggtgatttgtttggagttggctttgaacgttacgctgatggcacccttcgatggaacaactgtctgaactggatgaaggcaggtattctctatgcgaaccgtgtttcaaccgtttcacctagctatgctcatgaaattatgactagtcagtttggatgtaatttggatcagattcttaaaatggagtctggtaaagtatctggtatcgtgaatgggattgatgctgatctttataatcctcagacggatgctcttttagactatcatttcaatcaggaagatttgtctgggaaagccaaaaataaggcaaaattgcaagaaagagttggcttgcctgttagagcagacgttccactggtgggaattgtttctcgtttgacacgtcaaaaaggttttgatgtggtggtcgaaagtcttcaccatatcttgcaagaagatgttcagattgttcttttgggaactggcgatccagcctttgaaggagctttctcatggtttgctcagatttacccagacaagctatcaacaaatatcacttttgatgtcaaacttgctcaggaaatctacgctgcttgtgacctcttcctcatgccaagtcgttttgaaccgtgtggcttgtctcaaatgatggctatgcgttatggaaccttgccattggtccatgaagttggaggcttgcgagatacagttcgcgctttcaatccaatcgaaggaagcggtactggctttagctttgacaatctatctccttattggttaaattggactttccaaacagcattggacttgtatagaaaccatccagacatttggagaaacctacaaaaacaagctatggagagtgacttctcatgggatacagcctgcaagtcataccttgacttgtaccatagtttagttaat

SEQ ID NO: 2240 - protein, 477 aa, Streptococcus pneumoniae
  glycogen synthase (glgA); Cellular location: cytoplasm; Similar to strain R6 sequence 15903076 (0.E+01)
MKILFVAAEGAPFSKTGGLGDVIGALPKSLVKAGHEVAVILPYYDMVEAKFGNQIEDVLHFEVSVGWRRQYCGIKKTVLNGVTFYFIDNQYYFFRGHVYGDFDDGERFAFFQLAAIEAMERIDFIPDLLHVHDYHTAMIPFLLKEKYRWIQAYEDIETVLTIHNLEFQGQFSEGMLGDLFGVGFERYADGTLRWNNCLNWMKAGILYANRVSTVSPSYAHEIMTSQFGCNLDQILKMESGKVSGIVNGIDADLYNPQTDALLDYHFNQEDLSGKAKNKAKLQERVGLPVRADVPLVGIVSRLTRQKGFDVVVESLHHILQEDVQIVLLGTGDPAFEGAFSWFAQIYPDKLSTNITFDVKLAQEIYAACDLFLMPSRFEPCGLSQMMAMRYGTLPLVHEVGGLRDTVRAFNPIEGSGTGFSFDNLSPYWLNWTFQTALDLYRNHPDIWRNLQKQAMESDFSWDTACKSYLDLYHSLVN

SEQ ID NO: 2241 - DNA, 643 bp, Streptococcus pneumoniae
atgtctcaagtaaaaggcttgtgtgttttggatgtagatggaaccttaatcctagaagaagtgattgatcttttagggagagaggcaggtcatgaggcggaaatttcgcagattacaagtcgagcaatgcgaggagagttggtctttgaaagcagtttaagaaaaagagtgtccttgttggaaggtcttcctattttggtctttgataacgtcttcaactcaattcatctatcgctaaatgtcccagagttcatctctattctccaaaagaatggcatcctagttggtctggtgtctggtggatttacaccaatagttggagagattagcaaaatcccttggtattgcctatttcactgccaactagcttgaagtcaaagaaggtcttttaacaggaaaattagttggacaaattataagtccccaggtcaaaaaagagactctggaaaaatggagaaagaaactaaaactttctaaagaaagaacggtggcaatcggtgatggggttaataatctattaatgttgaagtcggcgaagttaggaatcgccttttgtgccaaagaagtgctcaaaaaagaaataccacatcatgttgacaagagggattttttagaagttctccctttgattgactgtttagaa

SEQ ID NO: 2242 - protein, 123 aa, Streptococcus pneumoniae
  phosphoserine phosphatase SerB, putative, FRAMESHIFT
MSQVKGLCVLDVDGTLILEEVIDLLGREAGHEAEISQITSRAMRGELVFESSLRKRVSLLEGLPILVFDNVFNSIHLSLNVPEFISILQKNGILVGLVSGGFTPIVGEISKIPWYCLFHCQLA

SEQ ID NO: 2243 - DNA, 156 bp, Streptococcus pneumoniae
gtggcaatcggtgatggggttaataatctattaatgttgaagtcggcgaagttaggaatcgccttttgtgccaaagaagtgctcaaaaaagaaataccacatcatgttgacaagagggattttttagaagttctccctttgattgactgtttagaa

SEQ ID NO: 2244 - protein, 52 aa, Streptococcus pneumoniae
  phosphoserine phosphatase-related
MAIGDGVNNLLMLKSAKLGIAFCAKEVLKKEIPHHVDKRDFLEVLPLIDCLE

SEQ ID NO: 2245 - DNA, 1113 bp, Streptococcus pneumoniae
atgaagattgtaattgcaccggattcgtttaaggaaagcttgacagctcaacaggtagctgaagcaataaaaagaggcttccaacaatcgatagcagatgtagaatgtctcctctgccctgttggtgatgggggagaaggtactgtagatgctatccgacattctcttgacctaaaagaaaaatggatccaagtgacagacccttttggacaaaaagaagccatgcgctattttcaaaaaggggaactggcactatttgaagtagctgacttggttggtcttggaaaaattccgctagagaaacgaaatccacttcaaatccaaacttgtggtattggagagttgattcttcatctcatctctaaagggattaaagatatttatatcggtgttggtggcacggccagtaatgatggaggactggggattgctgctggtttaggttatcaattttatgatagggatggaaatgtcttgcctgcttccggtcaatccttattaaacttagcttctgtttcaacagaaaattgctataaaattcctgaaggtgttcaaattcatattttagcagatgtcgtgagtcccttatgtggtcatcaaggtgcgacttacacttttggcaatcaaaaaggtctacatccgactatgtttgcagtcgtagatcaggcgatccaagatttttatgaaaaattctcacctgcaacattagaaattaaaggagcaggagcaggtggaggccttgctggtggtttgtgtgcctttgctcaggcaagtatcgtgtctggaattgatacctgcttggacttaatcaactttgataagaaagtttcagatgctgacttggttgttgttggagaaggaagacttgatagtcaaagctttgctgggaaagcgcctataggtgttgcaaaaagaacccctgttggagttcctgttattgctatttgcggtagtcttgctgaagatttacctcccctaccatttgaaaatatccaagctgtcttttctattttggagaaaagtgaacctttagaagatagtttgaaaaatgccagtttctatctggagcgcacggctgccaatattgggcacttattaaatatgtgcaagatt

SEQ ID NO: 2246 - protein, 371 aa, Streptococcus pneumoniae
  conserved hypothetical protein TIGR00045; Cellular location: membrane; Similar to strain R6 sequence 15903078 (0.E+01)
MKIVIAPDSFKESLTAQQVAEAIKRGFQQSIADVECLLCPVGDGGEGTVDAIRHSLDLKEKWIQVTDPFGQKEAMRYFQKGELALFEVADLVGLGKIPLEKRNPLQIQTCGIGELILHLISKGIKDIYIGVGGTASNDGGLGIAAGLGYQFYDRDGNVLPASGQSLLNLASVSTENCYKIPEGVQIHILADVVSPLCGHQGATYTFGNQKGLHPTMFAVVDQAIQDFYEKFSPATLEIKGAGAGGGLAGGLCAFAQASIVSGIDTCLDLINFDKKVSDADLVVVGEGRLDSQSFAGKAPIGVAKRTPVGVPVIAICGSLAEDLPPLPFENIQAVFSILEKSEPLEDSLKNASFYLERTAANIGHLLNMCKI

SEQ ID NO: 2247 - DNA, 444 bp, Streptococcus pneumoniae
atgacagatttatcaaaacaattacttgaaaaagctcatggtgggttaaaaataaatccggatgagcaaagacgctatcttggtacttttgaggaaagagttcttggatatgtagatattgacacagcaaatagccctcagttagaaaaaggctttttatttattttagaaaaccttcaggaaaaagcagagccactatttgtgaagatttcaccaactatcgaatttgataagcaagttttctacttaaaagaagcaaaagaaactgatagtcaagccaccatagtatctgaagagcatattacttctccttttggcctggttattcatagcaatgcaccagttcaagtagaagaaaaagaccttcgacttgcttttccaaaactttgggaagttaaaaaggaagaaccagccaaaacatccttatggaagaaatggtttagc

SEQ ID NO: 2248 - protein, 148 aa, Streptococcus pneumoniae
  hypothetical protein; Cellular location: cytoplasm; Similar to strain R6 sequence 15903079 (6.E-83)
MTDLSKQLLEKAHGGLKINPDEQRRYLGTFEERVLGYVDIDTANSPQLEKGFLFILENLQEKAEPLFVKISPTIEFDKQVFYLKEAKETDSQATIVSEEHITSPFGLVIHSNAPVQVEEKDLRLAFPKLWEVKKEEPAKTSLWKKWFS

SEQ ID NO: 2249 - DNA, 1302 bp, Streptococcus pneumoniae
atgtcaattattactgatgtttacgctcgcgaagtcctagactcacgcggtaacccaacacttgaagtagaagtttacactgaatcaggtgctttcggacgtggtatggttccatcaggagcttctactggtgaacacgaagcagttgaacttcgcgacggtgacaaatctcgttacggtggtcttggtacacaaaaagctgttgacaacgtaaacaacatcattgctgaagctatcattggctacgatgtacgtgatcaacaagctattgaccgtgctatgatcgcacttgacggtactcctaacaaaggtaaattgggtgcgaatgcaatcctcggtgtgtctatcgctgtagctcgtgctgctgctgactaccttgaaatcccactttacagctatcttggtggattcaacactaaagttcttccaactccaatgatgaacatcatcaacggtggttctcactctgacgctccaatcgctttccaagagttcatgatcttgccagttggtgcgccaacatttaaagaagcccttcgttacggtgctgaaatcttccacgctcttaagaaaatccttaaatcacgtggtttggaaactgccgtaggtgacgaaggtggattcgctcctcgtttcgaaggaactgaagatggtgttgaaactatccttgctgcgattgaagctgctggatatgtaccaggtaaagacgtatttatcggatttgactgtgcttcatcagaattctacgataaagaacgtaaagtttacgactacactaaatttgaaggtgaaggtgctgctgttcgtacatctgcagaacaaatcgactaccttgaagaattggttaacaaatacccaatcatcactattgaagatggtatggatgaaaacgactgggatggttggaaagctcttactgaacgtcttggtaagaaagtacaacttgttggtgacgacttcttcgtaacaaacactgactaccttgcacgtggtatccaagaaggtgctgctaactcaatccttatcaaagttaaccaaatcggtactcttactgaaacttttgaagctatcgaaatggctaaagaagctggttacactgctgttgtatcacaccgttcaggtgaaactgaagattcaacaatcgctgatattgcagttgcaactaacgcaggacaaatcaagactggttcactttcacgtacagaccgcatcgctaaatacaaccaattgcttcgtatcgaagaccaacttggtgaagtagctgaatatcgtggattgaaatcattctacaaccttaaaaaa

SEQ ID NO: 2250 - protein, 434 aa, Streptococcus pneumoniae
  enolase (eno); Cellular location: cytoplasm; Similar to strain R6 sequence 15903080 (0.E+01)
MSIITDVYAREVLDSRGNPTLEVEVYTESGAFGRGMVPSGASTGEHEAVELRDGDKSRYGGLGTQKAVDNVNNIIAEAIIGYDVRDQQAIDRAMIALDGTPNKGKLGANAILGVSIAVARAAADYLEIPLYSYLGGFNTKVLPTPMMNIINGGSHSDAPIAFQEFMILPVGAPTFKEALRYGAEIFHALKKILKSRGLETAVGDEGGFAPRFEGTEDGVETILAAIEAAGYVPGKDVFIGFDCASSEFYDKERKVYDYTKFEGEGAAVRTSAEQIDYLEELVNKYPIITIEDGMDENDWDGWKALTERLGKKVQLVGDDFFVTNTDYLARGIQEGAANSILIKVNQIGTLTETFEAIEMAKEAGYTAVVSHRSGETEDSTIADIAVATNAGQIKTGSLSRTDRIAKYNQLLRIEDQLGEVAEYRGLKSFYNLKK

SEQ ID NO: 2251 - DNA, 1161 bp, Streptococcus pneumoniae
atgaatatcaaagaaaaaatcaaaaagaatggccaaagagtttattatgctagtgtttatctaggcgttgaccaactaacgggcaaaaaagcccgtacaactgttacagcaaccactaaaaagggcgttaaagtaaaagcgcgtgatgcgatcaatacttttgctgctaatggctatacagttaaagacaagccgacaattacaacatataatgagcttgtaaaagtttggtgggatagttacaagaatacagttaagccaaatactcgccaatccatggagggattggttagagtgcatttattgcctgtatttggcgattacaagctatctaaacttactacgcctattcttcaacagcaagtaaacaaatgggctgacaaggcaaataaaggcgaaaaaggggcatttgctaactactctttgctccataacatgaataagcgtattttgaaatatggcgtagctatccaggtaatacaatacaacccagctaatgatgtcatcgttccacgcaaacagcaaaaagaaaaggctgctgtcaaatacttagacaacaaagaattaaaacagtttcttgattatttagatgctctggatcaatcaaattatgagaacttatttgatgttgttctgtataagactttattggccactggttgccgtattagtgaggctctggctcttgaatggtctgatattgacctagaaagcggtgttatcagcatcaataagacactaaaccgctatcaggaaataaactcacctaaatcaagcgctggttatcgtgatataccaatagacaaagccacattacttttactgaaacaatacaaaaaccgtcaacaaattcagtcttggaaattaggccgatctgaaacagttgtattctctgtatttacggagaaatatgcttatgcttgtaacttacgcaaacgcctaaataagcattttgatgctgctggagtaactaacgtatcatttcatggtttccgccatacacatactactatgatgctctatgctcaggttagcccgaaagatgttcagtatagattaggccactctaatttaatgatcactgaaaatacttactggcatactaaccaagagaatgcaaaaaaagccgtctcaaattatgaaacagctatcaacaattta

SEQ ID NO: 2252 - protein, 387 aa, Streptococcus pneumoniae
  integrase/recombinase, phage integrase family; Cellular location: cytoplasm; Similar to strain R6 sequence 15903090 (2.E-08)
MNIKEKIKKNGQRVYYASVYLGVDQLTGKKARTTVTATTKKGVKVKARDAINTFAANGYTVKDKPTITTYNELVKVWWDSYKNTVKPNTRQSMEGLVRVHLLPVFGDYKLSKLTTPILQQQVNKWADKANKGEKGAFANYSLLHNMNKRILKYGVAIQVIQYNPANDVIVPRKQQKEKAAVKYLDNKELKQFLDYLDALDQSNYENLFDVVLYKTLLATGCRISEALALEWSDIDLESGVISINKTLNRYQEINSPKSSAGYRDIPIDKATLLLLKQYKNRQQIQSWKLGRSETVVFSVFTEKYAYACNLRKRLNKHFDAAGVTNVSFHGFRHTHTTMMLYAQVSPKDVQYRLGHSNLMITENTYWHTNQENAKKAVSNYETAINNL

SEQ ID NO: 2253 - DNA, 846 bp, Streptococcus pneumoniae
atgaaaataaataataaactcgttggagaacgtattcaaaatatccgtttaagccatggcgactctatggaaaaatttggagaaaaatttaatactagcaaaggtacagttaacaactgggaaaaaggtcgcaatttaccaaataaagaaaacctactaaaaattgcatctattggaaaaatgagtgttgaagagttactctacggcgattacaatacttatctacacttaaagattatggatttagctcctgaatgtataaaaaattatgatgagtataactctttacacgatgatataacaaataaagcgttacagatcgctcaaaataccatttctaagattgattatcaaatttcagacgaaacgatcaaaaaatttattgatttagctatcgaacaatcgagagatttgcaaggaaatttgttgaaaaataacttatctaattttgactattcactttttggaggtactagaaaccgagaatatttctattttgggtatagacttacctataaagaaaaatatctatacactgccttactagctatactgaacgagtcaacaaaaacgatatatattgatgatataaatacagcaagattttttaacttctttggcaatgatattcctaattcgtctttaaaaaaaattgactatatcgcaccttcagaaattgtttcatttagtacgtacgttcgacaacgttctaaagtaattcctaaaattttggaacatatattaaaatcaagttttttattagagaatatagatgtttctggttacactgtaaatattttagaagatcaattaacaaaacatagaacaatcaaaattagtaaaaac

SEQ ID NO: 2254 - protein, 282 aa, Streptococcus pneumoniae
  transcriptional regulator; Cellular location: cytoplasm
MKINNKLVGERIQNIRLSHGDSMEKFGEKFNTSKGTVNNWEKGRNLPNKENLLKIASIGKMSVEELLYGDYNTYLHLKIMDLAPECIKNYDEYNSLHDDITNKALQIAQNTISKIDYQISDETIKKFIDLAIEQSRDLQGNLLKNNLSNFDYSLFGGTRNREYFYFGYRLTYKEKYLYTALLAILNESTKTIYIDDINTARFFNFFGNDIPNSSLKKIDYIAPSEIVSFSTYVRQRSKVIPKILEHILKSSFLLENIDVSGYTVNILEDQLTKHRTIKISKN

SEQ ID NO: 2255 - DNA, 213 bp, Streptococcus pneumoniae
ttgttatttttccttagccgtgtacgttggtttggtcgcctgtacacggcttttattttcgctttaattccattttttgcactctttacttttgcatacttctgtttaaaaaatatatcttctattgtaatatctggaaataaagggattaaaagatttttaatcttaagtttttctttatctgaaaattgtgtcttcccactttctttgttg

SEQ ID NO: 2256 - protein, 71 aa, Streptococcus pneumoniae
  hypothetical protein
MLFFLSRVRWFGRLYTAFIFALIPFFALFTFAYFCLKNISSIVISGNKGIKRFLILSFSLSENCVFPLSLL

SEQ ID NO: 2257 - DNA, 351 bp, Streptococcus pneumoniae
atgagtaaagaaaacaagatgcgtggatataggaatatgctaggtttaacacaagagaaacttggaaaaaaacttggtatatctaagcagagttattacaacaaagaaagtgggaagacacaattttcagataaagaaaaacttaagattaaaaatcttttaatccctttatttccagatattacaatagaagatatattttttaaacagaagtatgcaaaagtaaagagtgcaaaaaatggaattaaagcgaaaataaaagccgtgtacaggcgaccaaaccaacgtacacggctaaggaaaaataacaaaactcaagcaaaggcaaggcgcgtggttttgttaggtatt

SEQ ID NO: 2258 - protein, 117 aa, Streptococcus pneumoniae
  transcriptional regulator, putative; Cellular location: cytoplasm
MSKENKMRGYRNMLGLTQEKLGKKLGISKQSYYNKESGKTQFSDKEKLKIKNLLIPLFPDITIEDIFFKQKYAKVKSAKNGIKAKIKAVYRRPNQRTRLRKNNKTQAKARRVVLLGI

SEQ ID NO: 2259 - DNA, 264 bp, Streptococcus pneumoniae
atggaaattctgtctaaagaaatacagttacagggcttacaacttcttaaacagactcttgaaactttagttgagctagaaaaacaacgatctagtaagttagatttaatttctcgtaaagaattaatggatctgctaggtataagtgctacaacccttgataactgggaggatcttggtcttaaacgatatcagactccgatggatggagctaagaaagtattctatcgtccgtcagatgtgtatttatttttagcaataaaa

SEQ ID NO: 2260 - protein, 88 aa, Streptococcus pneumoniae
  hypothetical protein; Cellular location: cytoplasm
MEILSKEIQLQGLQLLKQTLETLVELEKQRSSKLDLISRKELMDLLGISATTLDNWEDLGLKRYQTPMDGAKKVFYRPSDVYLFLAIK

SEQ ID NO: 2261 - DNA, 150 bp, Streptococcus pneumoniae
atgaaaattgttactttcaaaccaactaaacaaatagacgatgggttttatctgccaggtattgacattctatttgtctcagacaaagcagatgccaaggataaagaagatgtaattttatttctttcaagaaatgggttaaacaagtct

SEQ ID NO: 2262 - protein, 50 aa, Streptococcus pneumoniae
  hypothetical protein; Cellular location: cytoplasm
MKIVTFKPTKQIDDGFYLPGIDILFVSDKADAKDKEDVILFLSRNGLNKS

SEQ ID NO: 2263 - DNA, 159 bp, Streptococcus pneumoniae
ttgtatcgctgtatcgatatcctccgtggaatagtagatttattttctaatatcattcaagacttgtttaacccatttcttgaaagaaataaaattacatcttctttatccttggcatctgctttgtctgagacaaatagaatgtcaatacctggcaga

SEQ ID NO: 2264 - protein, 53 aa, Streptococcus pneumoniae
  hypothetical protein
MYRCIDILRGIVDLFSNIIQDLFNPFLERNKITSSLSLASALSETNRMSIPGR

SEQ ID NO: 2265 - DNA, 615 bp, Streptococcus pneumoniae
atggaactagtttacatggacggtaagaaagagccgtacaccacaagcgagatcatcgctgaatgtgctgaagtacaacaccacactatcacgcgcttaataagagaaaataaggctgactttgaagagttgggaatacttggatttaaaatccataaattagatactagaggacaacctaaaaaatcctatattctgaacgagcaacaggctacttttctgatcacttatttaaagaataccgaaacagtacggcaattcaaactaaacctagtcaaagcattctttgaaatgcgtgaggaactttctgaaattcgtctgcagagggcgctagaaaaaccgaaaagaaaaaccttgcatgacagtatagaaacatggcctaatgcaccaaagcacgcgcatagcaccatgaacaacttgctactaaaggcagtaacagacatgaacgctaagcagttaagagaagagcgtgggggctataacggtatcgatagcttgactagtgaggagttggagcagtaccaggcatttgaggatatggcaatagctatgattgaattgaaaatgagttatcaggaaattaagacaatgatgtttagaagtaaaaaaataagc

SEQ ID NO: 2266 - protein, 205 aa, Streptococcus pneumoniae
  hypothetical protein; Cellular location: cytoplasm
MELVYMDGKKEPYTTSEIIAECAEVQHHTITRLIRENKADFEELGILGFKIHKLDTRGQPKKSYILNEQQATFLITYLKNTETVRQFKLNLVKAFFEMREELSEIRLQRALEKPKRKTLHDSIETWPNAPKHAHSTMNNLLLKAVTDMNAKQLREERGGYNGIDSLTSEELEQYQAFEDMAIAMIELKMSYQEIKTMMFRSKKIS

SEQ ID NO: 2267 - DNA, 450 bp, Streptococcus pneumoniae
atgacagaaacaacatatgagaatttaactagacgtatagacagaattagcgcagaaatgcgagaaattagcgaagaaaatggcctaagaatcctttctttattggaaagtcagacaaaatccatcaaagatgagttgtcccgtttactttggattgaacttcctgaattgaatgaaagccataaaatcgaagcggtctctaaaagcactacgggaatgtttttcgcccctggtatttttgaaatggacgctatgcgaaaagcattctttaaacgccaagctaagcacttttttgagaacgaagcagagcaacaggcgtatatagagcatgctgaaaaggagtatttagaggctactgtaaccttaaaagatattctttttaactctaaaaatggaactcagaaagcaaataaaagttgtcttatagagaagtttgaggaggcaatgcaa

SEQ ID NO: 2268 - protein, 150 aa, Streptococcus pneumoniae
  hypothetical protein; Cellular location: cytoplasm
MTETTYENLTRRIDRISAEMREISEENGLRILSLLESQTKSIKDELSRLLWIELPELNESHKIEAVSKSTTGMFFAPGIFEMDAMRKAFFKRQAKHFFENEAEQQAYIEHAEKEYLEATVTLKDILFNSKNGTQKANKSCLIEKFEEAMQ

SEQ ID NO: 2269 - DNA, 444 bp, Streptococcus pneumoniae
atgacactagatttagacaacatgacacaagcagaatttgatgaggtaatggctgaaatccagctacaaagtccaaacatttttcaactgatttctgattttgtaaataaaaaagtaaccagtgtggaaatagacgacttgttgaatatgaagcgagctgagacaggtaaagcattgtcaccgttacagattcaagaattgcagtatatgctagaagattttagcccagagcttatccatgaggcgttaaaagaggctgtcagtcagggtaaagcaaactttgcatacatcaaggtaatccttaaccgttggaaacaggacaatttattgacggtggaacttgttagaaatagcagggcagcgcgtgaggctaaaaaacagcaaaccaatcaactagagcctaccagctatgaagattggataccaacacaagaaaaaccattt

SEQ ID NO: 2270 - protein, 148 aa, Streptococcus pneumoniae
  conserved domain protein; Cellular location: cytoplasm; Similar to strain R6 sequence 15903476 (4.E-14)
MTLDLDNMTQAEFDEVMAEIQLQSPNIFQLISDFVNKKVTSVEIDDLLNMKRAETGKALSPLQIQELQYMLEDFSPELIHEALKEAVSQGKANFAYIKVILNRWKQDNLLTVELVRNSRAAREAKKQQTNQLEPTSYEDWIPTQEKPF

SEQ ID NO: 2271 - DNA, 924 bp, Streptococcus pneumoniae
ttggataccaacacaagaaaaaccattttaggaggtcagaaaatgaaatcattacaatctagtttaggaaatattgagacatttaaactagacgaattgtgtcctaagcatgaaatacagctaacacaaatcaaaggagaaagacatgtagtagtggggtggaatgagaacggagaggcaataaaagaagttcgctgtatcccaccctattgtgaacaatgccaagaagaacagaaaaagcaagatgaagaagatgcgattgctgataatttgaatgctaaactatatatgcaaacttataatgtgttgatgagcaataagagctatgtagcagatgagtttaaaactaaaacttttgatgattttaatgctgtaacatcagaagaaaagcgatttttagaatttgcaaaaggtcaggtacaaaaatatcttgatggcatgaggggaaatacgcttatcacaggaggtacagggattggaaaaacacttttatcagttgctattgccaaaggtataaatgaggggtataagacaaaaggagaacctaagagtgtgctttttgtaagcctaaccgaaatgatcaaacaaattaaagaggggtggaattatggtaaaggtgcaacacttacagagtttgaagctactgaactcatgaagtctgttgattacttaattattgatgatttaggagcaaaaaatgctgttattaagcctaagagtgactgggagcaggatttactctttgacgtgctaaacaatcgtgaaaataccatttttaataccaacctagatagtgatgagcttaagatagtttacaatgagcggaattatagccgtattctaaaaggacttgagggtaacacttttaaggcgtttggcatcaaatataagcggtactcactcaatcagttaaagagtaatatg

SEQ ID NO: 2272 - protein, 308 aa, Streptococcus pneumoniae
  GTP-binding protein, putative; Cellular location: cytoplasm
MDTNTRKTILGGQKMKSLQSSLGNIETFKLDELCPKHEIQLTQIKGERHVVVGWNENGEAIKEVRCIPPYCEQCQEEQKKQDEEDAIADNLNAKLYMQTYNVLMSNKSYVADEFKTKTFDDFNAVTSEEKRFLEFAKGQVQKYLDGMRGNTLITGGTGIGKTLLSVAIAKGINEGYKTKGEPKSVLFVSLTEMIKQIKEGWNYGKGATLTEFEATELMKSVDYLIIDDLGAKNAVIKPKSDWEQDLLFDVLNNRENTIFNTNLDSDELKIVYNERNYSRILKGLEGNTFKAFGIKYKRYSLNQLKSNM

SEQ ID NO: 2273 - DNA, 108 bp, Streptococcus pneumoniae
ttggttagtttgccacacttggtttatatggtcgtggaaagcatggctattacttctcaaagggcgatttctcaccccatgaaaagtgtctatttttgtttaggtttg

SEQ ID NO: 2274 - protein, 36 aa, Streptococcus pneumoniae
  hypothetical protein; Cellular location: cytoplasm
MVSLPHLVYMVVESMAITSQRAISHPMKSVYFCLGL

SEQ ID NO: 2275 - DNA, 648 bp, Streptococcus pneumoniae
atgactgaaaacaaggatgataaattattaaaaatgatggagaaaggctttgttttatactcaaaaaatggtataattaagtatattgaaattccagagcatgggagtattaagctaaaagctcaagatgggcaattagtttataaggaagtgattatcgggaaagtgtatgcagagcaagaacttttaaaatataaaaaagagggcgaaaactattcccaaaatactgctcagctattgtatcagcaactagaaaaagagaaaaatgctgaactagcaaaccatgaatcaaaagaagagcctattacagcagatgatgcagctgaactaagtttattatctagtatcaaattaacagtggcagaaatgagagaatacctagaaaaatataaaaataaacctctagctcttagaaaattagaagatattatggataatgatactacccttgcttatatcgaaattgacatggagcaattcagccaacagcaacgccttgaaaagctagtacatttccttgatagaaaaattgattatttccacggtggtttacttattaacggagataagattgatttagtacagcatgaaatgattgttgagggcaattcagaggcaatggatgcagaattgcagaattatctagca

SEQ ID NO: 2276 - protein, 216 aa, Streptococcus pneumoniae
  hypothetical protein; Cellular location: cytoplasm
MTENKDDKLLKMMEKGFVLYSKNGIIKYIEIPEHGSIKLKAQDGQLVYKEVIIGKVYAEQELLKYKKEGENYSQNTAQLLYQQLEKEKNAELANHESKEEPITADDAAELSLLSSIKLTVAEMREYLEKYKNKPLALRKLEDIMDNDTTLAYIEIDMEQFSQQQRLEKLVHFLDRKIDYFHGGLLINGDKIDLVQHEMIVEGNSEAMDAELQNYLA

SEQ ID NO: 2277 - DNA, 426 bp, Streptococcus pneumoniae
atggcaggaaatgaaaatgataaccttacgtccaagcaaattaaattcatagatgccatgcttaccgagccaacgatagacaaagcatgtcaaaaagcaggggtatcacgcgcaacaggtcataagtatctaaaagttgcagcggttaaaaagacattgaggataaagcaagatgagatgatggataaaacaactcaaatgctttatttagcatcatctaacgctgtttctgtactcaatgatattatgatggacagtaaggtcaacccgtttataagaactcaagcagcaaaggctatacttgaacaatcttataagacccatgaaatttttggagtagtaaggcagattgaagaattgaggttggaaattgaggaagtatctaaaggaaatcaaagagttacaagaactcaaggagttattaag

SEQ ID NO: 2278 - protein, 142 aa, Streptococcus pneumoniae
  hypothetical protein; Cellular location: cytoplasm
MAGNENDNLTSKQIKFIDAMLTEPTIDKACQKAGVSRATGHKYLKVAAVKKTLRIKQDEMMDKTTQMLYLASSNAVSVLNDIMMDSKVNPFIRTQAAKAILEQSYKTHEIFGVVRQIEELRLEIEEVSKGNQRVTRTQGVIK

SEQ ID NO: 2279 - DNA, 309 bp, Streptococcus pneumoniae
atgccagagtttattattgttgaaggaaacaatgacttaggggaatttttccaaatagatggcgagctatttagtgataatgaacttttagaaaaccttaaaaaatggcgtgagtgggaagtgccagttattattgatgattggtgcaatcgtatcctaaacgaggatgaaacggaaatactatactttcctactcatgaggataagatgaactatattagggtggaaaaagatttagaacctttgtatcatacatcgaacaagatctatgcaactatttctaaaagtgagtggttagaattgttaaat

SEQ ID NO: 2280 - protein, 103 aa, Streptococcus pneumoniae
  hypothetical protein; Cellular location: cytoplasm
MPEFIIVEGNNDLGEFFQIDGELFSDNELLENLKKWREWEVPVIIDDWCNRILNEDETEILYFPTHEDKMNYIRVEKDLEPLYHTSNKIYATISKSEWLELLN

SEQ ID NO: 2281 - DNA, 408 bp, Streptococcus pneumoniae
atgacaaagaagaaaattgagcgtatttctgtaatacaccgagaaaagattttatggctcaagtggtatttcatgcgagataaagaacaacctaagtatagtgtccttgagcgtaaaatgtttgatgctgctaaaaatcaagatatgctagcttatcaaaaatacgcaactatcaagcagataacagatattagggtacaaacaagtgaggctgacattttagaggctgtaaaagaggtttatgtgtacaatcacatgaatgttatcggagcttgtcagcggatattatttatcagtcaatcaccagcttatgataagttaaataagtggtttaatatctattctgatttgtattttagcgttgtacccttgcccaaaatgggggtatatcatgagatggtaggtatc

SEQ ID NO: 2282 - protein, 136 aa, Streptococcus pneumoniae
  hypothetical protein; Cellular location: cytoplasm
MTKKKIERISVIHREKILWLKWYFMRDKEQPKYSVLERKMFDAAKNQDMLAYQKYATIKQITDIRVQTSEADILEAVKEVYVYNHMNVIGACQRILFISQSPAYDKLNKWFNIYSDLYFSVVPLPKMGVYHEMVGI

SEQ ID NO: 2283 - DNA, 363 bp, Streptococcus pneumoniae
gtgcataatatctatttttacaaggataaaaacggcaatgagcctgtttttgattatatgcgagagcttaccagtaaaaaagggaaagatagcagaattaagcttaataaaattaatgattatattgagttgttaagccaacatggaacacgcgcaggcgaaccatatattaagcatttagatgctgaaatttgggagctgagaccacttagagatagaattttatttgttgcttggatggatggtagttttgttttactgcatcattttatgaaaaggacacagaaaacacccaaaagagagattgagcaagctaaacgtgaacttgcagatttaaaagaaagaggtttagacaatgaaaaa

SEQ ID NO: 2284 - protein, 121 aa, Streptococcus pneumoniae
  conserved hypothetical protein; Cellular location: cytoplasm
MHNIYFYKDKNGNEPVFDYMRELTSKKGKDSRIKLNKINDYIELLSQHGTRAGEPYIKHLDAEIWELRPLRDRILFVAWMDGSFVLLHHFMKRTQKTPKREIEQAKRELADLKERGLDNEK

SEQ ID NO: 2285 - DNA, 291 bp, Streptococcus pneumoniae
atgaaaaataatgctattggtagtaactggaaagatgtaagagctgaattattcagcaaagaggaaattttggaaagtgatatgcgcgtggctatcatgagtgagcttatcgaggctagaaatgaaaagggtattagtcagaagaaactagaggagatgagcggtgttagtcagccagttatcgctagaatggaaacaggaaagacaagcccacaacttgatacagtattaaaagtgttggcaagtcttggtaagaccttagctgttgtaccattagagcatgagcaggtt

SEQ ID NO: 2286 - protein, 97 aa, Streptococcus pneumoniae
  conserved hypothetical protein; Cellular location: membrane; Similar to strain R6 sequence 15902557 (1.E-34)
MKNNAIGSNWKDVRAELFSKEEILESDMRVAIMSELIEARNEKGISQKKLEEMSGVSQPVIARMETGKTSPQLDTVLKVLASLGKTLAVVPLEHEQV

SEQ ID NO: 2287 - DNA, 1188 bp, Streptococcus pneumoniae
ttgacagcagaaattggaatattaaataaaaatggtgttgtattggcttctgatagcgctgtaaccttatcagacgggaaaaattcaaaagtttttaatagcgcccgaaaattattcactttatcaaaagaacattccgtggggatcatgatatatgggaacgcttcgtttatggaaattccgtgggaggtaattttaaatgagtttaagcaggctattggcacagatttattagataatactgcccaatacgttgaaaagctaatagaatttttaatttcctttaaacatctacaagttgaggatttattaagaaattatattgtcagaagtacaagaagtattttggacagcattgcctatgaagcgcaagaaacagctgatttaagagtttctaatggtgaaaccatcactctagatgattttaataaaattttattaaatgctataactaattttagtttagaaatttcaaaagtagaagctgaaagtaattttgaattttttgaagctgagttagagttaataaaaagcattgtagacgatgtttttaaatcctttcctcatactgatgatgaggttgaagttattgctaaatctttatataaagcgattttcattggatatgactcaacaaacataactggattagttatagcaggttatggtacagacgagatatttccatctataagacaaattgaattatatggaattttttctaaacgattaatttggaaagttattaatgaaagtgtgataaatcatcataaaacttgtcatataatcccttttgcacagtcagagatggttgagacgattatgaatggtatagatcctaacttaaatgtatatatcgcagagcaagtatcatcagttatggagaaaaatggattgggtgatgaaattgagaatatatttgaaaatatatcatctatacagcaaaaatattatataaatcctataatagaccttattggaatgcaaccacttaatgaaatggcgagtacagctaaaacatttattgaattaacttcatttaagagaaaaattgtcaacactcttgaaacagtaggaggtccggtagatgtacttgctatttctaaaggagaaggaccaatttggattgatagaaaatactattttgacattgataaaaatcttgattacaggatgagaaaggagagt

SEQ ID NO: 2288 - protein, 396 aa, Streptococcus pneumoniae
  hypothetical protein; Cellular location: cytoplasm
MTAEIGILNKNGVVLASDSAVTLSDGKNSKVFNSARKLFTLSKEHSVGIMIYGNASFMEIPWEVILNEFKQAIGTDLLDNTAQYVEKLIEFLISFKHLQVEDLLRNYIVRSTRSILDSIAYEAQETADLRVSNGETITLDDFNKILLNAITNFSLEISKVEAESNFEFFEAELELIKSIVDDVFKSFPHTDDEVEVIAKSLYKAIFIGYDSTNITGLVIAGYGTDEIFPSIRQIELYGIFSKRLIWKVINESVINHHKTCHIIPFAQSEMVETIMNGIDPNLNVYIAEQVSSVMEKNGLGDEIENIFENISSIQQKYYINPIIDLIGMQPLNEMASTAKTFIELTSFKRKIVNTLETVGGPVDVLAISKGEGPIWIDRKYYFDIDKNLDYRMRKES

SEQ ID NO: 2289 - DNA, 174 bp, Streptococcus pneumoniae
atggatttcttaaaccattctttcgatactaaaaaagttattaatacaaaaataaatgcagttaactccaaaaataatgttggaaagaatttcatcgatgtttaccgtgaaatgaaagaagtgccaaacaataaaattcatcaatcaaaagttaacgtggcgttaattaaaaaa

SEQ ID NO: 2290 - protein, 58 aa, Streptococcus pneumoniae
  hypothetical protein; Cellular location: cytoplasm
MDFLNHSFDTKKVINTKINAVNSKNNVGKNFIDVYREMKEVPNNKIHQSKVNVALIKK

SEQ ID NO: 2291 - DNA, 378 bp, Streptococcus pneumoniae
atgaggcttttttgtcttgttcttgtttcaattgactatataaattgtctaagcgaaacaaccgataagaattggcacaaaagcgaccgtatttttgttaccaatacaggaaaaacagttcatagttctatcttgagcaagtctctccagcgagcaaacgaacgccttaaaaaaccaattcccaaacatctgtcccctcacatcttcagacacaccactattagcatcttatcagaaaataaaattcctttaaaaacaatcacggacagggttggtcatcccgactctgaagtcactacttccatctacacccacgtcacaaagaacatgaaagatgaagcaatcaatgtactggataaagttatgaaaaagattttt

SEQ ID NO: 2292 - protein, 126 aa, Streptococcus pneumoniae
  integrase/recombinase, phage integrase family, truncation; Cellular location: cytoplasm
MRLFCLVLVSIDYINCLSETTDKNWHKSDRIFVTNTGKTVHSSILSKSLQRANERLKKPIPKHLSPHIFRHTTISILSENKIPLKTITDRVGHPDSEVTTSIYTHVTKNMKDEAINVLDKVMKKIF

SEQ ID NO: 2293 - DNA, 336 bp, Streptococcus pneumoniae
ttggttgcaggtctaacaaatggtgagttaatcgctccaatgacttacgaagagacgatgacgagcgacttttttgaagcttggtttcagaagtttctcttaccaacattaaccacaccatcggttattattatggataatgcaagattccatagaatggggaagctagaactcttgtgtgaagagtttgggtataaacttttacctcttcctccctactcacctgagtacaatcctattgagaaaacatgggctcatatcaaaaagcacctcaaaaaggtattaccaagttgcaataccttttatgaggcttttttgtcttgttcttgtttcaat

SEQ ID NO: 2294 - protein, 112 aa, Streptococcus pneumoniae
  IS630-Spn1, transposase Orf2; Cellular location: cytoplasm; Similar to strain R6 sequence 15903081 (3.E-64)
MVAGLTNGELIAPMTYEETMTSDFFEAWFQKFLLPTLTTPSVIIMDNARFHRMGKLELLCEEFGYKLLPLPPYSPEYNPIEKTWAHIKKHLKKVLPSCNTFYEAFLSCSCFN

SEQ ID NO: 2295 - DNA, 414 bp, Streptococcus pneumoniae
atgtggtataatcttcttatggcatattcaatagattttcgtaaaaaagttctctcttattgtgagcgaacaggtagtataacagaagcatcacacgttttccaaatctcacgtaataccatttatggctggttaaagctaaaagagaaaacaggagagctaaaccaccaagtaaaaggaacaaaaccaagaaaagttgatagagatagacttaaaaactatcttactgacaatccagatgcttatttgactgaaatagcttctgactttggctgtcatccaactaccatccactatgcgctcaaagctatgggctacactcgaaaaaagaaccacacctactatgaacaagacccagaaaaagtagccttatttcttaagaattttaatagtttaaagcacctaacacctgtt

SEQ ID NO: 2296 - protein, 138 aa, Streptococcus pneumoniae
  IS630-Spn1, transposase Orf1 FRAMESHIFT; Cellular location: cytoplasm; Similar to strain R6 sequence 15902766 (5.E-63)
MWYNLLMAYSIDFRKKVLSYCERTGSITEASHVFQISRNTIYGWLKLKEKTGELNHQVKGTKPRKVDRDRLKNYLTDNPDAYLTEIASDFGCHPTTIHYALKAMGYTRKKNHTYYEQDPEKVALFLKNFNSLKHLTPV

SEQ ID NO: 2297 - DNA, 99 bp, Streptococcus pneumoniae
ttggaatttttcatcaccctatattataccatgattagcctcgtaaatctgttaaaatatttaggccatcctttcttttcttcatcatctgctaaatct

SEQ ID NO: 2298 - protein, 33 aa, Streptococcus pneumoniae
  hypothetical protein
MEFFITLYYTMISLVNLLKYLGHPFFSSSSAKS

SEQ ID NO: 2299 - DNA, 3300 bp, Streptococcus pneumoniae
gtgatgaaaaattccaacgaggctgagatgaaattactttatactgatattcggacttctttgacagaaattctaacaagagaggcagaagagctagttgcagctggcaagcgggtcttctacattgcccccaactctctttcttttgaaaaggaacgcgccgtgctggaatacttgtcccagcaggcttctttttcgattaccgtcacgcgctttgctcaaatggctcgctatctggtcttgaatgatttaccagctaaaactactcttgatgatatcggtcttgggttggccttttacaaatgccttgccgaactcgatcccaaggacttgcgtgtttatggcgctattaagcaggatcctcaattgatccagcagttaattgagctttaccatgagatgaccaaatctcagatgagttttttggacttggagaatttaacagatgaggataagagggcggatttactcttgatttttgagaaagtaacagcctatcttaatcaaggtcagttagcccaggaaagtcagttgtcccatttgattgaggctattgagaatgacaaggtaagtagtgattttaatcaaatcgccttggtcattgacggctttactcgtttttctgctgaggaagagcgggttgtggacttacttcacggcaaaggtgttgagattgttatcggggcttatgctagtaagaaagcctataccagtccttttagcgagggcaatctctaccaagccagcgtaaaatttctccatcatctggcttctaaataccaaacgcctgctcaggactgttctcaaactcatgagaagatggatagttttgacaaggcctctcgtttgttggagtcttcttatgacttttcagaactcgctttggatgtcgatgagaaagaccgtgaaaatttacaaatctggtcttgtttgacgcaaaaggaggagttggagctagtagcccgtagtattcgtcagaaattacatgagaactcagacctgagctacaagcattttcgtattctcttgggggatgtagcttcttaccagttatctctcaaaaccatttttgaccagtatcagattcctttttatcttggtagaagcgaagccatggctcatcatcccttgactcagtttgtcgagtctattttagctttaaaacgttaccgttttcgtcaggaggatttgattaatcttcttagaactgatttgtatactgacctcagtcagtctgatattgatgcttttgagcaatatatccgctatcttggtatcaatggcttgccagcctttcagcaaaccttcaccaaatcccaccatggaaaatttaatcttgagcgtttgaatgtcctccgcctgagaattttagcacctcttgaaaccctctttgccagccgaaaacaaaaggctgaaaaactcctacaaaaatggagtgtctttctaaaagaaggagctgtgaccaagcagttacaagatttgacaaccactttggaagctgtagaacaggaaagacaagccgaagtttggaaggctttctgccatgttttagaacaatttgcgactgtttttgctggttcacaggttagtctggaagacttcctagccttgctccattctggaatgagtttgtcccaataccgtaccattccagcaacagtggacactgttctggtgcagagttacgatttgattgcaccattgactgctgactttgtctatgctattggactaactcaggacaatttaccaaaaatttctcaaaacaccagtcttctgacagatgaagaaaggcaaaacctaaaccaagcgaccgaagaaggcgttcaattactgattgccagcagtgaaaatctcaagaaaaatcgctacactatgctttccttggtcaattctgctcgtaagcagttgttcttgtcggctccaagcctttttaacgaaagtgaaagtaaggaatctgcctatcttcaagagttgatccattttggatttaggcggagagagaagaggatgaatcacaaaggactgtctaaggaggatatggggtcctatcacagtcttttgtctagtctggttgcctatcaccagcagggtgagatgagcgatactgagcaagatttgacttttgtcaaggttctgtcgcgtgtcataggtaaaaaactagatcagcaaggtctggaaaatccagctatcccaaccagtccaagcagcaagaccttagccaaggacaccttgcaagctctctatcctgccaaacaggagttttacctgtctacgtcgggtttgacagagttttatcgcaatgaatacagttatttcctacgctacgttttaggcttgcaggaggaattacgtttgcatcctgatgcccgtagtcacgggaatttcttgcatcgtatctttgaacgcgccttacagttgcctaatgaagattcctttgaccaacgtctagaacaagctattcaagaaaccagtcaagaacgcgaatttgaagctatttatcaagaaagtttggaagcccagtttaccaaggaagttttgcttgatgttgcacggacaactggacatattctccgacacaatccagccatcgaaaccatcaaagaagaagcaaattttggtggaaaagaccaagcctttattcaattagacaatggacgcagtgtctttgtacgaggcaaggtggaccggattgaccgtttgaaagctaatggagcgataggagtagtagactacaaatccagtctgactcagttccagtttcctcatttctttaatgggctcaattctcagttaccaacctatcttgctgccctaaaaagagaaggggagcagaactttttcggcgccatgtacttggaaatggctgaacctgtccaatctctgatggcggtaaaaagtctggcaggagcagtggtagaagccagcaaatctatgaaataccaagggctcttcttggaaaaagaaagcagttatttaggcgaattttataacaaaaacaaggctaatcaactgacagatgaggaatttcagctcctactggactacaatgcctatctttacaagaaagctgctgagaagattttagcaggccggttcgccatcaatccttatactgaaaatggcagaagcattgccccatacgtccagcaacatcaggctattacaggctttgaagccaattaccatctgggccaagcccgtttcctagaaaagttggacctagctgatggcaagcgtctggtcggagaaaaactcaagcaagcttggcttgaaaaaataagagaggagttgaatcga

SEQ ID NO: 2300 - protein, 1100 aa, Streptococcus pneumoniae
  exonuclease RexB (rexB); Cellular location: cytoplasm; Similar to strain R6 sequence 15903083 (0.E+01)
MMKNSNEAEMKLLYTDIRTSLTEILTREAEELVAAGKRVFYIAPNSLSFEKERAVLEYLSQQASFSITVTRFAQMARYLVLNDLPAKTTLDDIGLGLAFYKCLAELDPKDLRVYGAIKQDPQLIQQLIELYHEMTKSQMSFLDLENLTDEDKRADLLLIFEKVTAYLNQGQLAQESQLSHLIEAIENDKVSSDFNQIALVIDGFTRFSAEEERVVDLLHGKGVEIVIGAYASKKAYTSPFSEGNLYQASVKFLHHLASKYQTPAQDCSQTHEKMDSFDKASRLLESSYDFSELALDVDEKDRENLQIWSCLTQKEELELVARSIRQKLHENSDLSYKHFRILLGDVASYQLSLKTIFDQYQIPFYLGRSEAMAHHPLTQFVESILALKRYRFRQEDLINLLRTDLYTDLSQSDIDAFEQYIRYLGINGLPAFQQTFTKSHHGKFNLERLNVLRLRILAPLETLFASRKQKAEKLLQKWSVFLKEGAVTKQLQDLTTTLEAVEQERQAEVWKAFCHVLEQFATVFAGSQVSLEDFLALLHSGMSLSQYRTIPATVDTVLVQSYDLIAPLTADFVYAIGLTQDNLPKISQNTSLLTDEERQNLNQATEEGVQLLIASSENLKKNRYTMLSLVNSARKQLFLSAPSLFNESESKESAYLQELIHFGFRRREKRMNHKGLSKEDMGSYHSLLSSLVAYHQQGEMSDTEQDLTFVKVLSRVIGKKLDQQGLENPAIPTSPSSKTLAKDTLQALYPAKQEFYLSTSGLTEFYRNEYSYFLRYVLGLQEELRLHPDARSHGNFLHRIFERALQLPNEDSFDQRLEQAIQETSQEREFEAIYQESLEAQFTKEVLLDVARTTGHILRHNPAIETIKEEANFGGKDQAFIQLDNGRSVFVRGKVDRIDRLKANGAIGVVDYKSSLTQFQFPHFFNGLNSQLPTYLAALKREGEQNFFGAMYLEMAEPVQSLMAVKSLAGAVVEASKSMKYQGLFLEKESSYLGEFYNKNKANQLTDEEFQLLLDYNAYLYKKAAEKILAGRFAINPYTENGRSIAPYVQQHQAITGFEANYHLGQARFLEKLDLADGKRLVGEKLKQAWLEKIREELNR

SEQ ID NO: 2301 - DNA, 3648 bp, Streptococcus pneumoniae
atgaagcttattccctttttaagtgaggaggagattcaaaaactgcaagaagcagaagcaaattcgagcaaggaacagaagaaaactgccgagcaaatcgaagctatctacacttctgcccagaatatcctggtctcagcatcggctggttctggaaagacctttgtcatggcagagcgcattctggaccaattggcgcgtggtgtcgaaatttctcaactctttatctcaacctttaccgtcaaggctgcaactgaacttaaagaacgtttagagaaaaaaatcagcaagaaaatccaagaaacagatgatgtcgacctcaaacaacacttgggtcgccagttggcagacctacccaacgctgccattggaaccatggattctttcacacaaaaattccttggcaaacatggttatctgcttgatattgcacctaatttccgtattttacaaaaccaaagcgagcaacttattctcgaaaacgaagtctttcatgaggtctttgaagcgcattaccaaggtaaacagaaagagacctttagtcatttgctgaaaaactttgctgggcgtggcaaggacgaacggggtctgcgccagcaggtctataaaatctatgacttcctccaatccaccagtaatcctcaaaagtggctgagtgaatctttcctcaaaggatttgagaaagctgattttaccagtgaaaaagaaaaactgaccgagcaaatcaaacaagccctttgggatttggaaagctttttccgttaccatctggataacgatgccaaggagtttgcaaaggctgcctatttagaaaatgttcagttaattctggatgaaattggctccctaaatcaggagtccgatagtcaggcttatcaggcagtgcttgcgcgtgttgtcgccatctctaaggagaaaaacggtcgagctctgactaatgccagccgtaaggctgatttgaagcccctggctgatgcctacaacgaagagagaaagacccagtttgctaaactaggacaattatcagaccagatagcgattctcgactatcaagaacgttatcatggagacacttggaaactagctaaaaccttccaatctttcatgagcgattttgtagaggcttatcgtcagagaaaacgacaggaaaatgccttcgaattcgctgatatcagccattacaccattgagattttagagaatttcccacaagttcgtgagtcttatcaggagcgcttccatgaagtcatggtcgatgagtatcaggataccaaccatattcaagaacggatgctggaattgttgtctaatggccacaatcgctttatggtgggagatatcaagcaatccatctatcgtttccgtcaggcagacccgcagattttcaatgagaaattccaacgctatgcgcaaaatccccaagaaggcaggctcattatcctcaaggaaaatttccgtagtagttcagaagtgctgtcagcaaccaatgatgtctttgaacgtctcatggaccaagaggtcggcgaaatcaactatgataacaagcaccagcttgtttttgccaataccaaactgactcccaatccagacaacaaggcagcatttctcctctacgacaaggacgatacaggtgaggaagaagagagtcaaacagaaacgaaactaacaggcgaaatgcgcttagttatcaaggagattctgaaacttcatcaagaaaaaggtgttgcctttaaggaaattgcccttctgacctccagccgcagtcgtaatgaccagattctcctcgccctgtctgagtacggaattcctgtcaaaactgacggagagcaaaacaattatctccaatccctagaagtgcaagtcatgctagacactcttcgtgtcattcacaatcccctgcaagactacgccttggttgcccttatgaagtctccaatgtttggttttgatgaggatgagctagcacgtttgtcccttcagaaagcagaggataaagtccacgaaaatctctatgagaaactggtcaatgcacaaaaaatggcaagtagtcaaaaaggcttgattcacacagctctagctgaaaaactaaagcaattcatggatatcctagcttcttggcgcttgtatgccaaaacccactctctctatgacttgatttggaagatttacaacgaccgtttttattatgactatgttggggctttgccgaatggtcctgctaggcaggccaatctctatgccctagcactgcgtgctgatcaatttgaaaagagcaatttcaaaggtttgtcgcgttttattcgtatgattgaccaagtcttagaagcccagcacgatttggcaagcgtggccgtcgcaccgccaaaagatgcagtagagctcatgaccatccacaagagtaaagggctggagtttccttacgtctttatcctcaatatggatcaagatttcaacaagcaagactctatgtcagaagtcattctcagtcgtcagaatggtcttggtgtcaaatatattgccaagatggagacaggggcagtagaagaccactatcctaaaaccatcaaactctccattcctagtctgacctataggcagaacgaagaggaattacagctagcaagctattctgagcagatgcgtttgctgtatgttgctatgacgcgggctgagaaaaagctctatcttgtcggcaagggttctcgtgaaaagctggaatccaaggaatacccagcagccaaaaatgggaaactaaatagcaatactagactgcaagcacggaatttccaagattggctttgggctatcagtaaagtgtttactaaggacaagctcaactttagttatcgttttattggcgaagatcagttgaccagagaagctatcggagagttggaaaccaagagtcctctccaagatagctcccaagcagacaatcgtcagtcagataccatcaaagaagctctggaaatgctgaaggaggtggaagtttataatactcttcaccgcgcagctattgaacttcctagtgttcaaaccccaagtcaaatcaagaaattctacgaaccagttatggatatggaaggtgtcgagattgctggtcaaggtcagtcagtaggcaagaaaatcagcttcgatttgccagatttttcaaccaaagaaaaggtaactggagctgagattggtagtgctactcacgaactcatgcagagaattgacctcagccagcaactaacccttgctagcctaacagaaacactcaaacaagttcaaactagccaagctgtcagagacaagatcaatcttgataaaattcttgctttctttgacacagtactcggtcaggaaattcttgctaataccgaccatctttatcgcgagcaacctttctccatgctcaaacgagaccaaaagagtcaggaagactttgttgtccgtggtatccttgatggctatctgctttacgaaaacaaaattgttctgttcgactacaagacagaccgctatgatgaaccaagtcaactcgtagaccgctatcgtggtcagttagctctatacgaagaggctttatcacgagcctattcgattgaaaatattgaaaaatacttgattttactcggtaaagacgaggttcaagttgtaaaagta

SEQ ID NO: 2302 - protein, 1216 aa, Streptococcus pneumoniae
  exonuclease RexA (rexA); Cellular location: cytoplasm; Similar to strain R6 sequence 15903084 (0.E+01)
MKLIPFLSEEEIQKLQEAEANSSKEQKKTAEQIEAIYTSAQNILVSASAGSGKTFVMAERILDQLARGVEISQLFISTFTVKAATELKERLEKKISKKIQETDDVDLKQHLGRQLADLPNAAIGTMDSFTQKFLGKHGYLLDIAPNFRILQNQSEQLILENEVFHEVFEAHYQGKQKETFSHLLKNFAGRGKDERGLRQQVYKIYDFLQSTSNPQKWLSESFLKGFEKADFTSEKEKLTEQIKQALWDLESFFRYHLDNDAKEFAKAAYLENVQLILDEIGSLNQESDSQAYQAVLARVVAISKEKNGRALTNASRKADLKPLADAYNEERKTQFAKLGQLSDQIAILDYQERYHGDTWKLAKTFQSFMSDFVEAYRQRKRQENAFEFADISHYTIEILENFPQVRESYQERFHEVMVDEYQDTNHIQERMLELLSNGHNRFMVGDIKQSIYRFRQADPQIFNEKFQRYAQNPQEGRLIILKENFRSSSEVLSATNDVFERLMDQEVGEINYDNKHQLVFANTKLTPNPDNKAAFLLYDKDDTGEEEESQTETKLTGEMRLVIKEILKLHQEKGVAFKEIALLTSSRSRNDQILLALSEYGIPVKTDGEQNNYLQSLEVQVMLDTLRVIHNPLQDYALVALMKSPMFGFDEDELARLSLQKAEDKVHENLYEKLVNAQKMASSQKGLIHTALAEKLKQFMDILASWRLYAKTHSLYDLIWKIYNDRFYYDYVGALPNGPARQANLYALALRADQFEKSNFKGLSRFIRMIDQVLEAQHDLASVAVAPPKDAVELMTIHKSKGLEFPYVFILNMDQDFNKQDSMSEVILSRQNGLGVKYIAKMETGAVEDHYPKTIKLSIPSLTYRQNEEELQLASYSEQMRLLYVAMTRAEKKLYLVGKGSREKLESKEYPAAKNGKLNSNTRLQARNFQDWLWAISKVFTKDKLNFSYRFIGEDQLTREAIGELETKSPLQDSSQADNRQSDTIKEALEMLKEVEVYNTLHRAAIELPSVQTPSQIKKFYEPVMDMEGVEIAGQGQSVGKKISFDLPDFSTKEKVTGAEIGSATHELMQRIDLSQQLTLASLTETLKQVQTSQAVRDKINLDKILAFFDTVLGQEILANTDHLYREQPFSMLKRDQKSQEDFVVRGILDGYLLYENKIVLFDYKTDRYDEPSQLVDRYRGQLALYEEALSRAYSIENIEKYLILLGKDEVQVVKV

SEQ ID NO: 2303 - DNA, 1176 bp, Streptococcus pneumoniae
atgacacttccagttagaaaatccctgcacgatgcagttttacaggcttcgaaagcggatacttgggaacaagctaccaaggaatggaatgaagtttcctttatttttaacggtatcggccgtagcaattgtgtctgtggaaatgccatcaaatacgcttatgaactctttaacggtgtcacaggccaacgcctctttccaattggtagcgactgtgttcgtcattttcatcgattgtcccttgaccagcaattggaagaggaagaaaaactgctcagaaaggttgaaaatctaaccagaaaagctcagaaaaaggaaaaaatcaaggtcaataaaagtaactttgacgagcgacttctaaaatggctctgggaaaaaggtgttttcaaacccaatcgtggcaatcaatttgcgcctgagagagactaccagcttttcctagaagtctttcagggaggaagttggaccaaggcggaaccaaagaaaaaggctcggatggaagaagtccttgaaaagtgtatcaaaccctttttacttgggaaatcggatgaccaactctaccttgtcaagctaggcaaggagaaaattgactacgaacaagaactccgtatccaggcagagaaagaacgcaagaagagggataaaatcgccaagcaatatgcagacaatctggttctagccatgggacccgcagagcgtgcttatcaagattactttggctttacagagaccctgactcaagaagaacgcaagtgggaaaaaattctttttggtaaaaatagagcagaacgagctatcaaggccaaacaataccaaaaagagctggaaaaagaccaacgaattgccagtcaggatccaattgaaagaaaacagaagcagacttggatcctcaattcctattttcgtgagcttcctgaagaaaaagctcgattttctagactcttattagaatatagaaaaagtggtgaagtacccttttcaactgaatacctgtcagatcatctcatcgactttttctataaaatgaaagcctttgaatttgaaatcgcaccagaacaagtccgagattttctaaaaaaaagcctgcaggaagaccatcgctcatcagcacaaggaagctggatagaaggaattctcctcaactgcctcaaaccatttttagaacgattagtgata

SEQ ID NO: 2304 - protein, 392 aa, Streptococcus pneumoniae
  hypothetical protein; Cellular location: cytoplasm; Similar to strain R6 sequence 15903085 (0.E+01)
MTLPVRKSLHDAVLQASKADTWEQATKEWNEVSFIFNGIGRSNCVCGNAIKYAYELFNGVTGQRLFPIGSDCVRHFHRLSLDQQLEEEEKLLRKVENLTRKAQKKEKIKVNKSNFDERLLKWLWEKGVFKPNRGNQFAPERDYQLFLEVFQGGSWTKAEPKKKARMEEVLEKCIKPFLLGKSDDQLYLVKLGKEKIDYEQELRIQAEKERKKRDKIAKQYADNLVLAMGPAERAYQDYFGFTETLTQEERKWEKILFGKNRAERAIKAKQYQKELEKDQRIASQDPIERKQKQTWILNSYFRELPEEKARFSRLLLEYRKSGEVPFSTEYLSDHLIDFFYKMKAFEFEIAPEQVRDFLKKSLQEDHRSSAQGSWIEGILLNCLKPFLERLVI

SEQ ID NO: 2305 - DNA, 6012 bp, Streptococcus pneumoniae
atggaaaagtattttggtgaaaaacaagagcgtttttcatttagaaaattatcagtaggacttgtatctgcaacgatttcaagtttattttttatgtctgtattagctagttcatctgtggatgctcaagaaactgcgggagttcactataaatatgtggcagattcagagctatcatcagaagaaaagaagcagcttgtctatgatattccgacatacgtggagaatgatgatgaaacttattatcttgtttataagttaaattctcaaaatcaactggcggaattgccaaatactggaagcaagaatgagaggcaagccctagttgctggtgctagcttagctgctatgggaattttaatttttgctgtttccaagaaaaaggttaagaataaaacggtattacatttagtattggttgcagggataggaaatggtgtcttagtttcagtccatgctttagaaaatcatcttttgctaaattacaatacggactatgaattgacctctggagaaaaattacctcttcctaaagagatttcaggttacacttatattggatatatcaaagagggaaaaacgacttctgagtctgaagtaagtaatcaaaagagttcagttgccactcctacaaaacaacaaaaggtggattataatgttacaccgaattttgtagaccatccatcaacagtacaagctattcaggaacaaacacctgtttcttcaactaagccgacagaagttcaagtagttgaaaaacctttctctactgaattaatcaatccaagaaaagaagagaaacaatcttcagattctcaagaacaattagccgaacataagaatctagaaacgaagaaagaggagaagatttctccaaaagaaaagactggggtaaatacattaaatccacaggatgaagttttatcaggtcaattgaacaaacctgaactcttatatcgtgaggaaactatggagacaaaaatagattttcaagaagaaattcaagaaaatcctgatttagctgaaggaactgtaagagtaaaacaagaaggtaaattaggtaagaaagttgaaatcgtcagaatattctctgtaaacaaggaagaagtttcgcgagaaattgtttcaacttcaacgactgcgcctagtccaagaatagtcgaaaaaggtactaaaaaaactcaagttataaaggaacaacctgagactggtgtagaacataaggacgtacagtctggagctattgttgaacccgcaattcagcctgagttgcccgaagctgtagtaagtgacaaaggcgaaccagaagttcaacctacattacccgaagcagttgtgaccgacaaaggtgagactgaggttcaaccagagtcgccagatactgtggtaagtgataaaggtgaaccagagcaggtagcaccgcttccagaatataagggtaatattgagcaagtaaaacctgaaactccggttgagaagaccaaagaacaaggtccagaaaaaactgaagaagttccagtaaaaccaacagaagaaacaccagtaaatccaaatgaaggtactacagaaggaacctcaattcaagaagcagaaaatccagttcaacctgcagaagaatcaacaacgaattcagagaaagtatcaccagatacatctagcaaaaatactggggaagtgtccagtaatcctagtgattcgacaacctcagttggagaatcaaataaaccagaacataatgactctaaaaatgaaaattcagaaaaaactgtagaagaagttccagtaaatccaaatgaaggcacagtagaaggtacctcaaatcaagaaacagaaaaaccagttcaacctgcagaagaaacacaaacaaactctgggaaaatagctaacgaaaatactggagaagtatccaataaacctagtgattcaaaaccaccagttgaagaatcaaatcaaccagaaaaaaacggaactgcaacaaaaccagaaaattcaggtaatacaacatcagagaatggacaaacagaaccagaaccatcaaacggaaattcaactgaggatgtttcaaccgaatcaaacacatccaattcaaatggaaacgaagaaattaaacaagaaaatgaactagaccctgataaaaaggtagaagaaccagagaaaacacttgaattaagaaatgtttccgacctagagttatacagtttgtcaaatggtacttataaacaacacatttcgttagagcaagttccaagcaatccaaatagctactttgttaaagtgaaatcttcttcattcaaagatgtatacctaccagtagcatcaatatcagaggaaagaaaaaatgataaaatcctttataaaatcacagcaaaagtagagaagcttcagcaggagatagaaagcagatataaagataattttaccttctatctagctaagaagggaacagaagaaacaacaaactttacttcctttagtaatctggtcaaagctataaaccaaaatccctctggaacctatcatttagcggccagcctgaatgctaacgaagtggagcttggtcctgatgaaagatcctatatcaaggacacctttactggtcgtttaatcggtgaaaaagatggcaagaattatgctatctataatttgaaaaaacctctgtttgaaaacttgagtggtgctacagtagaaaaactgagtctaaaaaatgttgctatttcagggaaagatgatatcggttcactggcaaatgaagctcagaataacacaaaaattaagcaagttcacgtcgatggtgttctggctggtgaacgtggtatcggtggtttgctggctaaggctgagcaatcaagcatcacagagagcagtttcaagggaagaattatcaacacttatgaaacgactgctgcctacaatatcggtggtatggtcggtcatttgacaggtgacaaggctttacttactaagtcaaaagcgacagtagccatttcatctaacacaaatacttcagatcagactgtgggtggacttgcaggcctagtagaccgagatgcacagatccaagatagctatgctgaaggtgatatcaacaatgtcaagcactttggtagagtcgctggagtggcaggcaatttgtgggatcgaacttctggtgatgttaggcatgctggaagtttgaccaatgttctcagcgatgttaatgtaaccaacggaaatgccatcactggttaccactataacgaaatgaaggtaaaggacacattcagcagcaaggccaacagagtctacaatgtcaccttggtcaaggatgaggtcgtcagcaaggaatcctttgaagaaagaggaacaatgctagatgcttctcaaattgcaagcaaaaaagcagaaatcaatcctctcattttaccaacagtggagccactttcaacaagtggcaaaaaagacagtgatttttctaaggtggcctattatcaagctaagcgcaacttgacttataaaaacattgaaaaattgctacctttctacaacaaggcaaccatcgtcaaatacggaaacctggtcaatgagaacagtcttttatatcaaaaagaactcttgtcagcagtcatgatgaaggacaaccaagtcatcacagacattgtttctaacaaacagactgcaaacaaactcttgcttcactacaaggatgatttatctgagaagctggatctcaaataccagaatgatttcgccaaattagcagaatatagtctgggcaatactggacttctctatacgccaaaccaattcctgtatgaccaaacctctatcatcaagcaagtcttacctgacttacaaaaggttgactatcattcagaagccatcagaaagacgctgggtatttctccaaacgtcaagcaaactgagctctatctagaagaccagttcgccaaaacaaaacaacaactggaagacagtttgaaaaaactcttgtcagcggatgctggactggctagtgctaaccccgtcactgaaggttatcttgtagataaaatcaaacgcaacaaggaagccttgctacttggcttgacctatctggaacggtggtataactttagctatggtcaggtgaatgtcaaagacctagttctgtaccatttggacttctttggtaaggggaatgcttcaccattagatactctgattgagttgggtaaatctggctttaacaatcttctagctaagaataatgtcgatacttatggtatcagtcttgccagtcaacatggaacgacagatttgtttagcacgctggaacattaccgaaaagtctttttaccaaatacaagcaataatgactggtttaaatcagagactaaggcttacattgtcgaagaaaaatccactatcgaagaggtgaaaacgaagcaagggttagctggcaccaagtattctatcggtgtttatgatcgtatcacgagtgccacatggaaataccgcaatatggtcttgcctctcctgaccttgccagagagatccgtatttgtcatctcgaccatgtctagtctaggatttggagcttatgatcgctaccgcagtagtgaccataaagcgggcaaggctctcaatgattttgttgaagaaaatgcgcgtgaaacagccaaacgtcagcgagatcactacgattattggtatcgtattttagacgacaatgcacgtgaaaaactttatagaaatattttgctttacgatgcttataaatttggcgatgataataccgtagggaaagctacagaagtggcagattttgataatccaaatcctgcaatgcaacatttctttggacctgttggaaataaagttgggcataatcaacacggtgcttatgctacaggtgatgcagtttattatatgggttatcgaatgttggataaggatggagctattacttatacgcatgagatgacacatgactcagatcaggacatttatcttggaggatatggtcgaagaagtggcttgggaccagagttctttgctaaaggattattacaagcaccagaccatccagatgatgcgaccattaccatcaactccatcttgaaacattcaaaatctgatagtacagaaagtcgacgattacaagtacttgatccaactacaagatttaataatgcagatgatttgaagcaatatgtccacaacatgtttgacgttgtttatatgttggaatatctcgaaggaaattcaattcttaaattggatacgaatcaaaaacaacaacttcttagaaaagttacaaatgagtaccatcctgatcctgatggaaataaggtctatgcaacaaatgttgtcagaaatctaacagtagaagaagttgaaagactacgttcattcaatgatttgattgataataatattctttcgtctagggaatatgcctcaggtaaatacgaaagaaatggctacttcactattaagttatttgcaccgatttatgctgcattaagtaatgatataggaacaccaggtgacctgatgggacgtcgtatagcctatgaactactagctgctaaaggctttaaagatggtatggtaccatatatctcaaaccaatacgaagaagaagccaaacaaaagggcaagacaatcaatctctacggtaaaacaagaggtttggttacagatgacttggttttggaaaaggtatttaataaccaatatcatacttggagtgagtttaagaaagctatgtatcaagaacgacaagatcagtttgatagattgaacaaagttacttttaatgatacaacacagccttggcaaacatttgccaagaaaactacaagcagtgtagatgaattacagaaattaatggacgttgctgttcgtaaggatgcagaacacaattactaccattggaataactacaatccagacatagatagtgaagtccacaagctcaagagagcaatctttaaagcctatcttgaccaaacaaatgattttagaagttcaatttttgagaataaaaaa

SEQ ID NO: 2306 - protein, 2004 aa, Streptococcus pneumoniae
  immunoglobulin A1 protease (iga); Cellular location: Peptidoglycan-bound (LPXTG); Similar to strain R6 sequence 15903086 (0.E+01)
MEKYFGEKQERFSFRKLSVGLVSATISSLFFMSVLASSSVDAQETAGVHYKYVADSELSSEEKKQLVYDIPTYVENDDETYYLVYKLNSQNQLAELPNTGSKNERQALVAGASLAAMGILIFAVSKKKVKNKTVLHLVLVAGIGNGVLVSVHALENHLLLNYNTDYELTSGEKLPLPKEISGYTYIGYIKEGKTTSESEVSNQKSSVATPTKQQKVDYNVTPNFVDHPSTVQAIQEQTPVSSTKPTEVQVVEKPFSTELINPRKEEKQSSDSQEQLAEHKNLETKKEEKISPKEKTGVNTLNPQDEVLSGQLNKPELLYREETMETKIDFQEEIQENPDLAEGTVRVKQEGKLGKKVEIVRIFSVNKEEVSREIVSTSTTAPSPRIVEKGTKKTQVIKEQPETGVEHKDVQSGAIVEPAIQPELPEAVVSDKGEPEVQPTLPEAVVTDKGETEVQPESPDTVVSDKGEPEQVAPLPEYKGNIEQVKPETPVEKTKEQGPEKTEEVPVKPTEETPVNPNEGTTEGTSIQEAENPVQPAEESTTNSEKVSPDTSSKNTGEVSSNPSDSTTSVGESNKPEHNDSKNENSEKTVEEVPVNPNEGTVEGTSNQETEKPVQPAEETQTNSGKIANENTGEVSNKPSDSKPPVEESNQPEKNGTATKPENSGNTTSENGQTEPEPSNGNSTEDVSTESNTSNSNGNEEIKQENELDPDKKVEEPEKTLELRNVSDLELYSLSNGTYKQHISLEQVPSNPNSYFVKVKSSSFKDVYLPVASISEERKNDKILYKITAKVEKLQQEIESRYKDNFTFYLAKKGTEETTNFTSFSNLVKAINQNPSGTYHLAASLNANEVELGPDERSYIKDTFTGRLIGEKDGKNYAIYNLKKPLFENLSGATVEKLSLKNVAISGKDDIGSLANEAQNNTKIKQVHVDGVLAGERGIGGLLAKAEQSSITESSFKGRIINTYETTAAYNIGGMVGHLTGDKALLTKSKATVAISSNTNTSDQTVGGLAGLVDRDAQIQDSYAEGDINNVKHFGRVAGVAGNLWDRTSGDVRHAGSLTNVLSDVNVTNGNAITGYHYNEMKVKDTFSSKANRVYNVTLVKDEVVSKESFEERGTMLDASQIASKKAEINPLILPTVEPLSTSGKKDSDFSKVAYYQAKRNLTYKNIEKLLPFYNKATIVKYGNLVNENSLLYQKELLSAVMMKDNQVITDIVSNKQTANKLLLHYKDDLSEKLDLKYQNDFAKLAEYSLGNTGLLYTPNQFLYDQTSIIKQVLPDLQKVDYHSEAIRKTLGISPNVKQTELYLEDQFAKTKQQLEDSLKKLLSADAGLASANPVTEGYLVDKIKRNKEALLLGLTYLERWYNFSYGQVNVKDLVLYHLDFFGKGNASPLDTLIELGKSGFNNLLAKNNVDTYGISLASQHGTTDLFSTLEHYRKVFLPNTSNNDWFKSETKAYIVEEKSTIEEVKTKQGLAGTKYSIGVYDRITSATWKYRNMVLPLLTLPERSVFVISTMSSLGFGAYDRYRSSDHKAGKALNDFVEENARETAKRQRDHYDYWYRILDDNAREKLYRNILLYDAYKFGDDNTVGKATEVADFDNPNPAMQHFFGPVGNKVGHNQHGAYATGDAVYYMGYRMLDKDGAITYTHEMTHDSDQDIYLGGYGRRSGLGPEFFAKGLLQAPDHPDDATITINSILKHSKSDSTESRRLQVLDPTTRFNNADDLKQYVHNMFDVVYMLEYLEGNSILKLDTNQKQQLLRKVTNEYHPDPDGNKVYATNVVRNLTVEEVERLRSFNDLIDNNILSSREYASGKYERNGYFTIKLFAPIYAALSNDIGTPGDLMGRRIAYELLAAKGFKDGMVPYISNQYEEEAKQKGKTINLYGKTRGLVTDDLVLEKVFNNQYHTWSEFKKAMYQERQDQFDRLNKVTFNDTTQPWQTFAKKTTSSVDELQKLMDVAVRKDAEHNYYHWNNYNPDIDSEVHKLKRAIFKAYLDQTNDFRSSIFENKK

SEQ ID NO: 2307 - DNA, 849 bp, Streptococcus pneumoniae
atggctactattcaatggtttcctggtcacatgtctaaagctcgtcgacaggtgcaggagaatttaaaatttgttgattttgtgacgattttagtagatgcacgcttgcctctatctagtcaaaatcctatgttgaccaagattgttggtgataaaccaaaactcttgattttaaacaaggccgacttggctgatccagcaatgaccaaggaatggcgtcagtattttgaatcacaaggaatccagacgctagctatcaactccaaagagcaagtgactgtaaaagttgtaacagatgcggccaagaagctcatggctgataagattgctcgccagaaagaacgtgggattcagattgaaaccttgcgtactatgattatcgggattccaaacgctggtaaatcaactctgatgaaccgtttggctggtaaaaagattgctgttgttggaaacaagccaggggtcacaaaaggtcaacaatggcttaaaaccaataaagacctggaaatcttggatacaccggggattctctggcctaagtttgaggatgaaactgttgcacttaagttggcattgactggagctatcaaagaccagttgcttcctatggatgaggttaccatttttggtatcaattatttcaaagaacattatccagaaaagctggctgaacgcttcaaacaaatgaaaattgaagaagaagcgcctgtgattattatggatatgacccgcgccctcggtttccgtgatgactatgaccgtttttacagtctcttcgtgaaggaagtccgtgatggcaaactcggtaactataccttagatacattggaagacctcgatggcaacgat

SEQ ID NO: 2308 - protein, 283 aa, Streptococcus pneumoniae
  GTP-binding protein; Cellular location: cytoplasm; Similar to strain R6 sequence 15903087 (e-161)
MATIQWFPGHMSKARRQVQENLKFVDFVTILVDARLPLSSQNPMLTKIVGDKPKLLILNKADLADPAMTKEWRQYFESQGIQTLAINSKEQVTVKVVTDAAKKLMADKIARQKERGIQIETLRTMIIGIPNAGKSTLMNRLAGKKIAVVGNKPGVTKGQQWLKTNKDLEILDTPGILWPKFEDETVALKLALTGAIKDQLLPMDEVTIFGINYFKEHYPEKLAERFKQMKIEEEAPVIIMDMTRALGFRDDYDRFYSLFVKEVRDGKLGNYTLDTLEDLDGND

SEQ ID NO: 2309 - DNA, 777 bp, Streptococcus pneumoniae
atggcaacgattaaagaaatcaaagaattccttgtgacagtcaaggagttagaaagccctatttttttagagcttgaaaaggataatcgctcaggagttcaaaaggaaatcagcaagcgtaaaagagccattcaagctgaattagatgaaaatttgcgcttggaatccatgctttcttatgaaaaagaactttataagcaaggattgaccttaattgcaggtattgatgaggttggtcgtggtcctcttgctggtcctgtagtcgctgcggccgttattttatctaaaaattgtaagattaaaggtctcaacgacagcaagaaaattcctaaaaagaaacatctggagattttccaagccgttcaagaccaagccttgtcgattggaattggtatcatagataatcaggtcatcgaccaagtcaacatctatgaagcaaccaaactagccatgcaagaagcaatctcccagctcagccctcaaccagagcaccttttgattgatgccatgaaactggacttgcccatttcacaaacctccattatcaaaggagatgccaactccctctctatcgcagcagcatctatagtagccaaggtaacacgtgatgaattgctgaaagaatacgatcagcagttccctggctatgatttcgctactaatgcaggatatggcacagctaaacatctggaaggcctcacaaaactaggagttaccccaattcaccgaaccagctttgaacccgttaaatcactggttttaggtaaaaaagaaagt

SEQ ID NO: 2310 - protein, 259 aa, Streptococcus pneumoniae
  ribonuclease HII (rnhB); Cellular location: membrane; Similar to strain R6 sequence 15903088 (e-140)
MATIKEIKEFLVTVKELESPIFLELEKDNRSGVQKEISKRKRAIQAELDENLRLESMLSYEKELYKQGLTLIAGIDEVGRGPLAGPVVAAAVILSKNCKIKGLNDSKKIPKKKHLEIFQAVQDQALSIGIGIIDNQVIDQVNIYEATKLAMQEAISQLSPQPEHLLIDAMKLDLPISQTSIIKGDANSLSIAAASIVAKVTRDELLKEYDQQFPGYDFATNAGYGTAKHLEGLTKLGVTPIHRTSFEPVKSLVLGKKES

SEQ ID NO: 2311 - DNA, 1548 bp, Streptococcus pneumoniae
atggaggaacagtcggaaatagtccgttctaagaaagaattcgcctttgcatccagcactatactatcccaagttggtcgaggaatcattgtcggcctcatcgttggaattatcgtcggatcctttcgtttcttaattgaaaagggcttccacctgatacaaggagtttatcaagatcaagggtacttagtgcgcaatctttttgtactggttttgttttatatactcatctgttggctcagtgccaaactaacacggtcagaaaaagatattaaaggctcaggaattcctcaagtcgaagccgaactgaaaggcctcatgtccctcaactggtggggcattctttggaaaaaatatgtgctaggtattcttgctattgccagtggactcatgctgggtcgagagggacccagcattcaacttggagcagttggtggtaaaggaattgccaagtggctcaaatccagtccagtagaggaacgttccttgattgccagtggagctgcagcaggtttagccgcagcctttaatgctcctattgcagcacttctctttgttgtagaagaagtctatcaccatttttcgcgctttttctgggtctcaactctagcagccagcatcgtagcaaactttgtgtctctactcatgttcggtttgacaccagtattggatatgccagataacattcctcccatgaccctagatcagtattggatatatctcgtcatgggaattttccttggattttcaggttttctctatgagaaagctgtattaaacgttggaagagtttatgacttgattggtcaaaaaatccatttggatagggcttattatcccatcttggcttttatccttatcataccagtcggaatcttcttacctcaaatcattggtggcggaaatcagcttgtcctttctttaactgaacaaaattttagtttccaagttttattagcttactttttaatccgctttatttggagtatgattagctatggaagtggactgccaggaggaattttcctccccattttagctcttggttctttgcttggtgccttagttggtgttatctgtgtcaatcttggacttgtcagtcaagagcaattccctatatttgtcattctaggaatgagtggctattttggagccatatcaaaagctcccttaaccgctatgatcctcgtaactgagatggtaggagatattcgcaaccttatgccacttggtcttgtcactcttgtttcttatattatcatggatttgctcaaaggtacgccagtctatgaagccatgctggaaaaaatgcttccagaagaagtatctagcgaaggagaagttacacttatcgaaataccagtttctgataaaattgctgggaaacaagttcatgaactcaacttaccacacaacgtcctcatcacaactcaagtccataatggcaagagccaaacagttaacggctcaaccagaatgtatctgggtgatatgattcacctggttattccaaaaagtgaaattggaaaagtcaaagatttgttgttg

SEQ ID NO: 2312 - protein, 516 aa, Streptococcus pneumoniae
  voltage-gated chloride channel family protein; Cellular location: membrane; Similar to strain R6 sequence 15903089 (0.E+01)
MEEQSEIVRSKKEFAFASSTILSQVGRGIIVGLIVGIIVGSFRFLIEKGFHLIQGVYQDQGYLVRNLFVLVLFYILICWLSAKLTRSEKDIKGSGIPQVEAELKGLMSLNWWGILWKKYVLGILAIASGLMLGREGPSIQLGAVGGKGIAKWLKSSPVEERSLIASGAAAGLAAAFNAPIAALLFVVEEVYHHFSRFFWVSTLAASIVANFVSLLMFGLTPVLDMPDNIPPMTLDQYWIYLVMGIFLGFSGFLYEKAVLNVGRVYDLIGQKIHLDRAYYPILAFILIIPVGIFLPQIIGGGNQLVLSLTEQNFSFQVLLAYFLIRFIWSMISYGSGLPGGIFLPILALGSLLGALVGVICVNLGLVSQEQFPIFVILGMSGYFGAISKAPLTAMILVTEMVGDIRNLMPLGLVTLVSYIIMDLLKGTPVYEAMLEKMLPEEVSSEGEVTLIEIPVSDKIAGKQVHELNLPHNVLITTQVHNGKSQTVNGSTRMYLGDMIHLVIPKSEIGKVKDLLL

SEQ ID NO: 2313 - DNA, 111 bp, Streptococcus pneumoniae
ttgctagaaattgatttgattgtcctgattgttttatcctatttctatttcatttctctatataattgctattgttttctttttcatgattttaatcttactgtacagatt

SEQ ID NO: 2314 - protein, 37 aa, Streptococcus pneumoniae
  hypothetical protein; Cellular location: membrane
MLEIDLIVLIVLSYFYFISLYNCYCFLFHDFNLTVQI

SEQ ID NO: 2315 - DNA, 1068 bp, Streptococcus pneumoniae
atgaaacgtgagattttactggaacgaatcgacaaactaaaacaactcatgccctggtatgttctggaatactaccaatctaagctggctgtgccctacagttttacaaccctgtacgaataccttaaggaatatgaccgatttttcagctgggttttggagtctggtatttcaaacgctgataaaatatccgatattcctttatcagttttggaaaatatgtctaagaaagacatggaatcctttatcctttatctacgtgaacgtcccttgctgaatgctaatacaacaaaacaaggtgtttcacagacaactatcaatcgaaccttatcagcactttctagtctttacaagtatctaaccgaggaggttgaaaacgatcagggggaaccttatttctatcgtaatgtaatgaaaaaagtttccaccaagaaaaagaaagaaacccttgctgccagagctgaaaatatcaagcaaaaactctttctaggtgatgaaacagaaggttttctaacttatatcgatcaagagcacccacaacagctttcaaatcgagctctctcatcattcaacaaaaataaagaacgagatttagccattattgcccttctcttggcatctggtgttcgcttatctgaagctgttaatctagatctaagagatctcaatctaaaaatgatggttattgatgttactcgaaaaggttgcaaacgtgactcagtcaatgtcgctgcttttgctaaaccttatttagagaattatctggccattcggaatcaacgctataaaacggaaaaaacagatacagccctttttttaactctctacagaggtgttcctaatcgtatcgatgcttctagcgttgagaaaatggttgctaaatactcagaggattttaaagtgcgtgtaacaccccataaactgcgccatacactagcaactaggctctatgatgcgactaaatcacaagttttagtcagtcaccaactaggacatgctagcacacaagtcactgacctctatacccatattgttagtgatgaacaaaagaatgctctggatagttta

SEQ ID NO: 2316 - protein, 356 aa, Streptococcus pneumoniae
  integrase/recombinase, phage integrase family; Cellular location: membrane; Similar to strain R6 sequence 15903090 (0.E+01)
MKREILLERIDKLKQLMPWYVLEYYQSKLAVPYSFTTLYEYLKEYDRFFSWVLESGISNADKISDIPLSVLENMSKKDMESFILYLRERPLLNANTTKQGVSQTTINRTLSALSSLYKYLTEEVENDQGEPYFYRNVMKKVSTKKKKETLAARAENIKQKLFLGDETEGFLTYIDQEHPQQLSNRALSSFNKNKERDLAIIALLLASGVRLSEAVNLDLRDLNLKMMVIDVTRKGCKRDSVNVAAFAKPYLENYLAIRNQRYKTEKTDTALFLTLYRGVPNRIDASSVEKMVAKYSEDFKVRVTPHKLRHTLATRLYDATKSQVLVSHQLGHASTQVTDLYTHIVSDEQKNALDSL

SEQ ID NO: 2317 - DNA, 987 bp, Streptococcus pneumoniae
atgaaatacattatcaatcattcaaatgacactgcttttaatattgccttggaagaatacgcctttaaacaccttttggatgaggatcaaatcttcctactttggattaacaagccatctatcattgttggtcgtcaccagaacactatcgaagaaatcaaccgtgattatgttcgcgaaaatggtattgaggtagttcgccgtattagtggtggtggagctgtttaccacgatttaaataacctcaactacacgatcatctccaaagaagatgaaaataaggcatttgacttcaagagcttctcaactccggttatcaataccctggctcaacttggggttaaagctgagttcacaggtcgtaatgaccttgagattgatggtaagaagttctgtggcaatgcccaagcctatatcaacggccgtatcatgcaccacggttgcttgctctttgacgttgatttgtcagtcctcgcaaatgcccttaaggtttcaaaagataaatttgaatcaaaaggtgtgaaatccgtccgtgcccgtgtaaccaatattatcaatgaattaccaaaaaaaatcacagtcgaaaaattccgtgatttactcttggaatacatgaaaaaagagtacccagagatgactgaatacgtcttttcagaagaagaattggccgaaatcaatcgcatcaaggatactaagtttggaacttgggactggaactatggtaaatcacctgaatttaacgtccgtcgtggaatcaaattcactagtggtaaggttgaagtctttgctaacgttactgaatcaaaaatccaagacatcaagatttatggtgacttctttggtattgaagacgttgctgcagtagaagatgtccttcgtggggtgaaatacgaacgcgaagatgttcttaaggcgctaaaaaccattgatatcacacgctacttcgctggtattagccgtgaagaaatcgctgaagcggtagttgga

SEQ ID NO: 2318 - protein, 329 aa, Streptococcus pneumoniae
  lipoate-protein ligase, putative; Cellular location: cytoplasm; Similar to strain R6 sequence 15903091 (0.E+01)
MKYIINHSNDTAFNIALEEYAFKHLLDEDQIFLLWINKPSIIVGRHQNTIEEINRDYVRENGIEVVRRISGGGAVYHDLNNLNYTIISKEDENKAFDFKSFSTPVINTLAQLGVKAEFTGRNDLEIDGKKFCGNAQAYINGRIMHHGCLLFDVDLSVLANALKVSKDKFESKGVKSVRARVTNIINELPKKITVEKFRDLLLEYMKKEYPEMTEYVFSEEELAEINRIKDTKFGTWDWNYGKSPEFNVRRGIKFTSGKVEVFANVTESKIQDIKIYGDFFGIEDVAAVEDVLRGVKYEREDVLKALKTIDITRYFAGISREEIAEAVVG

SEQ ID NO: 2319 - DNA, 1701 bp, Streptococcus pneumoniae
atggccttagaagtaattatgccaaaagccggcgtggatatgacagaaggacaaatcgtccaatggaataaaaaagtcggagaatttgtaaaagaaggagaaatccttttggaaatcatgactgataaagtcagcatggaattggaagccgaagaagatgggtacttgattgccattctcaaaggagatggtgaaactgtccctgtaacggaagttatcggttaccttggtgaagaaagggaaaacatcccaacagctggagcagcatcgccagaagctagccctgtacctgtagcaagtacctcaaacgatgatggtaagagcgatgatgcttttgatatcgttgtgattggtggaggtcctgctggttatgttgcagccattaaagctgcccaattcggcggtaaggttgcccttgttgagaaatctgaacttggtggaacctgcttaaaccgtggatgtattccaaccaagacctaccttcataacgctgaaattattgaaaatatcggtcatgctgcaaatcgtggtatcgtgattgaaaatcctaacttcactgttgatatggaaaaacttttagaaactaaatctaaagttgttaatactcttgttggtggtgttgcaggacttcttcgtagctacggagttactgttcataaaggaattggtacaatcactaaagacaagaacgtcttggtaaatggttctgaattgcttgaaaccaagaaaatcattcttgctggtggttcaaaagtcaacaagatcaacgtccctggtatggaatctccacttgtcatgactagtgatgacattcttgaaatgaacgaagtgccagaaagccttgttatcatcggtggtggagttgtcggtatcgaactcggtcaggccttcatgacatttggttcaaaagtgactgttatcgaaatgatggaccgtatagttccagctatggatgtggaagtttctaagaaccttcgcttgattcttgagcgtaaaggaatgaccatcttgactggtactaaactgcaagaaatcattgaggaaaatggtcaacttcgtatcaaggttgaaggaaaagacgatatcatcgcaagcaaagctcttctttcaattggtcgtatgccagaccttgaaggtattggagaggttgagtttgaattggatcgtggttgtatcaaggtcaacgaatacatggaaacttcagttccaggcatttatgcaccaggtgacatcaacggtactaagatgttggctcacgcagctttccgcatgggtgaagtttccgctgaaaatgcccttaaaggaaatcatgcagttgccaaattgaatttgactcctgcagccatctacactctccctgaagtagcagcagtaggtttgacagaagaacaagcccgtgagaaatacgatgttgccatcggtaagtttaactttgctgctaacggtcgtgctattgcatctgacgcagctcaaggtttcgtaaaagttatcgctgataagaaatacggagaaatccttggtgtacacattattggtcctgcagccgcagaattaataaacgaagcatcaagcatcatcgaaatggaaatcactgttgaggaaatgctgaagaccatccacgggcacccaacttactctgaagtgatgtacgaagcgtttgcagatgttctaggaatggccatccattcacctaagaaaaaa

SEQ ID NO: 2320 - protein, 567 aa, Streptococcus pneumoniae
  acetoin dehydrogenase complex, E3 component, dihydrolipoamide dehydroge; Cellular location: membrane; Similar to strain R6 sequence 15903092 (0.E+01)
MALEVIMPKAGVDMTEGQIVQWNKKVGEFVKEGEILLEIMTDKVSMELEAEEDGYLIAILKGDGETVPVTEVIGYLGEERENIPTAGAASPEASPVPVASTSNDDGKSDDAFDIVVIGGGPAGYVAAIKAAQFGGKVALVEKSELGGTCLNRGCIPTKTYLHNAEIIENIGHAANRGIVIENPNFTVDMEKLLETKSKVVNTLVGGVAGLLRSYGVTVHKGIGTITKDKNVLVNGSELLETKKIILAGGSKVNKINVPGMESPLVMTSDDILEMNEVPESLVIIGGGVVGIELGQAFMTFGSKVTVIEMMDRIVPAMDVEVSKNLRLILERKGMTILTGTKLQEIIEENGQLRIKVEGKDDIIASKALLSIGRMPDLEGIGEVEFELDRGCIKVNEYMETSVPGIYAPGDINGTKMLAHAAFRMGEVSAENALKGNHAVAKLNLTPAAIYTLPEVAAVGLTEEQAREKYDVAIGKFNFAANGRAIASDAAQGFVKVIADKKYGEILGVHIIGPAAAELINEASSIIEMEITVEEMLKTIHGHPTYSEVMYEAFADVLGMAIHSPKKK

SEQ ID NO: 2321 - DNA, 1041 bp, Streptococcus pneumoniae
atggctgatgacaagctaagagcgactcctgcagctagaaagttagcggatgatttagggataaacctctacgacgtttctggctcaggtgcaaacggtcgtgtccacaaagaagacgtggaaacttataaagacacaaacgtggttcgcatttcgccacttgcaaaacgaattgccctcgaacataacattgcttggcaggaaatccaaggaaccggtcatcgtggtaaaatcatgaagaaggatgttttggccctgcttcctgaaaatatcgaaaacgatagcatcaaatctcctgctcagattgaaaaagtggaagaagtccctgataacgtaacaccatatggtaaaatcgagcgtattccaatgacaccaatgcgtaaggttattgcccaacgcatggttgaatcttacttgactgcgccaaccttcaccctcaactatgaagttgatatgactgaaatgttggctcttcgtaagaaggttcttgagccaatcatggaagcaactgggaagaagactactgtaacagaccttctttcgcttgcagttgttaagactcttatgaaacacccatacatcaacgcttcattgacagaagatggcaagactattatcactcacaactatgtcaatcttgccatggcagttgggatggataatggattgatgacacctgttgtttacaatgctgagaagatgagtctttcagaactggttgtagcctttaaggatgttattggccgtaccttggatggtaaattggctccaagtgagttacaaaattcaacattcacaatcagtaatttgggaatgtttggtgttcagtcctttggtccgattattaaccaacccaactcagctatccttggtgtcagttcgacaatcgagaagccagttgtcgtcaatggtgaaattgtgattcgcccaatcatgagtttaggattaaccattgaccaccgtgtcgtagatggtatggctggtgctaagtttatgaaggacttgaaagagttgattgaaacgccaatctcaatgttaatt

SEQ ID NO: 2322 - protein, 347 aa, Streptococcus pneumoniae
  acetoin dehydrogenase complex, E2 component, dihydrolipoamide acetyltra; Cellular location: cytoplasm; Similar to strain R6 sequence 15903093 (0.E+01)
MADDKLRATPAARKLADDLGINLYDVSGSGANGRVHKEDVETYKDTNVVRISPLAKRIALEHNIAWQEIQGTGHRGKIMKKDVLALLPENIENDSIKSPAQIEKVEEVPDNVTPYGKIERIPMTPMRKVIAQRMVESYLTAPTFTLNYEVDMTEMLALRKKVLEPIMEATGKKTTVTDLLSLAVVKTLMKHPYINASLTEDGKTIITHNYVNLAMAVGMDNGLMTPVVYNAEKMSLSELVVAFKDVIGRTLDGKLAPSELQNSTFTISNLGMFGVQSFGPIINQPNSAILGVSSTIEKPVVVNGEIVIRPIMSLGLTIDHRVVDGMAGAKFMKDLKELIETPISMLI

SEQ ID NO: 2323 - DNA, 990 bp, Streptococcus pneumoniae
atggaaacaaaaacaatgtccttccgtgacaccattatccttgctatgtctgaggaaatgcgtcgcgatgaaaatgtgttcttgatgggagaagacgtcggtgtcttcggaggagacttcggtacttctgttggaatgcttgaagaatttggtccagaacgtgtccgtgactgtccgatttctgaagctgccatctctggagcagcagcaggagcagccatgacaggacttcgtccaatcgtcgatatgaccttcatggacttctctgttattgccatggacaatatcgtcaaccaagctgctaaaacacgttacatgtttggtggtaaaggtcaggttccaatgactgttcgttgtgcagctggtaacggagttggctctgccgcccagcactcacaatctctagagtcttggtttactcacattccaggacttaaggttgtggcacctggaacacctgcggacatgaaaggcctgcttaagtcttctatccgtgataacaacccagttattatacttgagtacaagtcagaatttaaccaaaaaggggaagtgccagttgatccagactacacaattccacttggggttggtgaaatcaaacgccaaggaacggatgtaacagttgttacttatggaaaaatgcttcgccgtgtggttcaagctgctgaagaattagcagaagaaggaatttcagttgaaattgttgacccacgtacccttgttccgcttgataaggatatcatcataaactcagtgaagaagactggtaaggttgttctggtcaacgatgcccacaaaacaagtggctatatcggtgaaatttcagctattatttcagaatcagaagcatttgactatctagatgcaccaattcgccgttgtgcaggagaagatgtgccgatgccttatgcacaaaacctagaaaatgcaatgattccaacagttgaaagtatcaaagatgcaatccgaaaaacttataacaaagaa

SEQ ID NO: 2324 - protein, 330 aa, Streptococcus pneumoniae
  acetoin dehydrogenase, E1 component, beta subunit, putative; Cellular location: cytoplasm; Similar to strain R6 sequence 15903094 (0.E+01)
METKTMSFRDTIILAMSEEMRRDENVFLMGEDVGVFGGDFGTSVGMLEEFGPERVRDCPISEAAISGAAAGAAMTGLRPIVDMTFMDFSVIAMDNIVNQAAKTRYMFGGKGQVPMTVRCAAGNGVGSAAQHSQSLESWFTHIPGLKVVAPGTPADMKGLLKSSIRDNNPVIILEYKSEFNQKGEVPVDPDYTIPLGVGEIKRQGTDVTVVTYGKMLRRVVQAAEELAEEGISVEIVDPRTLVPLDKDIIINSVKKTGKVVLVNDAHKTSGYIGEISAIISESEAFDYLDAPIRRCAGEDVPMPYAQNLENAMIPTVESIKDAIRKTYNKE

SEQ ID NO: 2325 - DNA, 966 bp, Streptococcus pneumoniae
atgtcaactttagataaaaatcttttgctagaaatgttccgtaagatggaagaaatccgtcgcatggacttaaaaattgcacaattagtaaagaaagggaaagtgccaggaatgacgcacttttctgttggtgaagaggcagctaacgtgggggctatgttagctctcaatccagatgatctgattacctcaaaccaccgtggacacgggcaagctattgctaaagggattgacctcaacggaatgatggctgaaatccttggtaaatacactggaacctgtaaagggaaaggtggatctatgcatatcgctgaccttgatgctgggaaccttggtgccaatggtatcgtaggtggtggtatggggatcgctgtcggtgcagccctcagtcagcaaatgcaaaataccggtaaaatcgttgtctgcttctttggagatggtgcgaccaatgaaggtgttttccacgaagcagtgaacatggcttctatctggaacctgccagtcattttctattgcattaacaacggttacggtatctctgcggatatcaagaaaatgaccaatatagaacatatccatcaacgtagcgccgcttatggaattcctggaatgttcatcgaagacggtaacaatgtcatcgatgtctatgaaggatttcagaaagctgtggaccatgttcgcagtggcaatggtccagtcttgattgaaagtgtaacttatcgctggctcggtcactcatcatctgaccctggtaaatatcgtacgcgtgaagaagtggaattgtggaaacaaaaagatccaatcgaaaacctccgcaattaccttattgaaaataacattgcaagtgccgaagaattggaagaaatccaagcgcaagtaaaggaagcagtagaagcttctgttaaatttgcagaggaaagcccattcccaccgcttgaatcagcctttgaagatatttacgcagac

SEQ ID NO: 2326 - protein, 322 aa, Streptococcus pneumoniae
  acetoin dehydrogenase, E1 component, alpha subunit, putative; Cellular location: cytoplasm; Similar to strain R6 sequence 15903095 (0.E+01)
MSTLDKNLLLEMFRKMEEIRRMDLKIAQLVKKGKVPGMTHFSVGEEAANVGAMLALNPDDLITSNHRGHGQAIAKGIDLNGMMAEILGKYTGTCKGKGGSMHIADLDAGNLGANGIVGGGMGIAVGAALSQQMQNTGKIVVCFFGDGATNEGVFHEAVNMASIWNLPVIFYCINNGYGISADIKKMTNIEHIHQRSAAYGIPGMFIEDGNNVIDVYEGFQKAVDHVRSGNGPVLIESVTYRWLGHSSSDPGKYRTREEVELWKQKDPIENLRNYLIENNIASAEELEEIQAQVKEAVEASVKFAEESPFPPLESAFEDIYAD

SEQ ID NO: 2327 - DNA, 108 bp, Streptococcus pneumoniae
ttggcaaatactgtcaaagtttttctaaaagaaatttcacaaaataaaaaagaaaaccccgtgaaaacaagggattttcttgtcaagaatattttttcacaaactttt

SEQ ID NO: 2328 - protein, 36 aa, Streptococcus pneumoniae
  hypothetical protein; Cellular location: cytoplasm
MANTVKVFLKEISQNKKENPVKTRDFLVKNIFSQTF

SEQ ID NO: 2329 - DNA, 1359 bp, Streptococcus pneumoniae
atgtataagacaaagtgtttacgagagaagttagtattatttttaaaaattttcttcccaatcctgatctaccaatttgccaattattctgcctcttttgttgatactgcaatgacaggtcaatacaacactatggacttggctggtgtatctatggcaaccagtatctggaatcctttctttacatttctaacagggattgtgtcagccttggtgcctatcattggtcaccatcttggtcgaggcaaaaaggaagaagttgcgtctgatttttaccaatttatttatttggccttgggcctatctgtggtcttgctggggatggtacttttcttggcaccaataatcttgaatcatattgggttagaagcagcagtagcggcagtagcggttcgctatctttggtttttatctatcgggattatccccttgttgctctttagcgtcattcgttccttgctggattcgctgggcttgaccaaactgtccatgtacctcatgcttttgttactccctctcaatagcggatttaactatctcttgatttacggtgcctttggtgttccagaactgggaggggctggtgctggtttaggaacatccttggcctactgggtcttgcttgggatttctgttctggttttatttaaacaggagaagctcaaagccttacaccttgagaaacgaattccacttaatatggataaaattaaggaaggagttcgtttaggtctgcctattgggggaactgtcttcgcggaagtggctatcttttcagtggttggcttgattatggctaagttttcgcccttgattatagctagtcaccagtcagctatgaacttttcaagtcttatgtacgcctttcctatgagtatctcatcggctatggctattgtcgtttcctatgaagtgggagccaagcgatttgatgatgcgaaaacctatattggtctaggaagatggactgccctcatttttgcggccttcaccttaaccttcctttacatttttaggggaaatgtggccagtctttatggtaacgacccaaaatttatcgatttgacagtgcgttttttaacttatagtcttttcttccagttagcagatacctttgcggcgccgcttcagggaattttgcgggggtataaggatacagttattcctttttaccttggtttgcttggttattggggcgtagcaatccctgtgcgtacgctatttgattccctaacagattttggagcttattcttactggatcggcttgattattagtttgattgtgagcggggcgctctaccgttggcgtttaactgtgattatgaagagatttgaatctttagcaaaatccaaatgc

SEQ ID NO: 2330 - protein, 453 aa, Streptococcus pneumoniae
  MATE efflux family protein; Cellular location: membrane; Similar to strain R6 sequence 15903096 (0.E+01)
MYKTKCLREKLVLFLKIFFPILIYQFANYSASFVDTAMTGQYNTMDLAGVSMATSIWNPFFTFLTGIVSALVPIIGHHLGRGKKEEVASDFYQFIYLALGLSVVLLGMVLFLAPIILNHIGLEAAVAAVAVRYLWFLSIGIIPLLLFSVIRSLLDSLGLTKLSMYLMLLLLPLNSGFNYLLIYGAFGVPELGGAGAGLGTSLAYWVLLGISVLVLFKQEKLKALHLEKRIPLNMDKIKEGVRLGLPIGGTVFAEVAIFSVVGLIMAKFSPLIIASHQSAMNFSSLMYAFPMSISSAMAIVVSYEVGAKRFDDAKTYIGLGRWTALIFAAFTLTFLYIFRGNVASLYGNDPKFIDLTVRFLTYSLFFQLADTFAAPLQGILRGYKDTVIPFYLGLLGYWGVAIPVRTLFDSLTDFGAYSYWIGLIISLIVSGALYRWRLTVIMKRFESLAKSKC

SEQ ID NO: 2331 - DNA, 1266 bp, Streptococcus pneumoniae
atgctactaatcaaaaatggtcgtgtaatggatcccaagtctggtttggatcaagtttgtgatgtcttagttcaagatgggaaaattatcaaaattgcgtctgagatcacggaagaaggagcagaaacgattgatgctactggtcttgtggttgctcctggcttggtcgatattcatgttcatttccgtgaacctggtcaaacacataaagaagacattcatactggtgccctagcagccgctgcaggtggttttactactgtcgtcatgatggctaataccagtccaaccatttcagacgtggagactttgcaagcagttctccagtcagctgccaaagagaagattaatgtcaagacagttgcgaccattactaaaaactttaatggtaaaaacttgactgactttaaggcactcttagaagctggtgcggttggtttctctgatgacggtattccgcttgagagcagtaagattgtcaaggaagccatggaggaagccaaaaaactcaatacctttatcagccttcatgaggaagatccaggtttgaacggtgttcttggctttaatgaaaatattgctagagaacatttccatatctgcggtgctactggggtggctgagtacgctatgatggcgcgtgatgtcatgattgcctatgcaactaaagcccatgttcacatccagcatttgtctaaggaagaaagtgttaaagtagtggagtttgctcaggggttaggtgcagaagtcacagcagaagtagcgccacagcatttctctaagacagaagcacttcttttaacacaaggtagcaatgctaagatgaatccaccgcttcgtttggaatcagaccgtcgtgccgttatcgaaggtctcaaatcaggtgtcatcacagttattgcgactgaccacgcgcctcatcatgtagatgaaaaaaatgttgaggatattaccaaagcgccatctggtatgactggcttagaaacatccctgtctctcagcttgacctatttagtagaagctggtgagttgagcttgatggaattacttgaaaaaatgacatacaacccagccaagctttacaactttgaagcaggttacttggctgagaatggtccagcagatatcactatttttgatgccaaggctgaccgctttgtggactcccattttgcttccaaagcagctaattcaccattcatcggtgaaaccttaaaagggcaggttaaatataccatctgtaagggacaaatcgtctatcaagct

SEQ ID NO: 2332 - protein, 422 aa, Streptococcus pneumoniae
  dihydroorotase, multifunctional complex type (pyrC); Cellular location: membrane; Similar to strain R6 sequence 15903097 (0.E+01)
MLLIKNGRVMDPKSGLDQVCDVLVQDGKIIKIASEITEEGAETIDATGLVVAPGLVDIHVHFREPGQTHKEDIHTGALAAAAGGFTTVVMMANTSPTISDVETLQAVLQSAAKEKINVKTVATITKNFNGKNLTDFKALLEAGAVGFSDDGIPLESSKIVKEAMEEAKKLNTFISLHEEDPGLNGVLGFNENIAREHFHICGATGVAEYAMMARDVMIAYATKAHVHIQHLSKEESVKVVEFAQGLGAEVTAEVAPQHFSKTEALLLTQGSNAKMNPPLRLESDRRAVIEGLKSGVITVIATDHAPHHVDEKNVEDITKAPSGMTGLETSLSLSLTYLVEAGELSLMELLEKMTYNPAKLYNFEAGYLAENGPADITIFDAKADRFVDSHFASKAANSPFIGETLKGQVKYTICKGQIVYQA

SEQ ID NO: 2333 - DNA, 462 bp, Streptococcus pneumoniae
atgcctcagttagcgacgatttgctacattgataatgggaaagaactgctcatgctccatcgtaataagaaacccaatgatgtccatgaagggaaatggattggtgtgggtggtaagctagagagaggagagacgccccaggaatgcgcggcgcgtgaaatccttgaagaaacagggctcaaagccaagccagttctaaaaggtgtcatcacttttcctgaatttacaccagatttagactggtacacctatgtttttaaggtgacggagtttgagggcgacttgattgactgcaatgaggggacgctagaatgggttccctatgatgaggttttgagcaagccgacttgggaaggtgaccacacctttgttgagtggcttttagaggataaacccttcttttcagccaagtttgtttatgatggggataaattgttggatacccaagttgatttctatgaa

SEQ ID NO: 2334 - protein, 154 aa, Streptococcus pneumoniae
  mutator MutT protein (mutX); Cellular location: cytoplasm; Similar to strain R6 sequence 15903098 (1.E-91)
MPQLATICYIDNGKELLMLHRNKKPNDVHEGKWIGVGGKLERGETPQECAAREILEETGLKAKPVLKGVITFPEFTPDLDWYTYVFKVTEFEGDLIDCNEGTLEWVPYDEVLSKPTWEGDHTFVEWLLEDKPFFSAKFVYDGDKLLDTQVDFYE

SEQ ID NO: 2335 - DNA, 666 bp, Streptococcus pneumoniae
atgaaggagtcggctatggaacactcgtcttggcatgctttgattaaggcgcaattacctgagggttatttcgggaaaatcaatcagtttatggagcaggtctattctcaggggattatttatccacccaaggaaaaggtttttcaggctctcttgacaacactgcttgaagaagttaaggtggtaattctagggcaagacccctatcacggaccaggtcaagcgcagggcttgagtttttctgtacctgactctatcccagctccaccatccttgcaaaatatcttgaaagaattgtcagatgatatcggagttaagaaatctcatgatttgacagcttgggctgagcaaggagtcttgcttcttaatgcttgtttgactgttcctgctggacaggccaatggtcatgctggtcaaatctgggagccttttactgatgctgtgattcaggtggtcaatcatctagatagaccagtcgtttttgtactctggggagcttatgcacgtaagaagaaggcattagttaccaatcctcatcacttgattatcgaatcagcccatccaagtcctttgtcggtttatagaggattttggggttccaagcccttttccaaggccaatgcattcttaaaagagacaggacaagagccaatcgattggcttaga

SEQ ID NO: 2336 - protein, 222 aa, Streptococcus pneumoniae
  uracil-DNA glycosylase (ung); Cellular location: cytoplasm; Similar to strain R6 sequence 15903099 (e-127)
MKESAMEHSSWHALIKAQLPEGYFGKINQFMEQVYSQGIIYPPKEKVFQALLTTLLEEVKVVILGQDPYHGPGQAQGLSFSVPDSIPAPPSLQNILKELSDDIGVKKSHDLTAWAEQGVLLLNACLTVPAGQANGHAGQIWEPFTDAVIQVVNHLDRPVVFVLWGAYARKKKALVTNPHHLIIESAHPSPLSVYRGFWGSKPFSKANAFLKETGQEPIDWLR

SEQ ID NO: 2337 - DNA, 600 bp, Streptococcus pneumoniae
atgtctgaagttgattttaatgaagctgttaattatgaatttacatctgacacttgtcaattagcaaatagtatttatcaatctctttttaagttttttgataagaaaaatttctctggcgatttaatttttacttggaaatctccatcattagtcaaagaaggggattatattgggagaagggattcacaagtagataatcttagagtaataggaaatatatttccgaattatcttactaatcgaaaatatagcctcaatatgaatcgtaatggctgtatgggagattttcctcatgacttttttgatatatacctagatcatgtagcaaaatatgcctacgaacaaaaagttaataatattaaagagtattatcctttaaaaagagcgattttacaccaagagaatgcattgtattttcgatttttttctaattttgacgactttttagaaaaaaattatttaaagactatatggcaagtttctaaagaaactcctttttctgagatggattttaatatgtttaaaaatatttcagaaaagataatcttcgaaagaggtagtaaaatgcttaatgatttaaaaagtaattataaaaaa

SEQ ID NO: 2338 - protein, 200 aa, Streptococcus pneumoniae
  hypothetical protein; Cellular location: cytoplasm; Similar to strain R6 sequence 15903100 (e-117)
MSEVDFNEAVNYEFTSDTCQLANSIYQSLFKFFDKKNFSGDLIFTWKSPSLVKEGDYIGRRDSQVDNLRVIGNIFPNYLTNRKYSLNMNRNGCMGDFPHDFFDIYLDHVAKYAYEQKVNNIKEYYPLKRAILHQENALYFRFFSNFDDFLEKNYLKTIWQVSKETPFSEMDFNMFKNISEKIIFERGSKMLNDLKSNYKK

SEQ ID NO: 2339 - DNA, 711 bp, Streptococcus pneumoniae
ttgttctacaaatttctactcttcgacctcgaccacactcttcttgattttgatgctgctgaggatgtggctttgacccaacttctaaaagaagaaggagttgcggatattcaggcttataaagattattacgttcctatgaacaaggctctctggaaagacttggagctgaagaaaatcagtaaacaagagctggttaacacgcgcttttctcgtttatttgctcattttggacaggaaaaagacggtagttttcttgcccagcgttaccaattttacctcgcccagcagggacaaacactatcgggcgctcatgatctcttggacagcctcattgagcgtgattataacttgtatgctgcgacaaatggcattactgccattcagacaggacgtttggctcaatctggtctagcaccttatttcaatcaagtctttatctcagaacagttgcaaactcaaaagccggatgctcttttttatgaaaagattggccagcaaattgctggatttagtaaagaaaagacgctgatgattggagattctctaaccgccgacattcaaggtggcaataatgcggggattgacactatctggtataatcctcatcacctcgaaaatcacacacaagcccagccgacttacgaagtctattcttaccaagacttgctggattgtttagataaaaatattcttgaaaagatcacattt

SEQ ID NO: 2340 - protein, 237 aa, Streptococcus pneumoniae
  hydrolase, haloacid dehalogenase-like family; Cellular location: cytoplasm; Similar to strain R6 sequence 15903101 (e-135)
MFYKFLLFDLDHTLLDFDAAEDVALTQLLKEEGVADIQAYKDYYVPMNKALWKDLELKKISKQELVNTRFSRLFAHFGQEKDGSFLAQRYQFYLAQQGQTLSGAHDLLDSLIERDYNLYAATNGITAIQTGRLAQSGLAPYFNQVFISEQLQTQKPDALFYEKIGQQIAGFSKEKTLMIGDSLTADIQGGNNAGIDTIWYNPHHLENHTQAQPTYEVYSYQDLLDCLDKNILEKITF

SEQ ID NO: 2341 - DNA, 117 bp, Streptococcus pneumoniae
ttgctttatgcagttcctttttattttaacaggagtgaaactatagtgtttctaaattgtgaatcaatcaaaactgattgtgatggggctattctagctttagaaaccttcaaaaat

SEQ ID NO: 2342 - protein, 39 aa, Streptococcus pneumoniae
  hypothetical protein; Cellular location: cytoplasm
MLYAVPFYFNRSETIVFLNCESIKTDCDGAILALETFKN

SEQ ID NO: 2343 - DNA, 372 bp, Streptococcus pneumoniae
atggaaagtattggtcttgttatcgtttcacattccaaacacattgcagaaggtgttgttgaactgattagtaaagtagctaaagatgttccgattacttatgtaagaggaaccgagggcggaggaattggaacgagttttgaacaagtagatagggttgtttccgaaaatccagcagatactttacttgccttttttgacctaggttctgctaaaatgaacttaaaaatggtgactgatttcagtgataaaagtatcatcatcaacagggttccaattgtagaaggtgcctataatgcagctgctcttcttcaggctggtgcagaactgtcagttattcaaacacagttagcggagcttgaaatcaataaa

SEQ ID NO: 2344 - protein, 124 aa, Streptococcus pneumoniae
  conserved hypothetical protein; Cellular location: cytoplasm; Similar to strain R6 sequence 15903102 (4.E-23)
MESIGLVIVSHSKHIAEGVVELISKVAKDVPITYVRGTEGGGIGTSFEQVDRVVSENPADTLLAFFDLGSAKMNLKMVTDFSDKSIIINRVPIVEGAYNAAALLQAGAELSVIQTQLAELEINK

SEQ ID NO: 2345 - DNA, 2457 bp, Streptococcus pneumoniae
atgaaaattaataaaaaatatctagcaggttcagtggcagtccttgccctaagtgtttgttcctatgagcttggacgttaccaagctggtcaggataagaaagagtctaatcgagttgcttatatagatggtgatcaggctggtcaaaaggcagaaaacttgacaccagatgaagtcagtaagagggaggggatcaacgccgaacaaattgttatcaagattacggatcaaggttatgtgacctctcatggagaccattatcattactataatggcaaggttccttatgatgccatcatcagtgaagagctcctcatgaaagatccgaattatcagttgaaggattcagacattgtcaatgaaatcaagggtggttatgtcattaaggtaaacggtaaatactatgtttaccttaaggatgcagctcatgcggataatattcggacaaaagaagagattaaacgtcagaagcaggaacgcagtcataatcataactcaagagcagataatgctgttgctgcagccagagcccaaggacgttatacaacggatgatgggtatatcttcaatgcatctgatatcattgaggacacgggtgatgcttatatcgttcctcacggcgaccattaccattacattcctaagaatgagttatcagctagcgagttagctgctgcagaagcctattggaatgggaagcagggatctcgtccttcttcaagttctagttataatgcaaatccagctcaaccaagattgtcagagaaccacaatctgactgtcactccaacttatcatcaaaatcaaggggaaaacatttcaagccttttacgtgaattgtatgctaaacccttatcagaacgccatgtggaatctgatggccttattttcgacccagcgcaaatcacaagtcgaaccgccagaggtgtagctgtccctcatggtaaccattaccactttatcccttatgaacaaatgtctgaattggaaaaacgaattgctcgtattattccccttcgttatcgttcaaaccattgggtaccagattcaagaccagaagaaccaagtccacaaccgactccagaacctagtccaagtccgcaaccagctccaagcaatccaattgatgagaaattggtcaaagaagctgttcgaaaagtaggcgatggttatgtctttgaggagaatggagtttctcgttatatcccagccaaggatctttcagcagaaacagcagcaggcattgatagcaaactggccaagcaggaaagtttatctcataagctaggaactaagaaaactgacctcccatctagtgatcgagaattttacaataaggcttatgacttactagcaagaattcaccaagatttacttgataataaaggtcgacaagttgattttgaggctttggataacctgttggaacgactcaaggatgtctcaagtgataaagtcaagttagtggaagatattcttgccttcttagctccgattcgtcatccagaacgtttaggaaaaccaaatgcgcaaattacctacactgatgatgagattcaagtagccaagttggcaggcaagtacacaacagaagacggttatatctttgatcctcgtgatataaccagtgatgagggggatgcctatgtaactccacatatgacccatagccactggattaaaaaagatagtttgtctgaagctgagagagcggcagcccaggcttatgctaaagagaaaggtttgacccctccttcgacagaccatcaggattcaggaaatactgaggcaaaaggagcagaagctatctacaaccgcgtgaaagcagctaagaaggtgccacttgatcgtatgccttacaatcttcaatatactgtagaagtcaaaaacggtagtttaatcatacctcattatgaccattaccataacatcaaatttgagtggtttgacgaaggcctttatgaggcacctaaggggtatactcttgaggatcttttggcgactgtcaagtactatgtcgaacatccaaacgaacgtccgcattcagataatggttttggtaacgctagcgaccatgttcaaagaaacaaaaatggtcaagctgataccaatcaaacggaaaaaccaagcgaggagaaacctcagacagaaaaacctgaggaagaaacccctcgagaagagaaaccgcaaagcgagaaaccagagtctccaaaaccaacagaggaaccagaagaatcaccagaggaatcagaagaacctcaggtcgagactgaaaaggttgaagaaaaactgagagaggctgaagatttacttggaaaaatccaggatccaattatcaagtccaatgccaaagagactctcacaggattaaaaaataatttactatttggcacccaggacaacaatactattatggcagaagctgaaaaactattggctttattaaaggagagtaag

SEQ ID NO: 2346 - protein, 819 aa, Streptococcus pneumoniae
  conserved domain protein (Pneumococcal histidine); Cellular location: lipoprotein; Similar to strain R6 sequence 15902951 (0.E+01)
MKINKKYLAGSVAVLALSVCSYELGRYQAGQDKKESNRVAYIDGDQAGQKAENLTPDEVSKREGINAEQIVIKITDQGYVTSHGDHYHYYNGKVPYDAIISEELLMKDPNYQLKDSDIVNEIKGGYVIKVNGKYYVYLKDAAHADNIRTKEEIKRQKQERSHNHNSRADNAVAAARAQGRYTTDDGYIFNASDIIEDTGDAYIVPHGDHYHYIPKNELSASELAAAEAYWNGKQGSRPSSSSSYNANPAQPRLSENHNLTVTPTYHQNQGENISSLLRELYAKPLSERHVESDGLIFDPAQITSRTARGVAVPHGNHYHFIPYEQMSELEKRIARIIPLRYRSNHWVPDSRPEEPSPQPTPEPSPSPQPAPSNPIDEKLVKEAVRKVGDGYVFEENGVSRYIPAKDLSAETAAGIDSKLAKQESLSHKLGTKKTDLPSSDREFYNKAYDLLARIHQDLLDNKGRQVDFEALDNLLERLKDVSSDKVKLVEDILAFLAPIRHPERLGKPNAQITYTDDEIQVAKLAGKYTTEDGYIFDPRDITSDEGDAYVTPHMTHSHWIKKDSLSEAERAAAQAYAKEKGLTPPSTDHQDSGNTEAKGAEAIYNRVKAAKKVPLDRMPYNLQYTVEVKNGSLIIPHYDHYHNIKFEWFDEGLYEAPKGYTLEDLLATVKYYVEHPNERPHSDNGFGNASDHVQRNKNGQADTNQTEKPSEEKPQTEKPEEETPREEKPQSEKPESPKPTEEPEESPEESEEPQVETEKVEEKLREAEDLLGKIQDPIIKSNAKETLTGLKNNLLFGTQDNNTIMAEAEKLLALLKESK

SEQ ID NO: 2347 - DNA, 2406 bp, Streptococcus pneumoniae
ttgattttaagtgtttgttcttacgagttgggactgtatcaagctagaacggttaaggaaaataatcgtgtttcctatatagatggaaaacaagcgacgcaaaaaacggagaatttgactcctgatgaggttagcaagcgtgaaggaatcaatgctgagcaaatcgtcatcaagataacagaccaaggctatgtcacttcacatggcgaccactatcattattacaatggtaaggttccttatgacgctatcatcagtgaagaattactcatgaaagatccaaactataagctaaaagatgaggatattgttaatgaggtcaagggtggatatgttatcaaggtagatggaaaatactatgtttaccttaaggatgctgcccacgcggataacgtccgtacaaaagaggaaatcaatcgacaaaaacaagagcatagtcaacatcgtgaaggtggaactccaagaaacgatggtgctgttgccttggcacgttcgcaaggacgctatactacagatgatggttatatctttaatgcttctgatatcatagaggatactggtgatgcttatatcgttcctcatggagatcattaccattacattcctaagaatgagttatcagctagcgagttggctgctgcagaagccttcctatctggtcgaggaaatctgtcaaattcaagaacctatcgccgacaaaatagcgataacacttcaagaacaaactgggtaccttctgtaagcaatccaggaactacaaatactaacacaagcaacaacagcaacactaacagtcaagcaagtcaaagtaatgacattgatagtctcttgaaacagctctacaaactgcctttgagtcaacgacatgtagaatctgatggccttgtctttgatccagcacaaatcacaagtcgaacagctagaggtgttgcagtgccacacggagatcattaccacttcatcccttactctcaaatgtctgaattggaagaacgaatcgctcgtattattccccttcgttatcgttcaaaccattgggtaccagattcaaggccagaacaaccaagtccacaaccgactccggaacctagtccaggcccgcaacctgcaccaaatcttaaaatagactcaaattcttctttggttagtcagctggtacgaaaagttggggaaggatatgtattcgaagaaaagggcatctctcgttatgtctttgcgaaagatttaccatctgaaactgttaaaaatcttgaaagcaagttatcaaaacaagagagtgtttcacacactttaactgctaaaaaagaaaatgttgctcctcgtgaccaagaattttatgataaagcatataatctgttaactgaggctcataaagccttgtttgaaaataagggtcgtaattctgatttccaagccttagacaaattattagaacgcttgaatgatgaatcgactaataaagaaaaattggtagatgatttattggcattcctagcaccaattacccatccagagcgacttggcaaaccaaattctcaaattgagtatactgaagacgaagttcgtattgctcaattagctgataagtatacaacgtcagatggttacatttttgatgaacatgatataatcagtgatgaaggagatgcatatgtaacgcctcatatgggccatagtcactggattggaaaagatagcctttctgataaggaaaaagttgcagctcaagcctatactaaagaaaaaggtatcctacctccatctccagacgcagatgttaaagcaaatccaactggagatagtgcagcagctatttacaatcgtgtgaaaggggaaaaacgaattccactcgttcgacttccatatatggttgagcatacagttgaggttaaaaacggtaatttgattattcctcataaggatcattaccataatattaaatttgcttggtttgatgatcacacatacaaagctccaaatggctataccttggaagatttgtttgcgacgattaagtactacgtagaacaccctgacgaacgtccacattctaatgatggatggggcaatgccagtgagcatgtgttaggcaagaaagaccacagtgaagatccaaataagaacttcaaagcggatgaagagccagtagaggaaacacctgctgagccagaagtccctcaagtagagactgaaaaagtagaagcccaactcaaagaagcagaagttttgcttgcgaaagtaacggattctagtctgaaagccaatgcaacagaaactctagctggtttacgaaataatttgactcttcaaattatggataacaatagtatcatggcagaagcagaaaaattacttgcgttgttaaaaggaagtaatccttcatctgtaagtaaggaaaaaataaac

SEQ ID NO: 2348 - protein, 802 aa, Streptococcus pneumoniae
  conserved domain protein (Pneumococcal histidine); Cellular location: cytoplasm; Similar to strain R6 sequence 15903105 (0.E+01)
MILSVCSYELGLYQARTVKENNRVSYIDGKQATQKTENLTPDEVSKREGINAEQIVIKITDQGYVTSHGDHYHYYNGKVPYDAIISEELLMKDPNYKLKDEDIVNEVKGGYVIKVDGKYYVYLKDAAHADNVRTKEEINRQKQEHSQHREGGTPRNDGAVALARSQGRYTTDDGYIFNASDIIEDTGDAYIVPHGDHYHYIPKNELSASELAAAEAFLSGRGNLSNSRTYRRQNSDNTSRTNWVPSVSNPGTTNTNTSNNSNTNSQASQSNDIDSLLKQLYKLPLSQRHVESDGLVFDPAQITSRTARGVAVPHGDHYHFIPYSQMSELEERIARIIPLRYRSNHWVPDSRPEQPSPQPTPEPSPGPQPAPNLKIDSNSSLVSQLVRKVGEGYVFEEKGISRYVFAKDLPSETVKNLESKLSKQESVSHTLTAKKENVAPRDQEFYDKAYNLLTEAHKALFENKGRNSDFQALDKLLERLNDESTNKEKLVDDLLAFLAPITHPERLGKPNSQIEYTEDEVRIAQLADKYTTSDGYIFDEHDIISDEGDAYVTPHMGHSHWIGKDSLSDKEKVAAQAYTKEKGILPPSPDADVKANPTGDSAAAIYNRVKGEKRIPLVRLPYMVEHTVEVKNGNLIIPHKDHYHNIKFAWFDDHTYKAPNGYTLEDLFATIKYYVEHPDERPHSNDGWGNASEHVLGKKDHSEDPNKNFKADEEPVEETPAEPEVPQVETEKVEAQLKEAEVLLAKVTDSSLKANATETLAGLRNNLTLQIMDNNSIMAEAEKLLALLKGSNPSSVSKEKIN

SEQ ID NO: 2349 - DNA, 1260 bp, Streptococcus pneumoniae
gtgattgtgattgcgcatgacttgactccttcagatacagctcaattggacaaaaactttgtaaaagcttttgtaaccaacattggtggacgtacaagccactcagctatcatggcacgtacacttgaaattgctgctgtattaggtacaaataacatcactgaaatcgttaaagacggtgacatccttgctgttaacgggatcactggagaagtgattatcaacccaacagatgaacaagcggcagaatttaaagcagctggtgaagcctatgcgaaacaaaaagctgaatgggcacttttgaaagatgctcaaacagtgactgctgacggtaaacacttcgagttggctgctaatatcggtactccaaaagacgttgaaggtgttaacaacaacggtgcagaagctgttggactttaccgtacagagttcttgtacatggattctcaagacttcccaactgaagatgagcagtatgaagcatacaaggctgttcttgaaggaatgaacggtaaacctgttgtcgttcgtacaatggatatcggtggagataaggaacttccttacttcgatatgcctcacgaaatgaacccattccttggattccgtgctcttcgtatctctatctctgagactggagatgctatgttccgcacacaaatccgtgctcttcttcgtgcgtctgttcacggtcaattgcgtatcatgttcccaatggttgcgctcttgaaagaattccgtgcagcgaaagcagtctttgatgaagaaaaagcaaaccttcttgctgaaggtgttgcagttgcggataacatccaagttggtatcatgatcgagattcctgcagcggctatgcttgcagaccaatttgctaaagaagttgacttcttctcaattggtacaaacgacttgatccaatatacaatggcagcagaccgtatgaacgaacaagtttcatacctttaccaaccatacaacccatcaatcctacgcttgattaacaatgtgatcaaagcagctcacgctgaaggtaaatgggctggtatgtgtggtgagatggctggtgaccaacaagctgttccacttcttgtcggaatgggcttggatgagttctctatgtcagcaacatctgtacttcgtacacgcagcttgatgaagaaactcgacacagctaagatggaagagtacgcaaaccgtgcccttacagaatgctcaacaatggaagaagttcttgaacttcaaaaagaatacgttaattttgat

SEQ ID NO: 2350 - protein, 420 aa, Streptococcus pneumoniae
  phosphoenolpyruvate-protein phosphotransferase
MIVIAHDLTPSDTAQLDKNFVKAFVTNIGGRTSHSAIMARTLEIAAVLGTNNITEIVKDGDILAVNGITGEVIINPTDEQAAEFKAAGEAYAKQKAEWALLKDAQTVTADGKHFELAANIGTPKDVEGVNNNGAEAVGLYRTEFLYMDSQDFPTEDEQYEAYKAVLEGMNGKPVVVRTMDIGGDKELPYFDMPHEMNPFLGFRALRISISETGDAMFRTQIRALLRASVHGQLRIMFPMVALLKEFRAAKAVFDEEKANLLAEGVAVADNIQVGIMIEIPAAAMLADQFAKEVDFFSIGTNDLIQYTMAADRMNEQVSYLYQPYNPSILRLINNVIKAAHAEGKWAGMCGEMAGDQQAVPLLVGMGLDEFSMSATSVLRTRSLMKKLDTAKMEEYANRALTECSTMEEVLELQKEYVNFD

SEQ ID NO: 2351 - DNA, 402 bp, Streptococcus pneumoniae
atgacagaaatgcttaaaggaatcgcagcatctgacggtgttgcagttgcaaaagcatatctactcgttcagccggatttgtcatttgagactattacagtcgaagatacaaacgcagaagaagctcgccttgatgccgctctacaggcatcacaagacgagctttctgttattcgcgagaaagcagtaggtacgctcggtgaagaagcagctcaagtttttgatgctcacttaatggttcttgctgacccagaaatgatcagccaaatcaaggaaactatccgtgcgaagaaagtgaatgcagaagcaggtctgaaagaagttacagatatgtttatcactatctttgaaggcatggaagacaacccatacatgcaagaacgcgcagcgatatccgcgacg

SEQ ID NO: 2352 - protein, 134 aa, Streptococcus pneumoniae
  phosphoenolpyruvate-protein phosphotransferase FRAMESHIFT (ptsI); Cellular location: cytoplasm; Similar to strain R6 sequence 15903106 (0.E+01)
MTEMLKGIAASDGVAVAKAYLLVQPDLSFETITVEDTNAEEARLDAALQASQDELSVIREKAVGTLGEEAAQVFDAHLMVLADPEMISQIKETIRAKKVNAEAGLKEVTDMFITIFEGMEDNPYMQERAAISAT

SEQ ID NO: 2353 - DNA, 261 bp, Streptococcus pneumoniae
atggcttctaaagatttccacgtagtggcagaaacaggtattcacgcacgtccagcaacattgttggtacaaactgctagcaaatttgcttcagatatcactcttgagtacaaaggtaaatcagttaaccttaaatcaattatgggtgttatgagtcttggtgttggccaaggtgctgacgtaactatctcagctgaaggtgcagatgcagatgacgctatcgctgcaatctcagaaacaatggaaaaagaaggattggca

SEQ ID NO: 2354 - protein, 87 aa, Streptococcus pneumoniae
  phosphocarrier protein HPr (ptsH); Cellular location: cytoplasm; Similar to strain R6 sequence 15903107 (1.E-43)
MASKDFHVVAETGIHARPATLLVQTASKFASDITLEYKGKSVNLKSIMGVMSLGVGQGADVTISAEGADADDAIAAISETMEKEGLA

SEQ ID NO: 2355 - DNA, 234 bp, Streptococcus pneumoniae
ttgaagaggagttacacaatggtaaccgtttattctaaaaacaattgtgtccaatgtaaaatgaccaagcgtttcttggacagtaataatgtctcttatcgtgaaatcaatcttgatgagcaacctgagtacgtcgatcaagttaaagagctcggttttagcgcagctcctgttatccaaacaccaactgaagtcttttcaggtttccaaccaggaaaactgaaacaattagca

SEQ ID NO: 2356 - protein, 78 aa, Streptococcus pneumoniae
  NrdH-redoxin (nrdH); Cellular location: cytoplasm; Similar to strain R6 sequence 15903108 (3.E-38)
MKRSYTMVTVYSKNNCVQCKMTKRFLDSNNVSYREINLDEQPEYVDQVKELGFSAAPVIQTPTEVFSGFQPGKLKQLA

SEQ ID NO: 2357 - DNA, 2157 bp, Streptococcus pneumoniae
atgggattaaaacatcttgaagacgtgacttacttccgtcttaataacgaaattaaccgtcctgttaatggacaaatcatgcttcataaagacaaggaagccttggatgctttctttaaagaaaatgtagttccaaacactatggtttttgattcaatcaaagacaaaatcaattacctcattgaacacaactacatcgaaacagcctttatcaagaaataccgtccagagttcttggaagaattagctcaatttatcaaagaccaaaacttccaattcaagtcattcatggcagcttataaattttacaatcaatatgccttaaagactaatgacggtgaatactatcttgaaaatatggaagaccgtgtcttcttcaatgccctttatttcgctgatgggaatgaagctgttgcaatcgatattgccaatgaaatcatccaccaacgctaccaacctgctactccttccttcttgaatgctggacgtgctcgtcgtggggagttggtatcttgtttcctaatccaagtgacggatgatatgaactctatcgggcgttctatcaactcagctcttcaactttcacgtattggtggtggtgtgggaattaccctcagcaaccttcgtgaagctggtgcacctatcaaaggctatgaaggagctgcttcaggtgtcgttcctgttatgaagctttttgaagacagcttctcttactccaaccaattggggcaacgtcaaggtgctggtgttgtctacctcaacgtctttcacccagatatcatcgctttcctttcaactaagaaagaaaacgctgatgaaaaagtacgtgtcaagactctatcacttggtgttgtagtacctgataaattctacgaattggctcgtaaaaatgaagaaatgtacctcttcagcccttactctgtagaaaaagaatacggtgtgccattcaattacatcgacattactgaaaaatacgatgaattggtcgcaaatccaaatattcgcaagacaaaaatcaaggcgcgggatttggaaactgaaatctctaaattgcaacaagagtctggctatccttatgtagtcaacatcgatacggctaaccgtgcaaatcctgttgatggaaagattatcatgagtaacttgtgttctgagattcttcaagttcaagaaccaagcttgatcaacgatgctcaagaattccttcaaatgggaacagatgtttcatgtaacctgggttcaaccaacgtggttaacatgatgacttcacctgattttggtcgttctatccgtgctatggttcgtgcccttactttcgttacagatagttcacatatcgtagctgtaccaacgattgaccatggaaatagccaagcccacacctttggtctcggtgccatgggactgcacagctaccttgcccaacaactcattgaatatggttcacctgagtctgttgaatttacaagcatctactttatgcttatgaactactggaccttggtagagtcaaacaatattgcacgtgaacgtggtattaccttccacaactttgaaaaatcagactatgctaacggaagttactttgacaagtatgtaactggtgaatttgttccaacatcagaccgtgttaaagaactcttcaaaaatgtctttatccctggtgttgctgattgggctgaacttcgcgacaaggttcaagaagatggtctttaccaccaaaatcgccttgctgtagcgccaaatggttctatcagctatatcaacgacgtttctgcttctatccacccgattacgcaacgtatcgaagaacgccaagagaagaaaattggtaaaatctattaccctgctgctggcttgtctacagaaaccattccttactacacttctgcctacgatatggatatgcgtaaagtcatcgatgtttacgctgctgcgactgaacacgtggatcaaggactttcactcaccctcttcatgcgcagtgacattccaaaaggcctttacgaatggaagagggaaaataaacaaacgacacgtgacttgtccatccttcgtaactatgcctttaacaagggaatcaagtctatctactacgtccgtacctttacagatgacggtggagaagtcggcgccaaccaatgtgaaagctgtgtgatt

SEQ ID NO: 2358 - protein, 719 aa, Streptococcus pneumoniae
  ribonucleoside-diphosphate reductase 2, alpha subunit (nrdE); Cellular location: cytoplasm; Similar to strain R6 sequence 15903109 (0.E+01)
MGLKHLEDVTYFRLNNEINRPVNGQIMLHKDKEALDAFFKENVVPNTMVFDSIKDKINYLIEHNYIETAFIKKYRPEFLEELAQFIKDQNFQFKSFMAAYKFYNQYALKTNDGEYYLENMEDRVFFNALYFADGNEAVAIDIANEIIHQRYQPATPSFLNAGRARRGELVSCFLIQVTDDMNSIGRSINSALQLSRIGGGVGITLSNLREAGAPIKGYEGAASGVVPVMKLFEDSFSYSNQLGQRQGAGVVYLNVFHPDIIAFLSTKKENADEKVRVKTLSLGVVVPDKFYELARKNEEMYLFSPYSVEKEYGVPFNYIDITEKYDELVANPNIRKTKIKARDLETEISKLQQESGYPYVVNIDTANRANPVDGKIIMSNLCSEILQVQEPSLINDAQEFLQMGTDVSCNLGSTNVVNMMTSPDFGRSIRAMVRALTFVTDSSHIVAVPTIDHGNSQAHTFGLGAMGLHSYLAQQLIEYGSPESVEFTSIYFMLMNYWTLVESNNIARERGITFHNFEKSDYANGSYFDKYVTGEFVPTSDRVKELFKNVFIPGVADWAELRDKVQEDGLYHQNRLAVAPNGSISYINDVSASIHPITQRIEERQEKKIGKIYYPAAGLSTETIPYYTSAYDMDMRKVIDVYAAATEHVDQGLSLTLFMRSDIPKGLYEWKRENKQTTRDLSILRNYAFNKGIKSIYYVRTFTDDGGEVGANQCESCVI

SEQ ID NO: 2359 - DNA, 960 bp, Streptococcus pneumoniae
atggaaacttactacaaagccattaactggaatgccatcgaagatgtcatcgacaaatcaacttgggaaaaactgacggagcaattttggctcgatacacgtattcccttatcaaacgacttggatgactggagaaagctatctaacaaagagaaagacttggtcggaaaagtttttggtggtttaacccttcttgacactatgcaatctgaaactggggttcaagcccttcgcgcagacatccgtacaccacatgaggaagctgtcttcaataacatccaatttatggaatctgtccacgctaaatcttactcatcaatcttttctaccttgaatactaaggctgagattgaagaaattttcgaatggaccaataccaatccttacctacaaaagaaggctgagattgtcaacgaaatctacctaaacggcagcccacttgaaaagaaagttgccagcgtcttcctcgaaaccttcctcttctactctggtttcttcactcccctctactatctcggtaacaacaaacttgccaacgttgcagaaatcattaaattgattattcgtgacgagtctgttcacggaacctacattggttacaaattccaacttggtttcaatgaattacctgaagaagagcaagaaaaactcaaagaatggatgtacgacctactctatactctttatgaaaatgaagaaggctacacagagagtctttatgacggtgttggttggactgaagaggttaaaaccttccttcgctacaatgccaataaagctctcatgaacatgggacaagatccacttttcccagattcagctgaagatgtcaacccaatcgttatgaacggtatttcaacaggaacttccaaccatgacttcttctctcaagtcggaaatggttaccttcttggcgaagttgaagccatgcaagatgatgactacaactacggtttgcac

SEQ ID NO: 2360 - protein, 320 aa, Streptococcus pneumoniae
  ribonucleoside-diphosphate reductase 2, beta subunit (nrdF); Cellular location: cytoplasm; Similar to strain R6 sequence 15903110 (0.E+01)
METYYKAINWNAIEDVIDKSTWEKLTEQFWLDTRIPLSNDLDDWRKLSNKEKDLVGKVFGGLTLLDTMQSETGVQALRADIRTPHEEAVFNNIQFMESVHAKSYSSIFSTLNTKAEIEEIFEWTNTNPYLQKKAEIVNEIYLNGSPLEKKVASVFLETFLFYSGFFTPLYYLGNNKLANVAEIIKLIIRDESVHGTYIGYKFQLGFNELPEEEQEKLKEWMYDLLYTLYENEEGYTESLYDGVGWTEEVKTFLRYNANKALMNMGQDPLFPDSAEDVNPIVMNGISTGTSNHDFFSQVGNGYLLGEVEAMQDDDYNYGLH

SEQ ID NO: 2361 - DNA, 96 bp, Streptococcus pneumoniae
ttggttaatttttcttgtttgagcatattatcacctcgtttcctactactatcttaccataaactagctcatcattcaaatacaaaaacaacaaaa

SEQ ID NO: 2362 - protein, 32 aa, Streptococcus pneumoniae
  hypothetical protein; Cellular location: cytoplasm
MVNFSCLSILSPRFLLLSYHKLAHHSNTKTTK

SEQ ID NO: 2363 - DNA, 759 bp, Streptococcus pneumoniae
atgctcaaacaagaaaaattaaccaaaattttagagatagtaaatagtaaaggaaccataacagttaaacagattatggacgaaatagccgtttcagatatgactgcaaggcgctatttacaggaattagctgataaagatttgctgattcgtgtgcatggtggagctgaaaaacttcgaaccaactcccttttgactaatgagcgatcaaatattgaaaaacaagccctccaaacggcagaaaaacaagaaatagcccattttgcaggcagtctagtagaagaaagagaaactattttcattggaccaggaacaacattagagttttttgcgcgtgagttgcctattgacaatatccgcgtcgtaaccaacagtctacctgtttttctgattttaagcgaacgaaaattaacagatttgattttaataggtggaaattatcgcgatattacaggtgcttttgttggtacattgaccctacaaaatctctctaatctccaattttctaaagctttcgttagctgtaatggtattcaaaacggagctctagctacttttagcgaggaagagggagaggctcaacgcatcgctttaaataattctaataaaaaatatttactcgcagatcatagcaagttcaataagtttgatttttatactttttataatgtatcaaatcttgatactattgtttcagattctaaactaagtgattcaatcctttttaagctatctaaacacattaaagtcatcaagcct

SEQ ID NO: 2364 - protein, 253 aa, Streptococcus pneumoniae
  lactose phosphotransferase system repressor (lacR); Cellular location: cytoplasm; Similar to strain R6 sequence 15903111 (e-138)
MLKQEKLTKILEIVNSKGTITVKQIMDEIAVSDMTARRYLQELADKDLLIRVHGGAEKLRTNSLLTNERSNIEKQALQTAEKQEIAHFAGSLVEERETIFIGPGTTLEFFARELPIDNIRVVTNSLPVFLILSERKLTDLILIGGNYRDITGAFVGTLTLQNLSNLQFSKAFVSCNGIQNGALATFSEEEGEAQRIALNNSNKKYLLADHSKFNKFDFYTFYNVSNLDTIVSDSKLSDSILFKLSKHIKVIKP

SEQ ID NO: 2365 - DNA, 162 bp, Streptococcus pneumoniae
ttgaaaagtcttggaaaatggtatgtctcgactggtaaagaatggatttgtcattcagatgatgagctggaagaatttaaaaatctatttttaaattttatcaatcctgaagaatgggatactatctcctttgattcagattttatgccgtttcaacaatcg

SEQ ID NO: 2366 - protein, 54 aa, Streptococcus pneumoniae
  hypothetical protein; Cellular location: cytoplasm
MKSLGKWYVSTGKEWICHSDDELEEFKNLFLNFINPEEWDTISFDSDFMPFQQS

SEQ ID NO: 2367 - DNA, 1413 bp, Streptococcus pneumoniae
gtgaaaaaaatgacaaaaacacttccaaaagactttatttttggtggcgcaacagctgcttatcaagcagaaggtgctacacatactgatggaaaaggaccagttgcttgggataaatatcttgaggataactactggtacactgccgaaccagctagtgatttttacaatcgatatccagttgacctcaagctagcagaagagtatggtgtcaatggtattcgaatttctattgcttggtcacgtattttcccgactggttacggccaagtaaatgctaaaggtgttgagttttatcataatttatttgcagagtgtcacaaacgtcatgttgagccttttgtaactcttcatcactttgacacgccagaagctctccactcaaatggagacttcttaaaccgtgaaaatatcgaacattttgtagactacgctgccttctgttttgaagaatttccagaagtaaactattggacaacctttaatgaaattggaccaatcggtgatggtcaatatttggttgggaaattccctccaggtatccagtacgaccttgccaaagtctttcaatcacaccacaatatgatggtgtctcatgcacgcgcggtaaaattgtacaaagagaaaggctataaaggggaaattggtgttgttcacgccctgccaactaaatatcctctagatcctgaaaatccagcagatgttcgtgcagctgagttggaagatatcatccacaataaattcatcttagacgcaacttatctaggtcgctattcagctgaaaccatggaaggtgtcaaccatatcttattagtcaatggtggtagtttggatcttcgtgaagaagattttacagcattagaagctgcaaaagacttgaatgatttcctaggaatcaactactatatgagtgactggatggaagcctttgatggagaaactgaaattatccataatggtaaaggtgaaaaaggaagctctaagtatcaaatcaaaggtgttggtcgtcgtgtagctcctgactatgtaccacgcacggattgggattggattatctaccctcaaggtttgtatgaccaaatcatgcgtgtgaagaaagattatcctaactacaagaagatttacatcactgaaaatggtctcggctataaagatgagttcgttgataacactgtttacgatgatggtcgtattgattacgtgaagcaacacttggaggttttatctgatgcgattgcagatggagctaatgtaaaaggttacttcatttggtcattaatggatgtcttctcatggtcaaacggttatgagaaacgttatggtctcttctacgtagattttgaaactcaagaacgttatcctaagaaatcagctcactggtacaagaaagtagcggaaactcagattatagac

SEQ ID NO: 2368 - protein, 471 aa, Streptococcus pneumoniae
  6-phospho-beta-galactosidase (lacG); Cellular location: cytoplasm; Similar to strain R6 sequence 15903112 (0.E+01)
MKKMTKTLPKDFIFGGATAAYQAEGATHTDGKGPVAWDKYLEDNYWYTAEPASDFYNRYPVDLKLAEEYGVNGIRISIAWSRIFPTGYGQVNAKGVEFYHNLFAECHKRHVEPFVTLHHFDTPEALHSNGDFLNRENIEHFVDYAAFCFEEFPEVNYWTTFNEIGPIGDGQYLVGKFPPGIQYDLAKVFQSHHNMMVSHARAVKLYKEKGYKGEIGVVHALPTKYPLDPENPADVRAAELEDIIHNKFILDATYLGRYSAETMEGVNHILLVNGGSLDLREEDFTALEAAKDLNDFLGINYYMSDWMEAFDGETEIIHNGKGEKGSSKYQIKGVGRRVAPDYVPRTDWDWIIYPQGLYDQIMRVKKDYPNYKKIYITENGLGYKDEFVDNTVYDDGRIDYVKQHLEVLSDAIADGANVKGYFIWSLMDVFSWSNGYEKRYGLFYVDFETQERYPKKSAHWYKKVAETQIID

SEQ ID NO: 2369 - DNA, 1689 bp, Streptococcus pneumoniae
atgaataaactaattgcatttatcgagaaaggaaagcctttctttgaaaaactatctcgtaatatctatcttcgtgctattcgtgatggtttcattgcaggtatgcctgttattctcttctcaagtatctttatcttgattgcctttgtaccaaactcatggggctttaaatggtctgatgaagttgtagcctttctgatgaaaccttatagctattctatgggtattctggctctcttggtagctggtacaacagctaagtcattgactgactcagtaaaccggagcatggaaaaaaccaatcaaatcaagtatatgtcaacattgttggcagcaattgttggtttgttgatgttggcagctgatcctatcgaaagtggtctagctactggattcttggggacaaaaggtttgctttcagccttccttgctgcctttgttactgtagccatctataaggtttgtgttaagaacaacgtcactattcgtatgcctgacgaagttccaccaaatatctcacaagtctttaaagatgtgattccattcactctatctgttgtttctctttatgctcttgacttattagcacgttattttgttggttctagtgtggcagaatcaatcggtaaattcttcgcaccactcttctcagcagcagacggataccttggtattaccattatctttggtgcctttgccttcttctggtttgttgggattcatggtccatctatcgttgaaccagctatcgcagctattacctatgccaatgccgaagttaacttgaaccttctccaacaagggatgcatgcagacaagattcttacttctggtacacaaatgtttatcgttaccatgggtggtacaggtgcgacattggtcgttccatttatgttcatgtggttgacaaaatcgaaacgtaaccgtgcaatcggacgtgcttcagtagttcctaccttcttcggtgtaaatgaaccaatcttgtttggtgcacctcttgttttgaatccaatcttcttcattccatttatctttgctccaattgcaaacgtatggattttcaaattctttattgaaactcttggaatgaactcattcactgctaatctaccatggacaactccagctccactaggtctagttcttggaactaacttccaagtgctatcattcattcttgctgcccttctaatcgtggttgacgttgtcatttactatccattccttaaggtctatgatgaacaaattcttgaagaagaacgttcaggtaagtctaatgatgaattgaaagaaaaagttgctgcaaacttcaacactgcaaaagcggatgctattcttgaaaaagcgggtgtcgatgcagcacaaaataccatcactgaagaaacaaatgtcctcgttctctgtgcaggtggaggaacaagtggtctccttgcaaatgctttgaataaggcagcagcagaatacaatgtccctgtgaaagcagcagcaggcggctatggtgctcaccgtgaaatgttaccagagtttgatcttgttatccttgcccctcaagttgcttcaaactttgaagatatgaaagcagaaacagataagctcggtattaaactagcgaaaacagaaggcgctcaatacatcaaattaactcgtgatggaaaaggtgctcttgcattcgtacaagcgcaattcgat

SEQ ID NO: 2370 - protein, 563 aa, Streptococcus pneumoniae
  PTS system, lactose-specific IIBC components (lacE); Cellular location: membrane; Similar to strain R6 sequence 15903113 (0.E+01)
MNKLIAFIEKGKPFFEKLSRNIYLRAIRDGFIAGMPVILFSSIFILIAFVPNSWGFKWSDEVVAFLMKPYSYSMGILALLVAGTTAKSLTDSVNRSMEKTNQIKYMSTLLAAIVGLLMLAADPIESGLATGFLGTKGLLSAFLAAFVTVAIYKVCVKNNVTIRMPDEVPPNISQVFKDVIPFTLSVVSLYALDLLARYFVGSSVAESIGKFFAPLFSAADGYLGITIIFGAFAFFWFVGIHGPSIVEPAIAAITYANAEVNLNLLQQGMHADKILTSGTQMFIVTMGGTGATLVVPFMFMWLTKSKRNRAIGRASVVPTFFGVNEPILFGAPLVLNPIFFIPFIFAPIANVWIFKFFIETLGMNSFTANLPWTTPAPLGLVLGTNFQVLSFILAALLIVVDVVIYYPFLKVYDEQILEEERSGKSNDELKEKVAANFNTAKADAILEKAGVDAAQNTITEETNVLVLCAGGGTSGLLANALNKAAAEYNVPVKAAAGGYGAHREMLPEFDLVILAPQVASNFEDMKAETDKLGIKLAKTEGAQYIKLTRDGKGALAFVQAQFD

SEQ ID NO: 2371 - DNA, 315 bp, Streptococcus pneumoniae
atgaatagagaagaagtaacattgttaggttttgaaatcgtagcctatgctggcgatgctcgttcaaaactattggaagccttgaaggctgctgaagctggtgattttgaaaaagcggacgctctggtagaggaagctggtagctgtattgcagaggctcaccacgcgcaaacaagtctattgactaaggaagcttcaggtgaggacttggcttatagtgtaaccatgatgcatggccaagaccacttaatgacaactatcttgttaaaagatttgatgcatcatttaattgaactctacaagagaggagttcaa

SEQ ID NO: 2372 - protein, 105 aa, Streptococcus pneumoniae
  PTS system, lactose-specific IIA component (lacF); Cellular location: cytoplasm; Similar to strain R6 sequence 15903114 (5.E-55)
MNREEVTLLGFEIVAYAGDARSKLLEALKAAEAGDFEKADALVEEAGSCIAEAHHAQTSLLTKEASGEDLAYSVTMMHGQDHLMTTILLKDLMHHLIELYKRGVQ

SEQ ID NO: 2373 - DNA, 834 bp, Streptococcus pneumoniae
atgtatcgaattctaaatccaatgaatcacaatgtctcgcttgtcagaaatgataagggagaagaggtgattgtaattggtaagggaattgcattcggaaagaagaagggggatttgattgctgaaaatcaggttgagaaaatctttcggatgaagaccgaagagtccagagaaaactttatggctcttctcaaagatgttccgcttgattttatcacagtgacctatgaaatcattgataagctatcaaagaaatatcattatccgattcaagagtatctctatgtaaccttgacagatcatatttactgttcttatcaagctctaactcaaggaaggtacaaggatagtaatctgccagatatttccgctaagtatcctgtcgcttttcaaatcgcaaatgaagcttttgaaatttaccgtcagaagctagcagatcattttcctgaggacgaaattattcggattgcttatcatttcattaatgctgaaggtgaaaatgaagtggaacttgtggagtcgattgataagaggaaagaaattctcaggaatgttgaagaagttttaacggactatgcaattcaacgaactaaaaagaataaccatttctatgatcgctttatgatccatttgaattatttcttggattatttagacagatctagagatgataaccaatcacttctggatatggaagatcatattaaacaatcctatccaaaagccttcgagattggttccaagatctatgatgtgattacgcaacatacgggtcttgatttgtataaaagtgaacgagtttatctagttctacatatccaacgtttattgtca

SEQ ID NO: 2374 - protein, 278 aa, Streptococcus pneumoniae
  transcription antiterminator LacT (lacT); Cellular location: cytoplasm; Similar to strain R6 sequence 15903115 (e-159)
MYRILNPMNHNVSLVRNDKGEEVIVIGKGIAFGKKKGDLIAENQVEKIFRMKTEESRENFMALLKDVPLDFITVTYEIIDKLSKKYHYPIQEYLYVTLTDHIYCSYQALTQGRYKDSNLPDISAKYPVAFQIANEAFEIYRQKLADHFPEDEIIRIAYHFINAEGENEVELVESIDKRKEILRNVEEVLTDYAIQRTKKNNHFYDRFMIHLNYFLDYLDRSRDDNQSLLDMEDHIKQSYPKAFEIGSKIYDVITQHTGLDLYKSERVYLVLHIQRLLS

SEQ ID NO: 2375 - DNA, 144 bp, Streptococcus pneumoniae
atgaatcattcttttaaaaaaataactgtattttgttttatagtttcttgtgttctttgtttattagacttaatgaattttaaaaatgtagctacttttttatttttctgtcttcctgtttttgttttgatttacaaaaataaa

SEQ ID NO: 2376 - protein, 48 aa, Streptococcus pneumoniae
  hypothetical protein; Cellular location: membrane
MNHSFKKITVFCFIVSCVLCLLDLMNFKNVATFLFFCLPVFVLIYKNK

SEQ ID NO: 2377 - DNA, 540 bp, Streptococcus pneumoniae
atggttagtggttctgtatttgcagatagtgccctaactacagtagataaagcaaatgatattgttttgaatgttgatgggaataaattttataatgtttcggtttcagaagatattgtaaatgctggtcaaattttggaagattatttttatgtagataaatttggaaatataaatttaaaaggcactcctgaagagttagcaaaaaatattggtatttctgtacaagaagcaagtttgatgtatggagctgtaaaagagttacccaacgtttacgaaagaggtcctgtaggttttcgtttcaatcttggtcctcaagtgagggggatgggtggctgggctgctggagctttcgctactggatatgctggatggcatttgaaacaatttgcggttaatcctgttacatctggatttgttgctgtaataagtggtgcgattggctgggctgtaaaaactgctgtagaaaattattggacagttgctgtagctacagtagaagtgccgtttgtgaaccttgtttacaccatagatttacct

SEQ ID NO: 2378 - protein, 180 aa, Streptococcus pneumoniae
  hypothetical protein; Cellular location: membrane
MVSGSVFADSALTTVDKANDIVLNVDGNKFYNVSVSEDIVNAGQILEDYFYVDKFGNINLKGTPEELAKNIGISVQEASLMYGAVKELPNVYERGPVGFRFNLGPQVRGMGGWAAGAFATGYAGWHLKQFAVNPVTSGFVAVISGAIGWAVKTAVENYWTVAVATVEVPFVNLVYTIDLP

SEQ ID NO: 2379 - DNA, 978 bp, Streptococcus pneumoniae
atggctttaacagaacaaaaacgtgtacgcttagaaaaactttctgatgaaaatggtatcatctcagctcttgcatttgaccaacgtggtgctttgaaacgcctcatggttaaacaccaaacagaagaaccaactgtggcccaaatggaagaacttaaagtcttggtagcagatgaattgactaaatatgcttcatctatgcttcttgaccctgagtatggacttccagcaactaaagctcttgatgaaaaagctggtcttctccttgcttatgaaaaaacaggttatgacacaacaagcacaaaacgcttgccagactgcttggatgtttggtctgcaaaacgtattaaagaagaaggtgcagatgcagttaaattcttgctttactatgatgtagatagctcagacgaactcaatcaagaaaaacaagcctacatcgaacgcatcggttctgagtgtgtggctgaagatatcccattcttccttgaaatccttgcttacgatgaaaaaattgcggatgcaggttctgtagaatacgctaaagtaaaaccacacaaagttatcggcgctatgaaagtcttttcagacccacgctttaacattgatgttttgaaagttgaagttcctgttaacattaaatatgttgaaggcttcgctgaaggtgaagtagtttatacacgtgaagaagcagcagccttcttcaaagcgcaagatgaagcaacgaacttgccatacatctacttgagtgctggtgtatcagctaaactcttccaagatactcttgtatttgctcatgaatcaggtgcgaactttaacggagttctttgtggccgtgctacatgggcaggatcagttgaagcttacatcaaagatggtgaagcagcagctcgcgaatgcgttcgcacaactggatttgaaaacattgacgaactcaacaaagttcttcaaagaacagcaacttcatggaaagaacgcgtg

SEQ ID NO: 2380 - protein, 326 aa, Streptococcus pneumoniae
  tagatose 1,6-diphosphate aldolase (lacD); Cellular location: cytoplasm; Similar to strain R6 sequence 15903116 (0.E+01)
MALTEQKRVRLEKLSDENGIISALAFDQRGALKRLMVKHQTEEPTVAQMEELKVLVADELTKYASSMLLDPEYGLPATKALDEKAGLLLAYEKTGYDTTSTKRLPDCLDVWSAKRIKEEGADAVKFLLYYDVDSSDELNQEKQAYIERIGSECVAEDIPFFLEILAYDEKIADAGSVEYAKVKPHKVIGAMKVFSDPRFNIDVLKVEVPVNIKYVEGFAEGEVVYTREEAAAFFKAQDEATNLPYIYLSAGVSAKLFQDTLVFAHESGANFNGVLCGRATWAGSVEAYIKDGEAAARECVRTTGFENIDELNKVLQRTATSWKERV

SEQ ID NO: 2381 - DNA, 927 bp, Streptococcus pneumoniae
atgattttaacagtcacaatgaacccatccatcgatatttcctatcccttggatgagttgaagattgatactgtcaatcgtgtggtggatgtaaccaaaacggctggtggtaagggactcaatgttacccgagtactttcagaatttggcgattctgttcttgctactggtttagtgggtggcaaacttggtgagtttttggttgaacatatcgataatcaagtaaagaaagatttcttctcaattaagggagaaactcgtaactgtatcgctattctccacggagacaaccaaacagaagttcttgaaaaaggtcctgaagtattggaacaggaaggtcaagagtttttggaacatttcaaaaaactcttggagtcagttgaagtagtagccatctcaggtagtctgccagctggccttccagttgattactatgcgagcttggtagaacttgctaatcaagctggcaagcatgtagtcttggactgctcaggtgcagcacttcaggctgttcttgaatcaccccataaaccaacagtcatcaaaccaaataatgaagaattgtctcagcttcttggaagagaagtttctgaggatttggatgaattaaaagaagtacttcaagaacctttgtttgcagggattgaatggattatcgtttcacttggtgccaacggtacttttgccaaacatggtgacactttctacaaggtagatattcctagaattcaggtggtaaatcctgttggatctggagactctactgtggcaggaatttcttcaggacttcttcacaaagaatcggatgcagaattactcatcaaggcaaatgtccttggtatgctcaatgctcaagaaaaaatgactggtcatgtcaacatggccaactatcaagctctatatgatcaattaatagtaaaagaggta

SEQ ID NO: 2382 - protein, 309 aa, Streptococcus pneumoniae
  tagatose-6-phosphate kinase (lacC); Cellular location: cytoplasm; Similar to strain R6 sequence 15903117 (e-172)
MILTVTMNPSIDISYPLDELKIDTVNRVVDVTKTAGGKGLNVTRVLSEFGDSVLATGLVGGKLGEFLVEHIDNQVKKDFFSIKGETRNCIAILHGDNQTEVLEKGPEVLEQEGQEFLEHFKKLLESVEVVAISGSLPAGLPVDYYASLVELANQAGKHVVLDCSGAALQAVLESPHKPTVIKPNNEELSQLLGREVSEDLDELKEVLQEPLFAGIEWIIVSLGANGTFAKHGDTFYKVDIPRIQVVNPVGSGDSTVAGISSGLLHKESDAELLIKANVLGMLNAQEKMTGHVNMANYQALYDQLIVKEV

SEQ ID NO: 2383 - DNA, 486 bp, Streptococcus pneumoniae
atggatgggttcattgtgactgttaaaatcataggtcacctcttagtcgtggtattctccacgatcccatttctcaaggaattctgtaaagaagtttgcgtctgtttgttgagcattgtgactttcaacatgttcaattttcgcaatcaattttttgttttcttcagttggtttgtattcagcatggatgaaagcttcgatgatatcacacataagcaattcaccagtaattttaccaccaaaaccaataacgttagcgttcaattgttctttagcataaagggctgttgtcatatcacgaaccaaggcagaacgaacacctggaactttatttacagcgttgttgataccaacaccagtaccacagatacatactccaagatcagcttgaccgctagttacagcttcccctacttttttaccaaagattgggtagtgagtccgtgtatggtcataggtaccaaagtcaatgacttcatatccttt

SEQ ID NO: 2384 - protein, 162 aa, Streptococcus pneumoniae
  hypothetical protein
MDGFIVTVKIIGHLLVVVFSTIPFLKEFCKEVCVCLLSIVTFNMFNFRNQFFVFFSWFVFSMDESFDDITHKQFTSNFTTKTNNVSVQLFFSIKGCCHITNQGRTNTWNFIYSVVDTNTSTTDTYSKISLTASYSFPYFFTKDWVVSPCMVIGTKVNDFISF

SEQ ID NO: 2385 - DNA, 513 bp, Streptococcus pneumoniae
atgagaattgcaattggatgtgaccacatcgtaactgatgaaaaaatggcggtttcagaatttttgaaatcaaaaggatatgaagtcattgactttggtacctatgaccatacacggactcactacccaatctttggtaaaaaagtaggggaagctgtaactagcggtcaagctgatcttggagtatgtatctgtggtactggtgttggtatcaacaacgctgtaaataaagttccaggtgttcgttctgccttggttcgtgatatgacaacagccctttatgctaaagaacaattgaacgctaacgttattggttttggtggtaaaattactggtgaattgcttatgtgtgatatcatcgaagctttcatccatgctgaatacaaaccaactgaagaaaacaaaaaattgattgcgaaaattgaacatgttgaaagtcacaatgctcaacaaacagacgcaaacttctttacagaattccttgagaaatgggatcgtggagaataccacgac

SEQ ID NO: 2386 - protein, 171 aa, Streptococcus pneumoniae
  galactose-6-phosphate isomerase, LacB subunit (lacB); Cellular location: cytoplasm; Similar to strain R6 sequence 15903118 (3.E-98)
MRIAIGCDHIVTDEKMAVSEFLKSKGYEVIDFGTYDHTRTHYPIFGKKVGEAVTSGQADLGVCICGTGVGINNAVNKVPGVRSALVRDMTTALYAKEQLNANVIGFGGKITGELLMCDIIEAFIHAEYKPTEENKKLIAKIEHVESHNAQQTDANFFTEFLEKWDRGEYHD

SEQ ID NO: 2387 - DNA, 423 bp, Streptococcus pneumoniae
atgtctattgttatcggtgcagatgctgcaggtttgagattgaaagaagttgtgaaagacttcttagaaaaagaaaacttccaccttgtggatgttacagctgaaggtcaagactttgttgatgtgactctcgctgttgctgcagaagtaaacaaagaagaacaaaaccttggtatcgtgattgatgcttatggagctggtccatttatagttgcaactaagatcaaaggaatggttgctgcagaagtatctgacgaacgttcagcttatatgactcgtggccacaacaactcacgtatgatcactatgggagcacaacttgttggtgatgaattggctaaaaatatcgctaaaggatttgttaatggtaaatacgacggtggtcgtcaccaaatccgggttgacatgttgaacaaaatgggc

SEQ ID NO: 2388 - protein, 141 aa, Streptococcus pneumoniae
  galactose-6-phosphate isomerase, LacA subunit (lacA); Cellular location: cytoplasm; Similar to strain R6 sequence 15903119 (6.E-76)
MSIVIGADAAGLRLKEVVKDFLEKENFHLVDVTAEGQDFVDVTLAVAAEVNKEEQNLGIVIDAYGAGPFIVATKIKGMVAAEVSDERSAYMTRGHNNSRMITMGAQLVGDELAKNIAKGFVNGKYDGGRHQIRVDMLNKMG

SEQ ID NO: 2389 - DNA, 342 bp, Streptococcus pneumoniae
atgttggatttccaagatagaagtccatggctagagggacaaaaagaaatagatcttagttatgatcttttcagcacagatgcagtgactttggatgaattgcaatctcgaacaattgcccttcgttctcttaaacatgataagggattgaaagtgcattttgcagaatttccaaacctcatcatctggtcaactttgaacaagggacctttcattacctttgaaccatggtctggcttgtcaacatcccttgaagaaggagatcatttagaagataagaagaatgtttgtctcttagaagccaatcaggttgaagaattagggtttgagatagaagtttta

SEQ ID NO: 2390 - protein, 114 aa, Streptococcus pneumoniae
  lacX protein, truncation; Cellular location: cytoplasm; Similar to strain R6 sequence 15903120 (1.E-62)
MLDFQDRSPWLEGQKEIDLSYDLFSTDAVTLDELQSRTIALRSLKHDKGLKVHFAEFPNLIIWSTLNKGPFITFEPWSGLSTSLEEGDHLEDKKNVCLLEANQVEELGFEIEVL

SEQ ID NO: 2391 - DNA, 387 bp, Streptococcus pneumoniae
atgaaggctcaagcgattgtcacaagtcaagggagaattgtttctttggatatcactgtgaactattgtcatgatatgaagttgttcaaaatgagtcgcagaaatatcggacaagctggtaaaatcttggctgacagtggttatcaaggacccatgaagatatatcctcaagcacaaactccacgtaaatccagcaaactcaagccgctaacagttgaagataaagcctataaccatgcgctatctaaggagagaagcaaggttgagaacatctttgccaaagtaaaaacgtttaaaatgttttcaacaacctatcgaaatcatcgtaaacgcttcggattacgaatgaatttgattgctggtattatcaatcatgaactaggattc

SEQ ID NO: 2392 - protein, 129 aa, Streptococcus pneumoniae
  IS1381, transposase OrfB FRAMESHIFT; Cellular location: cytoplasm; Similar to strain R6 sequence 15902885 (5.E-67)
MKAQAIVTSQGRIVSLDITVNYCHDMKLFKMSRRNIGQAGKILADSGYQGPMKIYPQAQTPRKSSKLKPLTVEDKAYNHALSKERSKVENIFAKVKTFKMFSTTYRNHRKRFGLRMNLIAGIINHELGF

SEQ ID NO: 2393 - DNA, 120 bp, Streptococcus pneumoniae
ttgttcaaaggtggtgttacgatttcaagaactcctctcagttctgaagacacggtaatgattgatgcgacggaagtaaaaatcaatcgacctaaaaaaagaattagcgaattattctgg

SEQ ID NO: 2394 - protein, 40 aa, Streptococcus pneumoniae
  transposase, putative, FRAMESHIFT
MFKGGVTISRTPLSSEDTVMIDATEVKINRPKKRISELFW

SEQ ID NO: 2395 - DNA, 117 bp, Streptococcus pneumoniae
ttgatttttacttccgtcgcatcaatcattaccgtgtcttcagaactgagaggagttcttgaaatcgtaacaccacctttgaacaagagttacttcaacccattggctccgacggag

SEQ ID NO: 2396 - protein, 39 aa, Streptococcus pneumoniae
  hypothetical protein
MIFTSVASIITVSSELRGVLEIVTPPLNKSYFNPLAPTE

SEQ ID NO: 2397 - DNA, 397 bp, Streptococcus pneumoniae
atgaatgatgaagcaagtaaacaactaactgatacacgatttaaatgtcttgttggtgttcagcgcacgacttttgaagagatgttagctgtgttaaaaacagcttatcaacttaaacacgcaaaaggtggacgaaaacctaaattaagcctagaagaccttcttatggccactcttcactatgtgcgagaataccgcacttatgaagaaattgcggctgattttggtatccacgaaagcaacttactccgtcggagccaatgggttgaagtaactcttgttcaaaggtggtgttacgatttcaagaactcctctcagttctgaagacacggtaatgattgatgcgacggaagtaaaaatcaatcgacctaaaaaaagaattagcgaattattctgg

SEQ ID NO: 2398 - protein, 107 aa, Streptococcus pneumoniae
  IS1381, transposase OrfA FRAMESHIFT
MNDEASKQLTDTRFKCLVGVQRTTFEEMLAVLKTAYQLKHAKGGRKPKLSLEDLLMATLHYVREYRTYEEIAADFGIHESNLLRRSQWVEVTLVQRWCYDFKNSSQF

SEQ ID NO: 2399 - DNA, 300 bp, Streptococcus pneumoniae
atgattaaaattcttgctgcctgcggtgcaggtgttaactcaagtcaccaaattaaaagtgctctagaagaagaactttcaaaccgtggttacgatgttcactgtgatgcagttatggtgaaagatgtaaacgaagaccttatgaaaggttacgatatctttacaccaatcgctgcaacagaccttggttttgaaccaggtatcccagttatcgaagctgggccaatcttattccgtatcccagcaatgagcgttccagtatttgacaatattagacttcctgcgaaacaaaacatggta

SEQ ID NO: 2400 - protein, 100 aa, Streptococcus pneumoniae
  conserved hypothetical protein; Cellular location: cytoplasm; Similar to strain R6 sequence 15903123 (1.E-52)
MIKILAACGAGVNSSHQIKSALEEELSNRGYDVHCDAVMVKDVNEDLMKGYDIFTPIAATDLGFEPGIPVIEAGPILFRIPAMSVPVFDNIRLPAKQNMV

SEQ ID NO: 2401 - DNA, 270 bp, Streptococcus pneumoniae
atgattcctcacacagatattgttcataatctagctgagaaagtggtggttgttcgattagagaaaccggtgactttccataatatgattgcgccaggtaaggaagtagaagtatccttgctcttctttatcatcaataattcaagttcaagtcaaacgaacattcttgctcagttaatggacttcttcacaggaaatggtcatcttgaagacctatcaaaaatttctgaaccagaagccctttatgcttacattgctgaagcaaccgct

SEQ ID NO: 2402 - protein, 90 aa, Streptococcus pneumoniae
  hypothetical protein; Cellular location: cytoplasm; Similar to strain R6 sequence 15903124 (5.E-45)
MIPHTDIVHNLAEKVVVVRLEKPVTFHNMIAPGKEVEVSLLFFIINNSSSSQTNILAQLMDFFTGNGHLEDLSKISEPEALYAYIAEATA

SEQ ID NO: 2403 - DNA, 114 bp, Streptococcus pneumoniae
ttgttggaagaacgagaaattgtcactccaacttatcgtgaagccttgatcacgcgtgaaaagtcatttccaactggtttatatatggaatttctaggaaaggacttgcaaatg

SEQ ID NO: 2404 - protein, 38 aa, Streptococcus pneumoniae
  hypothetical protein (Phosphotransferase); Cellular location: cytoplasm; Similar to strain R6 sequence 15902606 (1.E-14)
MLEEREIVTPTYREALITREKSFPTGLYMEFLGKDLQM

SEQ ID NO: 2405 - DNA, 1884 bp, Streptococcus pneumoniae
atggtcttgtcaaaatatcaaaaacaatttataataaatagataccctgaaaggaagagaatcatgaacttagaagaattgaaaaaacgacaggagaagatccgtaacttctctattatcgcccatattgaccacggaaaatcaactctagcagaccgcattttggaaaaaacagagacggtttcaagtcgtgaaatgcaggcccagcttttggatagcatggagctagagcgggaacgtggaattactattaagttgaatgccatcgagttgaattacactgcaaaagatggggaaacttatattttccacttgattgacacaccagggcacgttgactttacctatgaagtttcacgttcgctagctgcctgtgagggtgctattttggtggtcgatgcggctcaaggaattgaggctcaaactcttgccaacgtttatctggctttggataatgatttggaaatcatgcctatcattaataaaattgacctgccggctgcagatccggagcgcgtgcgtacagagattgaagatgtgattggtttggatgccagtgaagcagttttggcttctgccaaggctggtattgggattgaagaaatcctcgagcaaattgtagaaaaagtaccagcaccaacgggtgatgtgacggcgccacttaaggccttgattttcgactctgtttacgatgcttaccgtggggttatcctccaagtgcgtgtcatggacggagtggtcaaacctggtgataagattcagctcatgagcaatagtaagacctttgatgtggccgaagtcggtatttttacaccaaaagcggttggtcgtgatttccttgcgactggtgatgttggttacattgcggcgtctatcaagacggttcaggatactcgtgtgggtgataccgttaccttggcaaccaatcctgcggcagaaccattacatggttataagcagatgaatcctatggtctttgcgggtctctacccaatcgaatcaaacaagtacaatgacctgcgtgaagcgcttgaaaaattgcaactgaatgatgctagtcttcagtttgaaccagaaacatctcaggcacttggatttggtttccgttgtggatttcttggacttctccatatggatgttatccaggaacgtttagagcgtgagttcaatattgacctcatcatgacagctccgtctgttatttacaaagttaatttgaccgacggtgagtctatggatgtgtctaacccatctgagtttccagacccaactaagattgcgaccattgaagagccttatgtcaaggcgcaaatcatggtaccacaggagttcgtcggagcagtaatggagctagctcagcgtaagcgtggggactttgtgactatggactatattgatgataaccgtgtcaatgttatctatcaaattcctcttgctgaaattgtctttgacttctttgataaacttaagtcttcgacacgtggttatgcaagctttgactacgaattgtcagaatatcgcccatctaagctggtgaaaatggatattcttctcaatggagataaggtggatgccctcagctttatcgttcacaaggactttgcctacgaacgtgggaaactcatcgttgataaactcaagaaaatcatccctcgccaacaatttgaagttccaatccaagcggctattggacacaagattgtcgctcgtactgatatcaaggcccttcgtaagaacgtacttgctaaatgttatggtggtgacgtttctcgtaagcgtaaactccttgaaaaacaaaaagctggtaagaaacgcatgaaatccatcggatcagttgaagttccgcaagaagccttcctcagcgtcttgagtatggatgaagaa

SEQ ID NO: 2406 - protein, 628 aa, Streptococcus pneumoniae
  GTP-binding protein LepA (lepA); Cellular location: cytoplasm; Feature of note: RGD motif; Similar to strain R6 sequence 15903125 (0.E+01)
MVLSKYQKQFIINRYPERKRIMNLEELKKRQEKIRNFSIIAHIDHGKSTLADRILEKTETVSSREMQAQLLDSMELERERGITIKLNAIELNYTAKDGETYIFHLIDTPGHVDFTYEVSRSLAACEGAILVVDAAQGIEAQTLANVYLALDNDLEIMPIINKIDLPAADPERVRTEIEDVIGLDASEAVLASAKAGIGIEEILEQIVEKVPAPTGDVTAPLKALIFDSVYDAYRGVILQVRVMDGVVKPGDKIQLMSNSKTFDVAEVGIFTPKAVGRDFLATGDVGYIAASIKTVQDTRVGDTVTLATNPAAEPLHGYKQMNPMVFAGLYPIESNKYNDLREALEKLQLNDASLQFEPETSQALGFGFRCGFLGLLHMDVIQERLEREFNIDLIMTAPSVIYKVNLTDGESMDVSNPSEFPDPTKIATIEEPYVKAQIMVPQEFVGAVMELAQRKRGDFVTMDYIDDNRVNVIYQIPLAEIVFDFFDKLKSSTRGYASFDYELSEYRPSKLVKMDILLNGDKVDALSFIVHKDFAYERGKLIVDKLKKIIPRQQFEVPIQAAIGHKIVARTDIKALRKNVLAKCYGGDVSRKRKLLEKQKAGKKRMKSIGSVEVPQEAFLSVLSMDEE

SEQ ID NO: 2407 - DNA, 285 bp, Streptococcus pneumoniae
ttggacgactggcatgaaacaacagattataaaaaagtatggcttagaaaaccattccacggagctgaaaatcatactggaaaaaccattgtcttcggtcatacaccggtctatggtttgttacagcaagaacgcggtacatctgagctttggactacagaagatggcaagattggaatggatggaggagctgtttatggtggtgtccttcacgggattgtctttacagaccaaggaatgacagaacaccactttatcgaaaatgacggctttgtcgctgaagat

SEQ ID NO: 2408 - protein, 95 aa, Streptococcus pneumoniae
  serine/threonine protein phosphatase
MDDWHETTDYKKVWLRKPFHGAENHTGKTIVFGHTPVYGLLQQERGTSELWTTEDGKIGMDGGAVYGGVLHGIVFTDQGMTEHHFIENDGFVAED

SEQ ID NO: 2409 - DNA, 390 bp, Streptococcus pneumoniae
atgacagattattatgtaattggagatgttcacggaaaagctgggatgctggaagaccttctcaaaacctgggatggtcagccccagttgctctttctaggtgatttgattgacagaggtgaggatagtcaccgtgttcttgaaatggtcaaggacttggtggacaatcaaggggctatctgtttgtccggaaaccacgagtatatgtttttgacttggctagatgacccagaagaaagttatgaccattatagtcgcaatggtggagatacaaccattaactctatcctaggtcgtcccttggatgcaccagttgatggagtagaagatgccaagcgggttgcgctgaagcggcagacttggtcgaattcattcgtcaaatgccatttg

SEQ ID NO: 2410 - protein, 130 aa, Streptococcus pneumoniae
  serine/threonine protein phosphatase FRAMESHIFT; Cellular location: cytoplasm; Similar to strain R6 sequence 15903126 (e-144)
MTDYYVIGDVHGKAGMLEDLLKTWDGQPQLLFLGDLIDRGEDSHRVLEMVKDLVDNQGAICLSGNHEYMFLTWLDDPEESYDHYSRNGGDTTINSILGRPLDAPVDGVEDAKRVALKRQTWSNSFVKCHL

SEQ ID NO: 2411 - DNA, 1665 bp, Streptococcus pneumoniae
atgttacttgaaatttcgataaaaaactttgccattattgaggctatttccctcaattttgaaaaggggatgactgtcctgactggtgaaacgggtgcagggaagtcgattatcattgatgccatgaatatgatgttgggagctcgtgcgacgacagatgttattcgtcatggtgcaccaaaggcagagattgaggggcttttctcagttgagaatagtcgtcttttacaggaaatttttgatgagcaaggtttagaattaggtgatgaaattatcatccgtcgggaaatcttgcaaaatggtcgtagtatcagccgtgtaaatggtcagatggttaatctgtctgttttgcgagctattgggcaacatcttgtagatattcatggtcagcatgaccatgaggagttaatgcgtccccaactgcatatccagatgttggatgaatttggtgatgccgctttttgggacttgaaagaaacctatcaaacgagttttgatgcctatcggaaaatgcgcaagcaggttctggaagtcaagaaaaaccaacaggaacacaaggcacgtatcgaaatgttggaatttcaaatggcagagattgaggcagcaaacttgcaggctggagaagacttggctctcaatcaagagcgagataaactcctcaaccacaaaaatattgcggatacactgaccaatgcctacagtatgttggacaatgaagatttttcaagtctggccaatgttcgttcagctatgaatgacatggaaagtgtcgaagagtatgatcctgaataccgtgaaatttcaagctatctgtctgagacctactatgttttagaagacattagcaaacgtttggaagctatcattgaggaccttgattttgatggcaatcgcctgatgcaggttgagaatcgtttggacctccttcatactattactcgtaagtatggtgggactgttgatgatgttttgctttattttgccaagattacggaagaatacaatctcttgacaggcaataatctttcgtctgaggacatggaagcagagcttaagaagttggaagtcaatcttgtcaatttggcaggtcaacttgcttctgctcgtcataatttggctcagcaactcgaagctgagattaaacaagaactgcaagatctttatatggaaaaagcccagtttcaggttcgttttagtaagggaaaattcagtcgtgagggaaataaaatggttgagttttatatttcaaccaaccctggagaagactttaaacccttggttaaggttgcttctggaggggaattatctcgtctcatgttagccattaagtctgccttttcacgtaaagaaggcaagactagcattgtctttgatgaggtggatacgggagtttcaggtcgtgttgctcaagctattgctcagaaaattcataaaattggtcagcatggtcaggttttggctatctcccatttgccacaagtaattgcgattgcagattatcaattctttattgagaagattagtaatgaccattcaacggtttcgactgttcgtctcttgacggtcgaagagcgagtggaggaagttgccaagatgttggcaggtgatgatgtgacagaagcagccctgacgcaagcaagagaattgttgagaaacagggagaaa

SEQ ID NO: 2412 - protein, 555 aa, Streptococcus pneumoniae
  DNA repair protein RecN (recN); Cellular location: cytoplasm; Similar to strain R6 sequence 15903127 (0.E+01)
MLLEISIKNFAIIEAISLNFEKGMTVLTGETGAGKSIIIDAMNMMLGARATTDVIRHGAPKAEIEGLFSVENSRLLQEIFDEQGLELGDEIIIRREILQNGRSISRVNGQMVNLSVLRAIGQHLVDIHGQHDHEELMRPQLHIQMLDEFGDAAFWDLKETYQTSFDAYRKMRKQVLEVKKNQQEHKARIEMLEFQMAEIEAANLQAGEDLALNQERDKLLNHKNIADTLTNAYSMLDNEDFSSLANVRSAMNDMESVEEYDPEYREISSYLSETYYVLEDISKRLEAIIEDLDFDGNRLMQVENRLDLLHTITRKYGGTVDDVLLYFAKITEEYNLLTGNNLSSEDMEAELKKLEVNLVNLAGQLASARHNLAQQLEAEIKQELQDLYMEKAQFQVRFSKGKFSREGNKMVEFYISTNPGEDFKPLVKVASGGELSRLMLAIKSAFSRKEGKTSIVFDEVDTGVSGRVAQAIAQKIHKIGQHGQVLAISHLPQVIAIADYQFFIEKISNDHSTVSTVRLLTVEERVEEVAKMLAGDDVTEAALTQARELLRNREK

SEQ ID NO: 2413 - DNA, 429 bp, Streptococcus pneumoniae
atgaataaaaaagagagacttgaaaaaattagaagattggtgacagattatcaaatcggcacgcaagaagaaattgtagaacatttgaaagaagcaggtatcactgccactcaggcgacggtatcccgagatatcaaagagttaggtattgtcaaaattcctttgagagacaacacctatgtctacgaattgccaaaatcaatcgtaaaaagtctgcaactggctgaagacaatatcgaatcggctgaattgatggataagatgatcaatctccaagttattccaggaaatacggcttttgtaaaagctcagttaatcgagacttttgcagacaagatttttagctgtttgactgatgatagctcgattttagtcattgccagaagtggaagtctagcagaggaaatctttgaacaagtaaaaaattgg

SEQ ID NO: 2414 - protein, 143 aa, Streptococcus pneumoniae
  transcriptional repressor, putative; Cellular location: cytoplasm; Similar to strain R6 sequence 15903128 (1.E-75)
MNKKERLEKIRRLVTDYQIGTQEEIVEHLKEAGITATQATVSRDIKELGIVKIPLRDNTYVYELPKSIVKSLQLAEDNIESAELMDKMINLQVIPGNTAFVKAQLIETFADKIFSCLTDDSSILVIARSGSLAEEIFEQVKNW

SEQ ID NO: 2415 - DNA, 594 bp, Streptococcus pneumoniae
ttgcaggtctttgatttgtcggtggatggcgcgactacgattgatatcggggcctctactggaggttttaccgatgtcatgctacagaatagtgccaagttggtctttgcagtcgatgttggtaccaatcagttggcttggaaattacgccaagacccacgagttgtcagcatggagcagttcaatttccgctatgctgaaaagactgatttcgagcaggagccgagctttgccagtattgatgtgagtttcatttcccttagtctgattttgccagccttgcaccgtgtcttggctgatcaaggtcaggtggtagcacttgtcaaacctcagtttgaggcaggacgtgagcagattgggaaaaatggaattattcgagatgctaaggttcatcagaatgtccttgaatctgtaacagctatggcagtagaggtaggtttttcagtccttggcttggacttttctcccatccaaggtggacatggaaatattgaatttttagcgtatttgaaaaaagaaaagtcagcaagcaatcagattcttgctgagattaaagaagcagtagagagggcgcatagtcaatttaaaaatgaa

SEQ ID NO: 2416 - protein, 198 aa, Streptococcus pneumoniae
  hemolysin A, putative, FRAMESHIFT; Cellular location: membrane; Similar to strain R6 sequence 15903129 (e-106)
MQVFDLSVDGATTIDIGASTGGFTDVMLQNSAKLVFAVDVGTNQLAWKLRQDPRVVSMEQFNFRYAEKTDFEQEPSFASIDVSFISLSLILPALHRVLADQGQVVALVKPQFEAGREQIGKNGIIRDAKVHQNVLESVTAMAVEVGFSVLGLDFSPIQGGHGNIEFLAYLKKEKSASNQILAEIKEAVERAHSQFKNE

SEQ ID NO: 2417 - DNA, 873 bp, Streptococcus pneumoniae
atgaaaaagcaagaaaaattagctcttgtcgagtcggctttggaagatttttatggagaccagcagtttgcctctagtttacgggagtctgttctctattctattcatgctggtggcaagcgtattcggccttttctcttgttagaagttctggaagccttgcaggttaccatcaaacctgctcacgcgcaggtagctactgccttagagatgattcatacagggagcttgattcacgatgaccttcctgctatggatgatgacgattatcgaagagggcggttaaccaatcacaagaaattcggtgaagctatggccattttggctggagatgccttattcttagactcatatgccttgattgcgcaggcagatttgccaagtcagattaaggtggacttgattgccaacttatcccttgcttcaggtagtctgggtatggtagcagggcaagttttggatatggagggcgaacaccagcacttgtctttggaagaacttcagactattcatgccaataagactgggaagttactagcctatcccttccaagcggcagctattatagctgaattgtcacctgaaatgcaggtgaagctgaaaactgtgggtgaattgattggacttgcttttcaagtcagagatgatgtactggatgtgacagctagttttgaggaaatcggcaagacacctcaaaaggatctgcaggcagaaaaatcaacctatcctgccctgttgggcttggaagagtccattgccttttgtaaccaaaccctggatcaagctaatgaaaaattagaagaaattgcccagcagcttccctttgaaacagaatcgattgtaagtgtagtagaaagtttgagaatcaatggc

SEQ ID NO: 2418 - protein, 291 aa, Streptococcus pneumoniae
  geranyltranstransferase (ispA); Cellular location: cytoplasm; Similar to strain R6 sequence 15903130 (e-159)
MKKQEKLALVESALEDFYGDQQFASSLRESVLYSIHAGGKRIRPFLLLEVLEALQVTIKPAHAQVATALEMIHTGSLIHDDLPAMDDDDYRRGRLTNHKKFGEAMAILAGDALFLDSYALIAQADLPSQIKVDLIANLSLASGSLGMVAGQVLDMEGEHQHLSLEELQTIHANKTGKLLAYPFQAAAIIAELSPEMQVKLKTVGELIGLAFQVRDDVLDVTASFEEIGKTPQKDLQAEKSTYPALLGLEESIAFCNQTLDQANEKLEEIAQQLPFETESIVSVVESLRING

SEQ ID NO: 2419 - DNA, 210 bp, Streptococcus pneumoniae
atgtcaaaacaaaagaaatttgaggaaaatctagcagaactggaaaccattgtccaaagtttggaaaatggtgaaattgctctggaagatgcgattactgcctttcaaaagggcatggtcttgtcaaaagagctccaagctacgctggacaaggctgaaaagaccttggtcaaggtcatgcaagaagacggaacagaaagtgattttgaa

SEQ ID NO: 2420 - protein, 70 aa, Streptococcus pneumoniae
  exodeoxyribonuclease VII, small subunit (xseB); Cellular location: cytoplasm; Similar to strain R6 sequence 15903131 (4.E-34)
MSKQKKFEENLAELETIVQSLENGEIALEDAITAFQKGMVLSKELQATLDKAEKTLVKVMQEDGTESDFE

SEQ ID NO: 2421 - DNA, 1344 bp, Streptococcus pneumoniae
gtggagatggaaaagtatttatcggtaacaactttgaccaagtatctgaaaatgaaattcgataaagacccatacttggaacgggtctatttaactggtcaagtttccaactttcgtaaacgacctactcaccaatatttctccctaaaggatgaccatgcagttattcaagcgaccatctggtctgggatttatcagaaattagggtttgacctggaagaaggaatgaagatcaatgtgattgggcgtgtacaggtctatgaaccaagtggtagctactccatcatcattgaaaaagctgagcctgatggggttggggcgcttgcgattcagtttgaacaacttaagaaaaaattgacagaagaaggcctgtttcaagaacgcttcaagcaagctctgccccaattttctaagagaattggtgtagtaaccagccgtagtggagccgttattcgagatattatcacgaccgtcagcaggcgattcccaggtgttgacatccttctttatccgaccaaggttcaaggtgaaggggctgcggaggaaattgctagaaatattgcgcgtgctaatcaacgggacgatttggatttgctcattattggtcgtggaggtggttctattgaggatctctgggcctttaacgaagaaattgtggtacgagctatttttgaatctcgtttgccagttatctctagtgtggggcatgagacggatgtgaccttggcagattttgtggcagatcgacgcgctgcaacgccaacagcggcggctgaactggcaacacctgtgaccaagttggatgtattagctcatttgcaaaatcaggaaaaacggatggtaacggcagtccgaaatgttctatctaagaaacaagaggctttgaaaaaatgcagtcagtctgttatctttagacaacctgagcgcttgtatgacggttatttgcaacgcttggaccaactgcaactgcgtttgaaacaaagtttgcgaactcggatttctgataacaaacaattagttcaagcaagaactcatcaattagtacaattatcacctgttaccaaaatccaacgctatcaagaccgtttaggacagttggacaagctcttaggtagccaaatggcgttagtttatgacgccaaggttgctgaggccaagcgactttcggaagctttgctcatgttggatactagccgaatcgtggcgcgtggttatgctattgtcaaaaaagaagagtccgttgtagattcggttgagagtttgaagaaaaaagaccaagtaacgcttttgatgcgagatggtcaagtagaattagaggttaaagatgtcaaaacaaaagaaatt

SEQ ID NO: 2422 - protein, 448 aa, Streptococcus pneumoniae
  exodeoxyribonuclease VII, large subunit (xseA); Cellular location: cytoplasm; Similar to strain R6 sequence 15903132 (0.E+01)
MEMEKYLSVTTLTKYLKMKFDKDPYLERVYLTGQVSNFRKRPTHQYFSLKDDHAVIQATIWSGIYQKLGFDLEEGMKINVIGRVQVYEPSGSYSIIIEKAEPDGVGALAIQFEQLKKKLTEEGLFQERFKQALPQFSKRIGVVTSRSGAVIRDIITTVSRRFPGVDILLYPTKVQGEGAAEEIARNIARANQRDDLDLLIIGRGGGSIEDLWAFNEEIVVRAIFESRLPVISSVGHETDVTLADFVADRRAATPTAAAELATPVTKLDVLAHLQNQEKRMVTAVRNVLSKKQEALKKCSQSVIFRQPERLYDGYLQRLDQLQLRLKQSLRTRISDNKQLVQARTHQLVQLSPVTKIQRYQDRLGQLDKLLGSQMALVYDAKVAEAKRLSEALLMLDTSRIVARGYAIVKKEESVVDSVESLKKKDQVTLLMRDGQVELEVKDVKTKEI

SEQ ID NO: 2423 - DNA, 636 bp, Streptococcus pneumoniae
atgcaaaatagaccaatcattattggagtgacaggtggttctggtggtggtaaaaccagtgtttcaagagccattttatcgcattttcctgatgaaaagatttccatgattgagcatgattcatactacaaggatcagtctcatttgacctttgaagagcgtgtcaaaaccaactatgaccatccttttgcctttgatacagacttgatgatcgagcagattaaggaattgttggcagggcgtccggtggacatcccgacctacgactatacagagcatacacggagtagcaagacctatcgtcaggaacctcaagatgtctttatcgttgagggtattttggtcttggaggacaagcgtctgcgcgatttgatggatatcaagatttttgtggatacggatgacgatgtgcgcattattcgtcgtatcaagcgtgatatggaggagcgtggccgtagccttgatagcgttattaaccagtacttaggtgtggtcaaaccaatgtaccaccagtttatcgagtcaactaagcgttatgctgatatcgtcattcctgaaggggttagcaataccgtggctatcgacctgttgacgaccaagattgcaaagattttggaagaagctcgaaacagcaaa

SEQ ID NO: 2424 - protein, 212 aa, Streptococcus pneumoniae
  uridine kinase (udk); Cellular location: outside; Similar to strain R6 sequence 15903133 (e-119)
MQNRPIIIGVTGGSGGGKTSVSRAILSHFPDEKISMIEHDSYYKDQSHLTFEERVKTNYDHPFAFDTDLMIEQIKELLAGRPVDIPTYDYTEHTRSSKTYRQEPQDVFIVEGILVLEDKRLRDLMDIKIFVDTDDDVRIIRRIKRDMEERGRSLDSVINQYLGVVKPMYHQFIESTKRYADIVIPEGVSNTVAIDLLTTKIAKILEEARNSK

SEQ ID NO: 2425 - DNA, 114 bp, Streptococcus pneumoniae
ttgcatgctatcctccgttattttatccgtcgtctattctatcacattttttacaaaatttatagtctcatcagcaaaaaacaccagagtcttccctctgatgttcgacagttt

SEQ ID NO: 2426 - protein, 38 aa, Streptococcus pneumoniae
  hypothetical protein; Cellular location: cytoplasm
MHAILRYFIRRLFYHIFYKIYSLISKKHQSLPSDVRQF

SEQ ID NO: 2427 - DNA, 165 bp, Streptococcus pneumoniae
atggccaatttgagtcaagggttgtcactttacctcatgacgcatcattaccaggcacctaagtctgtcattgattttggtttatggattgccaaagctcctagccaggaaagagggagactggctttcttgcagatgcttgctcaaaccctacagggctttcgt

SEQ ID NO: 2428 - protein, 55 aa, Streptococcus pneumoniae
  hypothetical protein; Cellular location: cytoplasm; Similar to strain R6 sequence 15903134 (1.E-27)
MANLSQGLSLYLMTHHYQAPKSVIDFGLWIAKAPSQERGRLAFLQMLAQTLQGFR

SEQ ID NO: 2429 - DNA, 93 bp, Streptococcus pneumoniae
atgaagcaatttaaaattctttcagataaatatttagagtccattacaggttctgatgggaacttaggcccaggatttggtgtgataattcca

SEQ ID NO: 2430 - protein, 31 aa, Streptococcus pneumoniae
  hypothetical protein; Cellular location: cytoplasm
MKQFKILSDKYLESITGSDGNLGPGFGVIIP

SEQ ID NO: 2431 - DNA, 876 bp, Streptococcus pneumoniae
atgaacggtattattaacttaaaaaaggaagcaggaatgacctcgcatgatgcggtttttaaactgcgtaagattttgggaaccaagaaaattggtcatggtggaaccttggatccggatgtggtgggtgttttgccgattgcggttggcaaggcgacacgcatggtcgagtttatgcaggacgagggtaagatctatgagggggaaatcactctgggctattccacgaagactgaggatgctagtggggaagtggtcgcagaaacccctgttttgtctctcttggatgaaaagcttgttgatgaagcgattgctagcttgactgggcctattactcagattccccctatgtattcggcagttaaggttaatggtcgcaagctctatgagtatgcgcgtgctggtcaggaagtggagcgtccagaacgtcaggtgaccatttatcaatttgagcgaacaagtccgatttcttatgatggccaacttgcccgattcacttttcgtgtaaaatgcagtaaagggacgtacatccgtactttgtcagttgatttgggtgaaaagcttggttatgcggctcatatgtcccatttgactcgtactagtgctgctggcttacaattagaagacgctcttgccttggaggaaattgctgaaaaagtagaggctgggcaattagattttctccatcctttagagattgggacaggtgaccttgtcaaagttttcctaagtccagaagaggctacagaagttcgctttggtcgttttattgagctagaccaaacggacaaagaactggctgcctttgaagatgataaattgttagccattctagaaaaacggggcaatctctataagccaaggaaggtttttagc

SEQ ID NO: 2432 - protein, 292 aa, Streptococcus pneumoniae
  tRNA pseudouridine synthase B (truB); Cellular location: cytoplasm; Similar to strain R6 sequence 15903135 (e-161)
MNGIINLKKEAGMTSHDAVFKLRKILGTKKIGHGGTLDPDVVGVLPIAVGKATRMVEFMQDEGKIYEGEITLGYSTKTEDASGEVVAETPVLSLLDEKLVDEAIASLTGPITQIPPMYSAVKVNGRKLYEYARAGQEVERPERQVTIYQFERTSPISYDGQLARFTFRVKCSKGTYIRTLSVDLGEKLGYAAHMSHLTRTSAAGLQLEDALALEEIAEKVEAGQLDFLHPLEIGTGDLVKVFLSPEEATEVRFGRFIELDQTDKELAAFEDDKLLAILEKRGNLYKPRKVFS

SEQ ID NO: 2433 - DNA, 1272 bp, Streptococcus pneumoniae
atgaacgaaatcaaatgtcccaactgtggggaagtctttacagtaaatgagagtcagtatgccgaactcttgtcccaagtgagaacggcagagtttgataaggaactacacgataggatgaagcaggaactggccttggctgagcaaaaggccatgaatgagcaacagactaaactggctcagaaggatcaagaaattgcgcaattacagagtcagatccaaaactttgatacagaaaaagaattggccaagaaagaggttgaacagacaagccatgaggctctcttggctaaggacaaggaagtacagctcttagaaaatcagttggctaccttgcgtttggagcatgaaaatcaactacaaaagaccctttctgacctagaaaaagaacgggatcaggttaaaaaccaactacttttgcaggaaaaggaaaatgaattatctttggcttctgttaagcaaaactacgaagcccagctcaaggcagctagtgaacaagtcgagttttataagaattttaaggctcaacaatctacaaaagcgattggggaaagcctagaacagtatgcagagagtgagtttaacaaggttcgtagtttcgcctttccaaatgcttactttgagaaggataacaaggtctcttcgcgtgggtctaaaggggactttatcttccgtgagtgtgatgaaaatggagttgaaatcatttctatcatgtttgagatgaaaaacgaagcggacggaacagagaagaagcacaagaatgcagatttttacaaggaattggacaaggaccgtcgggagaagaactgtgagtatgccgttttggtgaccatgcttgaggctgataatgactactttaacacagggattgttgacgtcagtcacgagtatgaaaaaatgtatgttgttcgtcctcaattctttatccaattgattggtctcttacgtaatgcggcgctaaattccctaaaatacaagcaggagttggccttggttcgcgagcaaaatattgacattacgcattttgaggaagatttggatgcctttaagctagcttttgctaagaactataattcagcttcgactaactttggaaaagctattgatgaaatcgacaaggccatcaaacgcatggaagaggttaagaaattcctgaccacatctgaaaaccaactccgtttagctaacaacaaattggaagatgtctctgttaaaaaattgacccggaaaaatccaacaatgaaagcgaagttcgaagcactgaagggggag

SEQ ID NO: 2434 - protein, 424 aa, Streptococcus pneumoniae
  conserved domain protein; Cellular location: cytoplasm; Similar to strain R6 sequence 15903137 (0.E+01)
MNEIKCPNCGEVFTVNESQYAELLSQVRTAEFDKELHDRMKQELALAEQKAMNEQQTKLAQKDQEIAQLQSQIQNFDTEKELAKKEVEQTSHEALLAKDKEVQLLENQLATLRLEHENQLQKTLSDLEKERDQVKNQLLLQEKENELSLASVKQNYEAQLKAASEQVEFYKNFKAQQSTKAIGESLEQYAESEFNKVRSFAFPNAYFEKDNKVSSRGSKGDFIFRECDENGVEIISIMFEMKNEADGTEKKHKNADFYKELDKDRREKNCEYAVLVTMLEADNDYFNTGIVDVSHEYEKMYVVRPQFFIQLIGLLRNAALNSLKYKQELALVREQNIDITHFEEDLDAFKLAFAKNYNSASTNFGKAIDEIDKAIKRMEEVKKFLTTSENQLRLANNKLEDVSVKKLTRKNPTMKAKFEALKGE

SEQ ID NO: 2435 - DNA, 120 bp, Streptococcus pneumoniae
atgacttgtgattttaaatttgaaactctacaactacatgctggtcaagttgtggctccagctactaagtctcgtgcagtgccgatttatcaaacaacattttttgtttttgatgacacg

SEQ ID NO: 2436 - protein, 40 aa, Streptococcus pneumoniae
  transulfuration enzyme family protein, POINT MUTATION
MTCDFKFETLQLHAGQVVAPATKSRAVPIYQTTFFVFDDT

SEQ ID NO: 2437 - DNA, 795 bp, Streptococcus pneumoniae
atggtttcttcggaatttatctcaaagattgaatttgcttgcaataagaaagaaagtctttatagtcaaagcaaatttaagtatgcgattcgttcgatgttcgcaggtgcatttttaaccttcagtactgctgcaggtgcagttggggctgacttgattaataaaattgcaccaggtagtggacgcttcctctttccattcgtttttgcttggggcttggcctacattgtttttttgaatgccgagttggtcacttcaaacatgatgttcttgactgctggtagtttcttaaaaaaaatctcttggagaaaaacagctgagattttactatactgtaccttgttcaaccttatcggagccttgatagcagggtggggctttgctcattcggcagcctatgcgaatctgacacacgatagtttcatctcaggtgttgttgagatgaagttaggccgctcaaatgaattggtcttgcttgaggcgattttggcaaatatttttgtaaatattgcgattctgtcatttattttggtcaaagatggtggtgccaaactttggcttgtgttgtcagctatttacatgtttgtattcttaacaaacgagcacattgcggcgaactttgcttctttcgcgattgtgaaattcagtgttgctgcggattcaattgccaacttcggtgttggaaatatgcttcgccactggggtgtgactttcatcggaaactttatcggaggaggcctcttgatgggtcttccatatgccttcctcaataaaaacgaagatacttatgtagat

SEQ ID NO: 2438 - protein, 265 aa, Streptococcus pneumoniae
  transporter, FNT family, putative; Cellular location: membrane; Similar to strain R6 sequence 15903140 (e-150)
MVSSEFISKIEFACNKKESLYSQSKFKYAIRSMFAGAFLTFSTAAGAVGADLINKIAPGSGRFLFPFVFAWGLAYIVFLNAELVTSNMMFLTAGSFLKKISWRKTAEILLYCTLFNLIGALIAGWGFAHSAAYANLTHDSFISGVVEMKLGRSNELVLLEAILANIFVNIAILSFILVKDGGAKLWLVLSAIYMFVFLTNEHIAANFASFAIVKFSVAADSIANFGVGNMLRHWGVTFIGNFIGGGLLMGLPYAFLNKNEDTYVD

SEQ ID NO: 2439 - DNA, 105 bp, Streptococcus pneumoniae
atgaaatacagaaaacgcttcctaaaacctaaagtttgtgatataattatcaagaaaaaagatttaggagtttattatggtttcttcggaatttatctcaaagat

SEQ ID NO: 2440 - protein, 35 aa, Streptococcus pneumoniae
  hypothetical protein; Cellular location: cytoplasm
MKYRKRFLKPKVCDIIIKKKDLGVYYGFFGIYLKD

SEQ ID NO: 2441 - DNA, 141 bp, Streptococcus pneumoniae
ttgttagaaatcgatttgactgtcctgatcgatttgtcctattcttatttcattttactatatttttatgaaaatcttaaaaaatcagtgaaatcatggatttcactgatttgtattaataaaattgtttatatggttgat

SEQ ID NO: 2442 - protein, 47 aa, Streptococcus pneumoniae
  hypothetical protein; Cellular location: membrane; Similar to strain R6 sequence 15902350 (8.E-07)
MLEIDLTVLIDLSYSYFILLYFYENLKKSVKSWISLICINKIVYMVD

SEQ ID NO: 2443 - DNA, 369 bp, Streptococcus pneumoniae
atgaaacgcgagcaagtaatgggagaaggaaattatagtctagctagtcaccatatctttggtgttgataatgctaataaaatgttattttctcctttagataatgctaaaaatggcatgaagatttatctaaccgataaaaataaagtttatacttatgaaatacgtgaagtcaaacgtgtgacaccggatcgtgttgatgaagttgatgatagagatggggtcaatgaaatcacattagtaacctgtgaagaccttgctgctacagaacgtattattgtcaaaggtgatttgaaagaaacaaaagattattcacaaacatctaatgaaatcctaacagctttcaatcaaccatataaacaattttat

SEQ ID NO: 2444 - protein, 123 aa, Streptococcus pneumoniae
  conserved hypothetical protein (Sortase); Cellular location: cytoplasm; Similar to strain R6 sequence 15903141 (5.E-68)
MKREQVMGEGNYSLASHHIFGVDNANKMLFSPLDNAKNGMKIYLTDKNKVYTYEIREVKRVTPDRVDEVDDRDGVNEITLVTCEDLAATERIIVKGDLKETKDYSQTSNEILTAFNQPYKQFY

SEQ ID NO: 2445 - DNA, 432 bp, Streptococcus pneumoniae
atgagccgtatcgccactggtgtgaaaggtgttaaccttcgtgaaggagacacagttgttggtgccagcttgattactgatcaagatgaggttcttattatcacagaaaaaggatatggtaagcgtacagtcgctactgaatacccaacaaaaggtcgtggtggtaagggaatgcagacagctaaaattaccgaaaaaaatggcttgctggccggtcttatgactgttcaaggggatgaggatttgatgattatcactgatacaggtgtcatgattcgaaccaatcttgccaatatttcacaaacaggacgtgcaactatgggagttaaagtaatgcgcctggatcaagatgctcagatagtgactttcacaacggttgcggtggcagaaaaagaagaagttgggacagaaaacgaaacagaaggtgaagca

SEQ ID NO: 2446 - protein, 144 aa, Streptococcus pneumoniae
  DNA gyrase A subunit-related
MSRIATGVKGVNLREGDTVVGASLITDQDEVLIITEKGYGKRTVATEYPTKGRGGKGMQTAKITEKNGLLAGLMTVQGDEDLMIITDTGVMIRTNLANISQTGRATMGVKVMRLDQDAQIVTFTTVAVAEKEEVGTENETEGEA

SEQ ID NO: 2447 - DNA, 2091 bp, Streptococcus pneumoniae
atgggaatttatggtataatgttgttacttactaattgtgaaatgaggcatttattaatgcaggataaaaatttagtgaatgtcaatctgacaaaggagatgaaggcaagttttatcgactacgccatgagtgttatcgtagcgcgagctcttcctgatgttcgagatggcttaaaacctgttcaccgtcgcattctctacggaatgaatgaattgggtgtgaccccagacaaaccccataaaaaatctgctcgtattacaggggatgtcatgggtaaatatcacccacacggggattcctctatttatgaagccatggtccgtatggctcaatggtggagctaccgttacatgcttgtagatggtcatgggaattttggttccatggatggagatagtgctgccgctcaacgttataccgaggcacgtatgagcaagattgctctggaaatgcttcgtgatatcaacaaaaatacagttgatttcgttgataactatgatgccaatgaacgggaacccttggtcttgccagcgcgttttccaaaccttttggttaatggagcaactggtatcgcggttgggatggcaaccaatattccacctcataatctgggtgaaaccattgatgcagtgaagttggtcatggataatcctgaagtgactaccaaggacttgatggaagtcttgcctggaccagattttccaactggtgctcttgtcatggggaaatcaggtatccataaggcttatgaaacaggtaaaggttcgattgtcctacgttctcgtacagagattgaaacgactaagactggtcgtgagcgtatcgttgtaacagaatttccttacatggtcaataaaaccaaggtgcatgagcatattgttcgcttggttcaggaaaaacgcattgagggtatcacagcagtacgtgatgagtcaaaccgtgaaggtgttcgatttgttattgaagtcaagcgcgacgcctcagccaatgttattctcaataacctcttcaaaatgacccaaatgcaaaccaattttggtttcaatatgctcgctatccaaaatggtataccgaaaattttgtctcttcgtcagattttggatgcttatatcgagcaccaaaaagaagtggttgttcgtcgtacacgttttgataaggaaaaagcggaagcgcgcgctcatatcttagaaggtctcttgattgcgctagaccatatcgacgaagtgattcgtatcatccgtgctagtgaaacggatgcggaagctcaagctgagttgatgagcaagtttaagctttctgaacgtcaaagtcaagctatccttgatatgcgtcttcgtcgtttgacaggtttggaacgcgataagattcaatctgagtatgatgacctcttggctctgattgcggatttagcagatattcttgctaagcctgaacgtgtttctcaaattatcaaagacgaattggatgaagttaaacgtaaattttctgataagcgccgtacagagttgatgattggacaggtcttgagtctcgaggatgaggacttgattgaagaatcggatgtcttgattaccctttctaacagaggctacattaagcgtttggatcaggacgagttcactgctcaaaaacgtgggggtcgtggtgtccaaggaacgggagtgaaagatgatgactttgttcgtgagttagtgtcaactagcacccatgatcatctgctcttcttcacaaacaagggacgtgtctatcgtcttaaaggttatgaaattcctgagtatggtcggactgccaaagggctaccagtagtcaatctcttgaaattggatgaagacgaaagtattcagacggttatcaatgttgagtctgatcgcagtgatgatgcttatctcttctttacaacccgtcacggtattgtgaagagaaccagtgttaaggagtttgccaatattcgtcaaaatggtctcaaagcgctgaatttaaaggatgaagatgagttaatcaatgtcttgttggcagaaggagatatggatattatcattggtaccaagtttggttatgcagttcgctttaatcaatcgccgttcgtggta

SEQ ID NO: 2448 - protein, 697 aa, Streptococcus pneumoniae
  DNA gyrase subunit A, FRAMESHIFT (gyrA); Cellular location: cytoplasm; Similar to strain R6 sequence 15903142 (0.E+01)
MGIYGIMLLLTNCEMRHLLMQDKNLVNVNLTKEMKASFIDYAMSVIVARALPDVRDGLKPVHRRILYGMNELGVTPDKPHKKSARITGDVMGKYHPHGDSSIYEAMVRMAQWWSYRYMLVDGHGNFGSMDGDSAAAQRYTEARMSKIALEMLRDINKNTVDFVDNYDANEREPLVLPARFPNLLVNGATGIAVGMATNIPPHNLGETIDAVKLVMDNPEVTTKDLMEVLPGPDFPTGALVMGKSGIHKAYETGKGSIVLRSRTEIETTKTGRERIVVTEFPYMVNKTKVHEHIVRLVQEKRIEGITAVRDESNREGVRFVIEVKRDASANVILNNLFKMTQMQTNFGFNMLAIQNGIPKILSLRQILDAYIEHQKEVVVRRTRFDKEKAEARAHILEGLLIALDHIDEVIRIIRASETDAEAQAELMSKFKLSERQSQAILDMRLRRLTGLERDKIQSEYDDLLALIADLADILAKPERVSQIIKDELDEVKRKFSDKRRTELMIGQVLSLEDEDLIEESDVLITLSNRGYIKRLDQDEFTAQKRGGRGVQGTGVKDDDFVRELVSTSTHDHLLFFTNKGRVYRLKGYEIPEYGRTAKGLPVVNLLKLDEDESIQTVINVESDRSDDAYLFFTTRHGIVKRTSVKEFANIRQNGLKALNLKDEDELINVLLAEGDMDIIIGTKFGYAVRFNQSPFVV

SEQ ID NO: 2449 - DNA, 984 bp, Streptococcus pneumoniae
atgacttcaactaaacaacacaaaaaagttatccttgtcggtgatggtgctgtaggttcatcttacgcttttgcacttgttaaccaaggaattgcacaagagcttggaattatcgaaattccacaattgcatgaaaaagctgttggtgatgcgcttgaccttagtcacgcccttgccttcacttcacctaaaaaaatctatgcagctcaatactctgactgtgcagacgctgaccttgttgtgatcactgcaggtgcacctcaaaaaccaggtgaaactcgtcttgaccttgtaggtaaaaaccttgctatcaacaaatcaatcgtaactcaagttgttgaatctggtttcaaaggtatcttccttgttgctgctaacccagttgacgttttgacttactcaacttggaaattctctggtttccctaaagaacgcgttatcggttcaggtacttcacttgactcagctcgtttccgtcaagcacttgctgaaaaattggatgtggatgctcgttcagtgcacgcctacatcatgggtgaacacggtgactctgagttcgctgtttggtcacacgctaacatcgctggtgtaaaccttgaagaattccttaaagacactcaaaatgttcaagaagctgaattgattgaattgttcgaaggtgttcgtgatgcagcctacacaatcatcaacaaaaaaggtgcaacatactacggtatcgcagtagcccttgctcgtatcactaaagcaatccttgacgatgaaaacgcagtacttccactttcagtattccaagaaggtcaatacggagttgagaatgtctttatcggtcaaccagctgttgttggtgcacatggtatcgttcgtccagtaaatatcccattgaacgacgcagaaactcaaaaaatgcaagcatctgctaaagaattacaagctatcattgacgaagcatggaaaaacccagaattccaagaagcttctaaaaac

SEQ ID NO: 2450 - protein, 328 aa, Streptococcus pneumoniae
  L-lactate dehydrogenase (ldh); Cellular location: cytoplasm; Similar to strain R6 sequence 15903143 (0.E+01)
MTSTKQHKKVILVGDGAVGSSYAFALVNQGIAQELGIIEIPQLHEKAVGDALDLSHALAFTSPKKIYAAQYSDCADADLVVITAGAPQKPGETRLDLVGKNLAINKSIVTQVVESGFKGIFLVAANPVDVLTYSTWKFSGFPKERVIGSGTSLDSARFRQALAEKLDVDARSVHAYIMGEHGDSEFAVWSHANIAGVNLEEFLKDTQNVQEAELIELFEGVRDAAYTIINKKGATYYGIAVALARITKAILDDENAVLPLSVFQEGQYGVENVFIGQPAVVGAHGIVRPVNIPLNDAETQKMQASAKELQAIIDEAWKNPEFQEASKN

SEQ ID NO: 2451 - DNA, 3252 bp, Streptococcus pneumoniae
atgccagtagaaattaaaaccactaaagaaattcatcctaaaatctatgcctacaccacaccgacagtaaccagtaatgaaggctggattaagattgggtatacagaacgtgatgtcacacaacgtatcaaggagcaaacgcatacagctcatatagctacagatgtcttatggactggtgatgcagcttatacagaagagcctgataaggggaaaactttcaaggaccatgatttccaccatttcctttctttccatgatgtagaacgtcgtcccaagacggaatggttctattttaatggaactcctgaaaaatcaaaaaatctttttgataagtttgttcagcatgatttgtctggttatcagcctggaaaaggacaggactatactctgcgacaagagcaagaagaagcagttgctaagacattagcttatttccaagaacatgctggaggcaagtttctctggaatgccaagccacgctttggtaaaaccttgtctacctatgacctagctcgacggatggaagctgtcaatgtcctaattgtaacaaaccgccctgccattgctaactcatggtatgatgattttgaaacattcatagcaggtcaaacgacttacaagtttgtttctgaatcagatagccttaagagtcgtccaatcttgtcacgacaagaatttcttggtattttagctgacgatgtaagacaacttgcttttatcagtctccaagacttgaaaggatctgtttatttaggtggagagcacgataaactcaaatgggtaactgatctgcattgggacttgttggttattgacgaggctcatgaaggagttgataccttcaagactgaccaagcctttaataagattcgacgaaattttactctgcatttgtcaggtacatcatttaaagcattggctaaaggagattttacagaggaacaaatctacaactggtcttatgctgatgagcaggctgctaagtattcgtggtctcttgagcaagaagaggaaaatccttatgaaagcttgcctcagttgaatctctttacctatcaaatgtctcagatgattggcgaaaagttagaaaaaggcgctcagatcgatggtgaaaatattgactatgtttttgacttaagtgaatttttcgctacagatgataaagggaaatttattcatgagcatgatgtcagaaattggttagatactctatcaagcaatgaaaaatatccattttcaaccaaagaactccgtaatgaactcaagcatactttttggcttttagaacgtgtcgcttcggccaaagcattaaaagccctactagaagaacacccaatctatgaaaactatgagatcgttctagctgctggtgacggacgtatgtccgaagaagacgataaagtcaaactcaaatccttggacttggttagaaaagcgatagcagagaatgacaaaaccattaccctatccgttggtcagctgacgacaggtgtcactatccctgaatggacaggtgtattgatgttatcaaatttgaaatcaccagctctttatatgcaggccgccttccgtgctcaaaatccttactcatggagcgataacaaaggaaatcactttcgcaaagaaagagcctatgtatttgactttgcgccggaaagaaccttgattctctttgatgagtttgccaacaacttattgcttgtaactgcagctggtagaggaacttcagctacacgcgaagaaaatattagagaattattaaacttctttccaattattgccgaagaccgtgctggtaagatggttgaaattgatgcaaaggcagttctaaccactcctcgccagataaaagctagagaagttcttaaacgaggttttatgtccaatctcttatttgataatattagtggtattttccaagcaagtcaaacagttttagatattttaaatgagctgccagttgaaaaggaagggaaggtacaagatagttctgatttattagatttttcagatgttacagtcgatgatgagggaaatgcagtagtagaccatgaaattgtagttaatcagcaaatgcgactttttggtgaaaaagtttatggacttggtgaatctgttgctgagttagtcacaaaagatgaggaacgaactcaaaaacagctggtcaatgacttgagtaagaccgtttcttcagtgattgtagaggaattgaaagcagattattctctaaaaacaagggaaactgagcaaattaagaaacaaattacagcaacacttgagaatgaaattcgaaaaaatgatatcgaaagaaaaatttctgaagctcatatcaagcaagagttgcaacagcagctcaaagaagcaaatgataaagcgcaaaaagataagattcaagaagatttggaaaaacgtttagaagaaaataaactcattcataaagaaaaactagaacaaacactcaaaaaagaagtggaaaaaatgcctgagaaatttatcgaacaggttgagataaaacgtgtggaacagttgaaacaatcagctcaagatgaaattcgtgaccatttacgagggtttgcaagaacaattccaagttttattatggcttacggtgatcaaactctaacacttgataattttgatgcctttgttcctgaacatgttttttatgaagtaacagggattacgattgatcagtttagatatttgcgagatggtgggcaggattttgcagggcatctctttgataaagcaacatttgacgaagctattcaagaatttcttcgcaagaaaaaggagttggcggattattttaaagatcaaaaagaagacatttttgactatattccaccgcagaagaccaaccaaattttcactcctaaacgagtggtgaaaaggatggtagatgatttggaaaaggaaaatccagggatttttgatgatccatctaagacttttattgatttatatatgaagtcaggcctctatattgcagaacttgtgaagcggttatataatagcaatggcttgaaagaggcctttccaaatcctgaagaacgcttaaaacatattttggaaaagcaagtttatggatttgctccgtctgagattatctataacatttccactaattttatatttggcaatctttctaaagatatcagtaggaagaattttgttttagcagataccattccagcggctaaagaagggagcattcaaaagttggttgattcctattttgaaaataat

SEQ ID NO: 2452 - protein, 1084 aa, Streptococcus pneumoniae
  type II restriction endonuclease, putative; Cellular location: cytoplasm; Similar to strain R6 sequence 15903144 (0.E+01)
MPVEIKTTKEIHPKIYAYTTPTVTSNEGWIKIGYTERDVTQRIKEQTHTAHIATDVLWTGDAAYTEEPDKGKTFKDHDFHHFLSFHDVERRPKTEWFYFNGTPEKSKNLFDKFVQHDLSGYQPGKGQDYTLRQEQEEAVAKTLAYFQEHAGGKFLWNAKPRFGKTLSTYDLARRMEAVNVLIVTNRPAIANSWYDDFETFIAGQTTYKFVSESDSLKSRPILSRQEFLGILADDVRQLAFISLQDLKGSVYLGGEHDKLKWVTDLHWDLLVIDEAHEGVDTFKTDQAFNKIRRNFTLHLSGTSFKALAKGDFTEEQIYNWSYADEQAAKYSWSLEQEEENPYESLPQLNLFTYQMSQMIGEKLEKGAQIDGENIDYVFDLSEFFATDDKGKFIHEHDVRNWLDTLSSNEKYPFSTKELRNELKHTFWLLERVASAKALKALLEEHPIYENYEIVLAAGDGRMSEEDDKVKLKSLDLVRKAIAENDKTITLSVGQLTTGVTIPEWTGVLMLSNLKSPALYMQAAFRAQNPYSWSDNKGNHFRKERAYVFDFAPERTLILFDEFANNLLLVTAAGRGTSATREENIRELLNFFPIIAEDRAGKMVEIDAKAVLTTPRQIKAREVLKRGFMSNLLFDNISGIFQASQTVLDILNELPVEKEGKVQDSSDLLDFSDVTVDDEGNAVVDHEIVVNQQMRLFGEKVYGLGESVAELVTKDEERTQKQLVNDLSKTVSSVIVEELKADYSLKTRETEQIKKQITATLENEIRKNDIERKISEAHIKQELQQQLKEANDKAQKDKIQEDLEKRLEENKLIHKEKLEQTLKKEVEKMPEKFIEQVEIKRVEQLKQSAQDEIRDHLRGFARTIPSFIMAYGDQTLTLDNFDAFVPEHVFYEVTGITIDQFRYLRDGGQDFAGHLFDKATFDEAIQEFLRKKKELADYFKDQKEDIFDYIPPQKTNQIFTPKRVVKRMVDDLEKENPGIFDDPSKTFIDLYMKSGLYIAELVKRLYNSNGLKEAFPNPEERLKHILEKQVYGFAPSEIIYNISTNFIFGNLSKDISRKNFVLADTIPAAKEGSIQKLVDSYFENN

SEQ ID NO: 2453 - DNA, 1875 bp, Streptococcus pneumoniae
ttgctgatgacaatagatattagtgaagaaagtttggctaaagaatcggctgacttattaaaaattcttttaaaagatcgaacgacaaagaaatcaattgtttgggctacgcattcttatgaattgttaggaaagggatttgctccaagtgatcgcatcaatccaagtaaggttactggaaactttgccaacttgattcagcccagatctgaaaaatccaaatatgaacaaaaagatcggacaaaaataagggcagaagtgtttacaccaacgtggttggtcgcaaagcaaaatggatatgtagaatcgaaattaggctcgttaagtcttgaggagtatgtggacttacgatggttagaggtaacttgtggtgaagcaccttatatggtaacgagatatgataccgtaactggtgaggaaattccattatctgagcgagttggttttgttgatagaaaactgcaacggattagtcgtgaggtttcagatgaagtcacattttataaacttgtaaaagatgcttatcatgcttcgtatggttatgagtatcaaggagattctctccttttggcgcgtgagaatcttttggcaacttttgaggactattatctagctaagactggaaatcaaccaacattagagcaaaagaaagaaattgcgactattatctcttacaatgtctttcagatggatggattgaaaaaaagtagtccttattcagctaaacaaaagcaatctcaacaattgagtttgtttgcggatgagctagaagtccaagaagtagaagaatctaaaacccatatcaaagactggaaaaagaatagaatgataggttttgagcgcctatctagcgaggaaagtgaaatgaaatttgatgtcgtgataggaaatcctccgtatcaggaaacaggagaagccagagatgagccgatatatcactattttattgatgaagcttataaaatcgcagataaatctatactaatcaccccagcaaggtttttatttaaagctggtcaaactcctaaaaattggatggaaaagatgcttgaagacaagcatttaaaagttcaattctatgaacttaaaagcggtaaagtatttacaggaacggatattaagggtggagtagcaataacttatcgtgatgttgataaagatttgggaccaatcggagtatttactatttttgaaactttgaatggtattgtaaaaaaaatcgaaaaacatccagaatttgaaactttttctgatttagtttatcctcaaggtatttatagattttcaaataaacttttttctgattatccaaatgctgaaaagctgcaaggaaaagggacaaaaaataaaattgtttcgaaatcactaactcagttagattttgttttcaaaaacaacgaagaaaaagaccatgttgctctacttggaagaattggctccgaacgtgtttatcgatatattaataaaaaatatttagatttaccggaaacattcgaaaattataatgtttttgtaccagaagctaatggaagtggtgccttaggtgaagtcttatcaacacccctaatcggggaacccctaatcgggcatacagatacttttttatctattggtaattttaaaacaaaatttgaagccgatgcttgtattaaatttattaaaactaaattcgctagagtattattaggtgttttgaaagttactcagcataattcacgcaaaacttggtattacgtccccctccaagactttacggtcaattcggacattgattggacacaatcagtgactgatattgaccgccagcttgatcaaaaatatgacctttcccctgaagaaattgcctttattgagaatcatgtaagggagatggat

SEQ ID NO: 2454 - protein, 625 aa, Streptococcus pneumoniae
  type II restriction endonuclease, putative; Cellular location: cytoplasm; Similar to strain R6 sequence 15903145 (0.E+01)
MLMTIDISEESLAKESADLLKILLKDRTTKKSIVWATHSYELLGKGFAPSDRINPSKVTGNFANLIQPRSEKSKYEQKDRTKIRAEVFTPTWLVAKQNGYVESKLGSLSLEEYVDLRWLEVTCGEAPYMVTRYDTVTGEEIPLSERVGFVDRKLQRISREVSDEVTFYKLVKDAYHASYGYEYQGDSLLLARENLLATFEDYYLAKTGNQPTLEQKKEIATIISYNVFQMDGLKKSSPYSAKQKQSQQLSLFADELEVQEVEESKTHIKDWKKNRMIGFERLSSEESEMKFDVVIGNPPYQETGEARDEPIYHYFIDEAYKIADKSILITPARFLFKAGQTPKNWMEKMLEDKHLKVQFYELKSGKVFTGTDIKGGVAITYRDVDKDLGPIGVFTIFETLNGIVKKIEKHPEFETFSDLVYPQGIYRFSNKLFSDYPNAEKLQGKGTKNKIVSKSLTQLDFVFKNNEEKDHVALLGRIGSERVYRYINKKYLDLPETFENYNVFVPEANGSGALGEVLSTPLIGEPLIGHTDTFLSIGNFKTKFEADACIKFIKTKFARVLLGVLKVTQHNSRKTWYYVPLQDFTVNSDIDWTQSVTDIDRQLDQKYDLSPEEIAFIENHVREMD

SEQ ID NO: 2455 - DNA, 252 bp, Streptococcus pneumoniae
ttgtataaattagttccaacaagacgttttatcaagcaattgaaaaaattggaccgttatacgcagaagctaattacaaactatttacaaaccaatgttttggaagacccaagacgacacggaaaggctttggttggtaatcgcgttggtcaatggcgctatagaattggtaattatcgagttatcgtacaaattgtagatgatgaattagtcgttgctactctagaagttggtcatcggagagatatttat

SEQ ID NO: 2456 - protein, 84 aa, Streptococcus pneumoniae
  conserved hypothetical protein; Cellular location: cytoplasm; Similar to strain R6 sequence 15903146 (6.E-45)
MYKLVPTRRFIKQLKKLDRYTQKLITNYLQTNVLEDPRRHGKALVGNRVGQWRYRIGNYRVIVQIVDDELVVATLEVGHRRDIY

SEQ ID NO: 2457 - DNA, 300 bp, Streptococcus pneumoniae
ttgactgaacacctaaaaagtaatacaatggtgttaccattaaaaaagggagcacaaaagatgactactattacattaaaagtttctgaagctgataaaacatttatgaaagcaatggctaagtttgaaggagtttccctttcggaacttattcgcaccaaaactcttgaagccctagaagatgaatacgatgctcgtgtggcagatttagcctatcaagagtatttagaagacttggaaaaaggagttgaacccattacttgggaagaaatgatgcatgatttaggcttgaaggatgaa

SEQ ID NO: 2458 - protein, 100 aa, Streptococcus pneumoniae
  conserved domain protein; Cellular location: cytoplasm; Similar to strain R6 sequence 15903147 (6.E-53)
MTEHLKSNTMVLPLKKGAQKMTTITLKVSEADKTFMKAMAKFEGVSLSELIRTKTLEALEDEYDARVADLAYQEYLEDLEKGVEPITWEEMMHDLGLKDE

SEQ ID NO: 2459 - DNA, 807 bp, Streptococcus pneumoniae
atgagtgaaataggctttaaatacagtattttagcgtcgggttccagtggaaattctttttatctggaaacctcaaaaaagaagcttttagtagatgcaggcttgtctggcaagaaaattaccagtctgctagctgaaattaaccgtaagccagaagacctggatgccatcttgattacccatgagcattcagatcatatccatggagtaggcgttttggctcgcaagtatggtatggatctttatgccaatgaaaagacctggcaagctatggaaaatagtaaatatcttggcaaggtggattcttcgcaaaagcatatttttgaaatgggtaaaaccaaaacctttggagatatcgacatcgagagttttggtgtaagccatgatgcagtcgcaccgcagttctatcgctttatgaaggatgataagagttttgtcctcttgacagatacaggttatgtcagtgaccgtatggcgggcattgtcgaaaatgcggatggttatcttatcgaggccaaccatgatgtagagattttgcgatcaggttcttacgcttggcgactcaaacaacgaatcctatctgaccttggtcacctttctaacgaggacggtgctgaagctatgattcggacgctaggaaatcgtactaagaagatttaccttgggcatttatctaaggaaaacaatatcaaggaactggctcatatgaccatggtcaatcagctggctcaagctgatctgggagtcggagtagactttaaggtttatgatacctcaccagataccgcaacaccattgacagagata

SEQ ID NO: 2460 - protein, 269 aa, Streptococcus pneumoniae
  vicX protein (vicX); Cellular location: cytoplasm; Similar to strain R6 sequence 15903148 (e-154)
MSEIGFKYSILASGSSGNSFYLETSKKKLLVDAGLSGKKITSLLAEINRKPEDLDAILITHEHSDHIHGVGVLARKYGMDLYANEKTWQAMENSKYLGKVDSSQKHIFEMGKTKTFGDIDIESFGVSHDAVAPQFYRFMKDDKSFVLLTDTGYVSDRMAGIVENADGYLIEANHDVEILRSGSYAWRLKQRILSDLGHLSNEDGAEAMIRTLGNRTKKIYLGHLSKENNIKELAHMTMVNQLAQADLGVGVDFKVYDTSPDTATPLTEI

SEQ ID NO: 2461 - DNA, 1347 bp, Streptococcus pneumoniae
atgcttgatttactgaaacaaaccatttttaccagagattttatctttatcctgattttgttaggtttcatccttgttgtgaccctcttattactggaaaatagacgtgataatattcagttgaagcaagtcaatcaaaaggttaaagatttgattgcaggagattattccaaggttcttgatatgcaaggtgggtctgaaatcaccaatattaccaataatttgaatgacttgtcggaggttattcgtctcactcaggaaaatctagaacaagagagtaagaggctaaatagtattctgttttatatgacagatggggttcttgcgactaaccgtcggggtcagattatcatgattaacgatacagccaagaagcaactggggttggttaaggaagatgttctgaatagaagcattttggaattgctcaagatagaagaaaactatgaattgcgtgatttgattacccaaagtccagaattgttgctagattcccaagatatcaatggcgaatatttgaaccttcgagttcgctttgccttgatacgtcgagagtctggctttatttcaggtttggtggctgttttgcatgatacgacggagcaggagaaggaagaacgcgaacgaagactctttgtttccaatgttagccatgagttacggactcctctgactagcgtaaaatcctatcttgaagccttggatgagggggctttgtgtgaaactgtagcaccagactttatcaaggtttctcttgatgagaccaaccgtatgatgcgcatggtgacggatctcctccatctttcacgtattgataatgctaccagtcacctagatgtggaactgattaacttcactgcttttattacctttatcctcaatcgttttgacaagatgaaaggacaggaaaaggagaaaaaatatgagttggtgagagattatcccatcaattctatctggatggaaattgatacagataagatgacgcaggttgtcgacaatattttaaataatgctattaagtattcgccagatgggggtaaaatcactgtcagaatgaagacaactgaagaccagatgattttatccatttctgaccacggtttggggattcctaagcaggatttaccacgtatctttgaccgtttctatcgtgtggatcgtgctagaagtcgtgcacaaggtggtacaggtctaggactgtctatcgctaaagaaattatcaaacaacataagggctttatttgggccaagagtgaatacggcaagggttcaacctttaccattgtactcccttatgataaggatgcagtgaaagaagaagtatgggaggatgaagtagaagac

SEQ ID NO: 2462 - protein, 449 aa, Streptococcus pneumoniae
  sensory box sensor histidine kinase; Cellular location: membrane; Similar to strain R6 sequence 15903149 (0.E+01)
MLDLLKQTIFTRDFIFILILLGFILVVTLLLLENRRDNIQLKQVNQKVKDLIAGDYSKVLDMQGGSEITNITNNLNDLSEVIRLTQENLEQESKRLNSILFYMTDGVLATNRRGQIIMINDTAKKQLGLVKEDVLNRSILELLKIEENYELRDLITQSPELLLDSQDINGEYLNLRVRFALIRRESGFISGLVAVLHDTTEQEKEERERRLFVSNVSHELRTPLTSVKSYLEALDEGALCETVAPDFIKVSLDETNRMMRMVTDLLHLSRIDNATSHLDVELINFTAFITFILNRFDKMKGQEKEKKYELVRDYPINSIWMEIDTDKMTQVVDNILNNAIKYSPDGGKITVRMKTTEDQMILSISDHGLGIPKQDLPRIFDRFYRVDRARSRAQGGTGLGLSIAKEIIKQHKGFIWAKSEYGKGSTFTIVLPYDKDAVKEEVWEDEVED

SEQ ID NO: 2463 - DNA, 702 bp, Streptococcus pneumoniae
atgaaaaaaatactaattgtagatgatgagaaaccaatctcggatattatcaagtttaatatgaccaaggaaggttacgaagttgtaactgcttttaatggtcgtgaagcgctagagcaatttgaagcagagcaaccagatattattattctggatttgatgcttccagaaattgatggtttagaagttgctaagaccattcgtaagacaagcagtgtgcccattcttatgctttcagccaaagatagtgaatttgataaggttatcggtttggaacttggggcagatgactatgtaacaaaacccttctccaatcgtgagttgcaggcgcgtgttaaagctcttctgcgtcgttctcaacctatgccagtagatggtcaggaagcagatagtaaacctcaacctatccaaattggggatttagaaattgttccagacgcctacgtggctaaaaaatatggcgaagaactagacttaacccatcgtgaatttgagcttttgtatcatttagcatcgcatacaggtcaagtcatcacgcgcgaacacttgcttgagactgtctggggttatgactattttggtgatgtccgtacagttgatgtgactgtacgacgtctgcgtgagaagattgaagatacgcccagccgaccagagtatatcttgacgcgccgtggtgtagggtattacatgagaaataatgct

SEQ ID NO: 2464 - protein, 234 aa, Streptococcus pneumoniae
  DNA-binding response regulator; Cellular location: cytoplasm; Similar to strain R6 sequence 15903150 (e-132)
MKKILIVDDEKPISDIIKFNMTKEGYEVVTAFNGREALEQFEAEQPDIIILDLMLPEIDGLEVAKTIRKTSSVPILMLSAKDSEFDKVIGLELGADDYVTKPFSNRELQARVKALLRRSQPMPVDGQEADSKPQPIQIGDLEIVPDAYVAKKYGEELDLTHREFELLYHLASHTGQVITREHLLETVWGYDYFGDVRTVDVTVRRLREKIEDTPSRPEYILTRRGVGYYMRNNA

SEQ ID NO: 2465 - DNA, 1173 bp, Streptococcus pneumoniae
atgttagatttgaaagaatacggtatcgtcatgtggccggaggagaaagtcatttctttccgtgagaaacttctcgcttggtatgatgaaaacaaaagagatttgccttggaggagaagtaaaaatccttatcacatctgggtatctgaaatcatgcttcagcagaccagggtggatacagttatcccttactacgaaagatttttggactggtttccaactgtcgaaagtctggcaactgcgcctgaggagagtttactgaaagcttgggagggcttgggctattattctcgagttcgcaatatgcaggctgcagcccagcagattatgactgactttggtggccaatttccaaatacctatgaaggaatttccagcttgaaagggattggaccttacacagcaggagccatttccagtattgcttttaacttgcctgagccagctgtagatggtaatgtcatgcgggtcttggcgcgtctgtttgaagtcaaccacgatattgggattccaagtaatcgaaaaatttttcaggcaatgatggagatcttgattaatccggatcgtccgggtgattttaatcaagccttgatggacttagggtctgatattgagtctcctgtaaatcccagacctgaagaaagcccagtcaaggactttagtgcggcatatcagaatggaaccatggaccgttatccaattaaatctcctaagaaaaagccggttcctatttatcttaaagccttagttgtgaaaaattctcaaggacaatttttacttgaaaaaaatgaaagcgaaaagctcttggcaggtttttggcatttcccctttatagaagttgataacttttcgcaagaagagcagtttgacctctttcatcaggttgcggaagaaagtgtgaactttggtcccagtccagaagagagtttccagcaggactatgacctagatgttgattggcttgatgtttgttttgatacagtccagcatgtttttagtcatcgaaaatggcatgtacagattgtagcaggtcaggtgagtgacttccatgatttttcagatagggaagttcgctggctttcaccagaagaattcaagaattacccacttgccaaaccccaacaaaaaatctggcaggtttatgcacaagccaacttagacagtagccaagac

SEQ ID NO: 2466 - protein, 391 aa, Streptococcus pneumoniae
  A/G-specific adenine glycosylase (mutY); Cellular location: cytoplasm; Similar to strain R6 sequence 15903151 (0.E+01)
MLDLKEYGIVMWPEEKVISFREKLLAWYDENKRDLPWRRSKNPYHIWVSEIMLQQTRVDTVIPYYERFLDWFPTVESLATAPEESLLKAWEGLGYYSRVRNMQAAAQQIMTDFGGQFPNTYEGISSLKGIGPYTAGAISSIAFNLPEPAVDGNVMRVLARLFEVNHDIGIPSNRKIFQAMMEILINPDRPGDFNQALMDLGSDIESPVNPRPEESPVKDFSAAYQNGTMDRYPIKSPKKKPVPIYLKALVVKNSQGQFLLEKNESEKLLAGFWHFPFIEVDNFSQEEQFDLFHQVAEESVNFGPSPEESFQQDYDLDVDWLDVCFDTVQHVFSHRKWHVQIVAGQVSDFHDFSDREVRWLSPEEFKNYPLAKPQQKIWQVYAQANLDSSQD

SEQ ID NO: 2467 - DNA, 237 bp, Streptococcus pneumoniae
ttgaaattgactttaagtgagtttggaaataatatccaagctcattttttctcagactgcaagcagttcatcaataagatttatactcttcgaaaatctcttcaaactacgtcagcttcaccttgccgtaggtatatgatactgactctgtcagttctatccacaacctcaaaacagtgttttgagcaacctgcggctagcttcctagtttgctctttgattttcattgagtataag

SEQ ID NO: 2468 - protein, 79 aa, Streptococcus pneumoniae
  box element
MKLTLSEFGNNIQAHFFSDCKQFINKIYTLRKSLQTTSASPCRRYMILTLSVLSTTSKQCFEQPAASFLVCSLIFIEYK

SEQ ID NO: 2469 - DNA, 1668 bp, Streptococcus pneumoniae
atgaaaacagatattgaaatcgcacagagtattgagttgaagccaattgttgatgttgtagagaaacttggtatttcttatgacgatttggagttgtacggaaagtacaaggctaaactcagctttgataaaattcgtgcagttgagagcaatccagtcggtaaattgatcttggttactgccatcaacccaacacctgcaggtgaaggaaagtcgacgcttaccattggtcttgcggatgccttgaacaagattggcaagaaaaccatgattgctatccgcgaaccgtctcttggtccagtcatggggatcaagggtggtgctgctggtggtgggtatgcacaagttctgccaatggaagacatcaacctccactttactggagatatgcatgctattacaactgccaacaatgccctttctgccttgattgacaaccacttgcaccaagggaatgagctgggaattgatcaacgtcgtatcctctggaaacgcgttgtggacttgaacgaccgtacgctccgccatgtgactgttggtcttggtggtcctctaaacggtattccacgtgaggatggttttgatattacagttgcttcagaaatcatggcaattctttgcttggcaacggacatcgaggacttgaaacgtcgtttggcgaatatcgttattggttatcgctatgaccgtacgcctgtttctgtaggtgatttgcaggttgagggtgccttggctttgattttgaaggatgctattaagccaaacttggttcagacaatttacggtacacctgcctttgtacacggtggtccatttgccaatatcgctcatggctgtaactctgttttggcgacgacaacagcccttcacttggctgattacactgttactgaagctggttttggtgcggaccttggtgctgagaaattccttgatatcaagacaccaaacttgccaacatctccagatgcagttgttattgtcgcaacccttcgtgcccttaagatgaatggtggtgtggctaaagacgctctgactgaagaaaatgtagaggcagttcgtgcaggttttgctaacttgaaacgccacgttgaaaatatccgtaagttcggtattccagcagttgtagctattaacgaatttgtatctgatacagaagctgaaattgcagccttaaaagaactctgtgcctcaatcgatgtaccagttgaattggctagtgtctgggctgatggagcagaaggtggagtagcacttgccgaaacagttgttaagacaattgctgaaaatccagctaactataaacgtttgtatgataatgacctttctgtccaagaaaagattgaaaaaattgtcactgaaatctatcgtggtagcaaagtgaactttgagaagaaagctcaaacacaaattgctcaaatcgttcaaaacggttgggacaaattgccaatctgtatggctaaaactcaatacagtttctcagacaatccaaatgcgcttggagcaccagaaaactttgaaattaccattcgtgaattggtaccaaaattaggtgcaggcttcatcgttgccttaactggtgatgttatgaccatgccaggtcttccaaaacgtccagcagctctcaacatggatgttgaaagcgatggaactgtactaggcttgttc

SEQ ID NO: 2470 - protein, 556 aa, Streptococcus pneumoniae
  formate--tetrahydrofolate ligase (fhs); Cellular location: membrane; Similar to strain R6 sequence 15903152 (0.E+01)
MKTDIEIAQSIELKPIVDVVEKLGISYDDLELYGKYKAKLSFDKIRAVESNPVGKLILVTAINPTPAGEGKSTLTIGLADALNKIGKKTMIAIREPSLGPVMGIKGGAAGGGYAQVLPMEDINLHFTGDMHAITTANNALSALIDNHLHQGNELGIDQRRILWKRVVDLNDRTLRHVTVGLGGPLNGIPREDGFDITVASEIMAILCLATDIEDLKRRLANIVIGYRYDRTPVSVGDLQVEGALALILKDAIKPNLVQTIYGTPAFVHGGPFANIAHGCNSVLATTTALHLADYTVTEAGFGADLGAEKFLDIKTPNLPTSPDAVVIVATLRALKMNGGVAKDALTEENVEAVRAGFANLKRHVENIRKFGIPAVVAINEFVSDTEAEIAALKELCASIDVPVELASVWADGAEGGVALAETVVKTIAENPANYKRLYDNDLSVQEKIEKIVTEIYRGSKVNFEKKAQTQIAQIVQNGWDKLPICMAKTQYSFSDNPNALGAPENFEITIRELVPKLGAGFIVALTGDVMTMPGLPKRPAALNMDVESDGTVLGLF

SEQ ID NO: 2471 - DNA, 702 bp, Streptococcus pneumoniae
gtgtacaatagtgctatgaaaattttagttacatcgggcggtaccagtgaagctatcgatagcgtccgctctatcactaaccattctacaggtcacttggggaaaattatcacagagactttgctttctgcagggtatgaagtttgtttaattacgacaaaacgagctctgaagccagagcctcatcctaacctaagtattcgagaaattaccaataccaaggaccttctaatagaaatgcaagaacgtgttcaggattatcaggtcttgatccactcaatggctgtttctgactacactcctgtttatatgacagggcttgaggaagttcaggctagctccaatctaaaagaatttttaagcaagcaaaatcatcaggccaagatttcttcaactgatgaggttcaggttttgttccttaaaaagacacccaaaatcatatccctagtcaaggaatggaatcctactattcatctgattggtttcaaactgctggttgatgttaccgaagatcatctggttgacattgcacgaaaaagtcttatcaagaatcaagcagatttaatcatcgcgaatgacctgactcaaatttcagcagatcagcaccgagctatatttgttgagaaaaatcagcttcaaacagtccagactaaagaagaaattgcagaactcctccttgaaaaaattcaagcctatcattct

SEQ ID NO: 2472 - protein, 234 aa, Streptococcus pneumoniae
  conserved hypothetical protein; Cellular location: cytoplasm; Similar to strain R6 sequence 15903153 (e-125)
MYNSAMKILVTSGGTSEAIDSVRSITNHSTGHLGKIITETLLSAGYEVCLITTKRALKPEPHPNLSIREITNTKDLLIEMQERVQDYQVLIHSMAVSDYTPVYMTGLEEVQASSNLKEFLSKQNHQAKISSTDEVQVLFLKKTPKIISLVKEWNPTIHLIGFKLLVDVTEDHLVDIARKSLIKNQADLIIANDLTQISADQHRAIFVEKNQLQTVQTKEEIAELLLEKIQAYHS

SEQ ID NO: 2473 - DNA, 549 bp, Streptococcus pneumoniae
atggcaaacattctcttggctgtaacgggttcaatcgcctcttataagtcggcagatttagtcagttctctaaaaaaacaaggccatcaagtcactgtcttaatgactcaggctgctacagagtttatccaacctttgacactacaggtactctcacagaatcctgtccacttggatgtcatgaaggaaccctatcctgatcaggtcaatcatatcgaacttggaaaaaaagcagatttatttatcgtggtacctgcaactgctaacactattgcaaaactagctcacggatttgcggacaacatggtaaccagtacagctctagccctaccaagtcatattcccaaactaatagctcctgctatgaatacaaaaatgtatgaccatccagtaactcagaataatctgaaaacattagaaacctacggctatcagctgattgctcctaaggaatccctactagcttgtggagaccacggacgaggagctttagctgacctcacaattattttagaaagaataaaggaaactatcgatgaaaaaacgctc

SEQ ID NO: 2474 - protein, 183 aa, Streptococcus pneumoniae
  flavoprotein; Cellular location: outside; Similar to strain R6 sequence 15903154 (e-101)
MANILLAVTGSIASYKSADLVSSLKKQGHQVTVLMTQAATEFIQPLTLQVLSQNPVHLDVMKEPYPDQVNHIELGKKADLFIVVPATANTIAKLAHGFADNMVTSTALALPSHIPKLIAPAMNTKMYDHPVTQNNLKTLETYGYQLIAPKESLLACGDHGRGALADLTIILERIKETIDEKTL

SEQ ID NO: 2475 - DNA, 561 bp, Streptococcus pneumoniae
atgaaaaaacgctctaatattgcacccattgctatcttttttgctaccatgctcgtgatacactttctgagctcacttatctttaacctttttccatttccaatcaaaccgaccattgttcatattcctgtcattattgccagcattatttatggtccacgagttggggttacacttggatttttgatgggattacttagcttgacggttaacacgattacgattctaccgacaagctacctcttctctcccttcgtaccaaacggaaacatctactcagctatcattgccatcgtcccacgtattttgattggtttaactccttacttagtctataaactgatgaaaaacaagactggtctgattttagctggagcccttggttccttgacaaatactatctttgtccttggaggaatcttcttcctatttggaaatgtttataatggaaatatccaacttcttctggcaaccgttatctcaacaaattcaattgctgaattggtcatttctgcaattctaaccctagccattgttccacgactacaaaccttgaaaaaa

SEQ ID NO: 2476 - protein, 187 aa, Streptococcus pneumoniae
  membrane protein; Cellular location: membrane; Similar to strain R6 sequence 15903155 (e-100)
MKKRSNIAPIAIFFATMLVIHFLSSLIFNLFPFPIKPTIVHIPVIIASIIYGPRVGVTLGFLMGLLSLTVNTITILPTSYLFSPFVPNGNIYSAIIAIVPRILIGLTPYLVYKLMKNKTGLILAGALGSLTNTIFVLGGIFFLFGNVYNGNIQLLLATVISTNSIAELVISAILTLAIVPRLQTLKK

SEQ ID NO: 2477 - DNA, 579 bp, Streptococcus pneumoniae
ttgtctggtttattgtaccatactagtgtatatgcagttaaaaaggagattcttgtgaatacacggaaaaagacacaatttatgacaatgacagcccttttaacggctattgcgattttgattccaattgttatgcctttcaagattgtcattccacctgcttcctatactttggggagccacatcgctatttttatagccatgttcttgtcgcccttgatggcagtttttgtcatcctagcctctagttttggatttttgatggctggctatcccatggttatcgtttttcgggctttttcccatatatcttttggtgctttaggagctctttacctacaaaaattccccgataccctagataaaccaaaatcttcctggattttcaactttgttttggctgttgttcatgcccttgctgaagtattggcctgtgtcgttttttacgcaacttctggtaccaatgtagaaaatatgttttatgttctatttgtactagttggatttggtacaattatccatagtatggtagactatacattagcactagctgtctataaagtgcttcgaaaacgccgt

SEQ ID NO: 2478 - protein, 193 aa, Streptococcus pneumoniae
  hypothetical protein; Cellular location: membrane; Similar to strain R6 sequence 15903156 (e-105)
MSGLLYHTSVYAVKKEILVNTRKKTQFMTMTALLTAIAILIPIVMPFKIVIPPASYTLGSHIAIFIAMFLSPLMAVFVILASSFGFLMAGYPMVIVFRAFSHISFGALGALYLQKFPDTLDKPKSSWIFNFVLAVVHALAEVLACVVFYATSGTNVENMFYVLFVLVGFGTIIHSMVDYTLALAVYKVLRKRR

SEQ ID NO: 2479 - DNA, 513 bp, Streptococcus pneumoniae
atgacaaaagatcgcaaacaagccctgctccaactcttgaaagaagctcctaaagccctcaatggccaaagattagctgagcactttcatgtcactcgacaagttattgttcaagatattgcaattttaagagctgatggatctccaattctatctaccaatcgtggttatatctataaagatgctaatgcaaatacttatcatcacaaattatttaaggtcaagcatgaagttgaagaaattggacgagaattacttgctatcgtagataatggtggtcgcgttcaaaatatcttgattgatcatcctgtttatggagagattgaaaccttactaaaactgacctgtcgccgcgacgtgcaacattttctagaacaagttgaacgttctgactttaagccaatttctgagttaacagatggtattcattatcacctagttgaagccgagacacaacaagacctccactatatcgaggaggccttggatcagctaggttatttagtaaaagac

SEQ ID NO: 2480 - protein, 171 aa, Streptococcus pneumoniae
  transcriptional regulator, biotin repressor family; Cellular location: cytoplasm; Similar to strain R6 sequence 15903157 (9.E-88)
MTKDRKQALLQLLKEAPKALNGQRLAEHFHVTRQVIVQDIAILRADGSPILSTNRGYIYKDANANTYHHKLFKVKHEVEEIGRELLAIVDNGGRVQNILIDHPVYGEIETLLKLTCRRDVQHFLEQVERSDFKPISELTDGIHYHLVEAETQQDLHYIEEALDQLGYLVKD

SEQ ID NO: 2481 - DNA, 465 bp, Streptococcus pneumoniae
atgtcccgttcccaattaacaattttaacaaatatctgtctgattgaagacctcgaaactcagcgcgtggtgatgcagtatcgcgcccctgaaaacaatcgctggtctggttatgcctttcctggaggtcatgtagaaaatgatgaggcttttgcggagtctgtcattcgtgaaatctacgaagaaacagggttgactatccaaaatcctcaacttgtcggcattaaaaattggccactagatacaggtgggcgctatattgtcatttgttataaggcgactgagttctctggtacccttcaatcttcagaagagggagaagtttcttgggtgcaaaaagaccagattccaaacttaaatctggcctatgatatgctaccattgatggaaatgatggaagctcccgacaagtcagagtttttctaccctcgccgtacagaagacgattgggaaaagaaaatcttc

SEQ ID NO: 2482 - protein, 155 aa, Streptococcus pneumoniae
  MutT/nudix family protein; Cellular location: cytoplasm; Similar to strain R6 sequence 15903158 (7.E-90)
MSRSQLTILTNICLIEDLETQRVVMQYRAPENNRWSGYAFPGGHVENDEAFAESVIREIYEETGLTIQNPQLVGIKNWPLDTGGRYIVICYKATEFSGTLQSSEEGEVSWVQKDQIPNLNLAYDMLPLMEMMEAPDKSEFFYPRRTEDDWEKKIF

SEQ ID NO: 2483 - DNA, 486 bp, Streptococcus pneumoniae
atgacggttattatcaaatcaatggaaactcctgaagagatagaaggtaaatccttcgttcactggcaaacgtggagagaggcttatgatgaccttttgcctgcggaatttcaggagacaatgacattagaaagatgtcgactctttagtcaaaagtatccagaaaatacattgattgcgatggatggtgtgaagatagttggttttataagttatggcaactgtcgtgatgagactattcaagctggtgaaattattgctttatatgttttaaaagactattatggaaaaggaatcgcacaaaagttagtgaaagcagctttgactgatcttaatcatttttctgaaattttcttatgggtattgaaagataacaagcgcgccattgctttctatcaaaaaatgggttttacttttgatggacaagaaaaaatacttgaacttggaaagcctataaaggaaaaacggatggtattctattctaaa

SEQ ID NO: 2484 - protein, 162 aa, Streptococcus pneumoniae
  acetyltransferase, GNAT family; Cellular location: cytoplasm; Similar to strain R6 sequence 15903159 (7.E-88)
MTVIIKSMETPEEIEGKSFVHWQTWREAYDDLLPAEFQETMTLERCRLFSQKYPENTLIAMDGVKIVGFISYGNCRDETIQAGEIIALYVLKDYYGKGIAQKLVKAALTDLNHFSEIFLWVLKDNKRAIAFYQKMGFTFDGQEKILELGKPIKEKRMVFYSK

SEQ ID NO: 2485 - DNA, 561 bp, Streptococcus pneumoniae
atgatttatttaagaaagttaaagaaagaagatttgatgtctttatgggaaatggcttattcacagcttaatccagtttggaaacagtatgatgctccctattatgatgattatcagtatttttcaaattttaaagaattcgaactacaaaaatcagaatccattttaagcaactcaaatcgccttggtatttttgttgatgataaactagttgggactgtttcgcgttattgggtatgtaaagaaacaagatggatggaattgggaattggtatttatgataaaaaattctggaacactggtattgggaaagttgctatgttgcagtggatagataggacgtttcaggattacttggagttggagcatctgggtttgacaacttggtcaggaaatattggtatgatgaaacttgctgaaaaattaagaatgaaaaaagaagctcatattccaaaagttcgttattatcaaggtaaatattttgacagtattaaatatggtattttgagagaagactgggagaaaataaatgacggttattatcaaatcaatggaaactcc

SEQ ID NO: 2486 - protein, 187 aa, Streptococcus pneumoniae
  acetyltransferase, GNAT family; Cellular location: cytoplasm; Similar to strain R6 sequence 15903160 (e-111)
MIYLRKLKKEDLMSLWEMAYSQLNPVWKQYDAPYYDDYQYFSNFKEFELQKSESILSNSNRLGIFVDDKLVGTVSRYWVCKETRWMELGIGIYDKKFWNTGIGKVAMLQWIDRTFQDYLELEHLGLTTWSGNIGMMKLAEKLRMKKEAHIPKVRYYQGKYFDSIKYGILREDWEKINDGYYQINGNS

SEQ ID NO: 2487 - DNA, 1986 bp, Streptococcus pneumoniae
atgatcaatcacattacagataatcaatttaaactagtatcaaaatatcaaccatcaggagatcaaccccaagctatcgagcagttggtggataacattgaggggggagaaaaagctcagattctgatgggggcgactggaacagggaagacctatactatgagtcaggtcatttctaaagtcaataaaccaactctggttattgcccacaataaaactctggctggtcagctctatggggagtttaaggaatttttccctgaaaatgcagttgagtatttcgtatcctactatgattattaccagccagaggcctatgtcccttctagcgatacctatattgagaaggatagttctgtcaatgacgagattgacaagcttcgccactcagctacctcagcccttttggagcgtaatgatgttattgtcgtggcctcagtctcttgtatctatggtttgggttcgcccaaggaatacgctgatagtgtcgttagtctccgtcctggtctagagatttctcgtgataaactcttgaatgacttggtcgatattcagtttgaacgtaatgatattgatttccaacgcggaagatttcgcgttcgtggggatgtggtagagattttcccagcttcccgagatgaacatgcctttcgagtagaattttttggagacgaaattgaccgtattcgtgaagttgaggctctgacaggtcaggtgttgggagaagtggatcatttagcgattttcccagcgacacactttgtgaccaatgacgaccacatggaagttgccattgcaaagattcaggccgagttggaagaacaattagctgtctttgaaaaggaaggtaaactgcttgaagcccagcgtttgaaacagcggacagagtatgatatcgaaatgttgcgtgagatgggctataccaatggggttgaaaattattctcgccacatggatggacggagcgaaggagagcctccttatacgcttctcgacttcttcccagatgatttcttgattatgattgacgagagtcatatgaccatagggcaaatcaagggcatgtacaatggagaccgttcgcgtaaagaaatgctggttaattatggtttccgtttgccgtctgctttggacaatcgtcctctccgtcgggaggagtttgagagtcacgttcatcagattgtttacgtttcagcgacacctggtgactatgaaaatgaacagaccgagacagtgattgagcaaatcattcgtccaacgggactcttggatccagaggtggaagtccgtccgactatgggacagattgatgacctcttgggtgaaatcaatgcccgcgttgaaaaaaatgagcgtacctttatcacaactttgaccaagaaaatggcagaggatttgaccgactacttcaaggaaatgggtatcaaggtcaagtacatgcactcggatatcaagaccttggaacggacggagattatccgtgacctgcgcttgggtgtctttgatgtcttggtcggaattaacctgctccgtgaaggaattgacgttcctgaagtgagcctcgtagctattctcgatgctgacaaggaaggtttccttcgcaacgaacgtggactcatccagaccattggacgtgctgcacgtaatagcgaaggtcatgttatcatgtatgcggacacggttacccagtctatgcaacgtgctatcgatgaaactgcccgccgtcgcaaaatccagatggcctataatgaagaacatggtatcgttccacaaaccatcaagaaagaaatccgtgacttgattgctgtgaccaaggcagttgctaaggaagaagacaaggaagtcgatatcaatagcctcaacaaacaagagcgcaaagaactagtcaaaaagcttgagaaacaaatgcaagaagcagttgaagtgcttgactttgaactagcagctcagattcgtgatatgatgctggaagtcaaggccttggat

SEQ ID NO: 2488 - protein, 662 aa, Streptococcus pneumoniae
  excinuclease ABC, subunit B (uvrB); Cellular location: cytoplasm; Similar to strain R6 sequence 15903161 (0.E+01)
MINHITDNQFKLVSKYQPSGDQPQAIEQLVDNIEGGEKAQILMGATGTGKTYTMSQVISKVNKPTLVIAHNKTLAGQLYGEFKEFFPENAVEYFVSYYDYYQPEAYVPSSDTYIEKDSSVNDEIDKLRHSATSALLERNDVIVVASVSCIYGLGSPKEYADSVVSLRPGLEISRDKLLNDLVDIQFERNDIDFQRGRFRVRGDVVEIFPASRDEHAFRVEFFGDEIDRIREVEALTGQVLGEVDHLAIFPATHFVTNDDHMEVAIAKIQAELEEQLAVFEKEGKLLEAQRLKQRTEYDIEMLREMGYTNGVENYSRHMDGRSEGEPPYTLLDFFPDDFLIMIDESHMTIGQIKGMYNGDRSRKEMLVNYGFRLPSALDNRPLRREEFESHVHQIVYVSATPGDYENEQTETVIEQIIRPTGLLDPEVEVRPTMGQIDDLLGEINARVEKNERTFITTLTKKMAEDLTDYFKEMGIKVKYMHSDIKTLERTEIIRDLRLGVFDVLVGINLLREGIDVPEVSLVAILDADKEGFLRNERGLIQTIGRAARNSEGHVIMYADTVTQSMQRAIDETARRRKIQMAYNEEHGIVPQTIKKEIRDLIAVTKAVAKEEDKEVDINSLNKQERKELVKKLEKQMQEAVEVLDFELAAQIRDMMLEVKALD

SEQ ID NO: 2489 - DNA, 141 bp, Streptococcus pneumoniae
atgacctttttaccacaaggcaatcaagattggctatcaggtggttcttttggcatagaaggttccattatgacaagtctggtattactactgctgattgtctatcttgctaataaattaaagaaagaaaatgaaaggatg

SEQ ID NO: 2490 - protein, 47 aa, Streptococcus pneumoniae
  hypothetical protein
MTFLPQGNQDWLSGGSFGIEGSIMTSLVLLLLIVYLANKLKKENERM

SEQ ID NO: 2491 - DNA, 807 bp, Streptococcus pneumoniae
atgaagaacaaaagaatatttaaagacttccaagcttcaaaaatgagtttaaacatttacacaagccccttgttagcctttgtttttgtcttcataggagagtttgtggcttttactttgtatggtattggcttgttagctctcatcggacttgctagaaattttggagaggctggtcaaaatcttgcaagctacttgcagaccttgcatcagagcttgacggataaaacaagtgactttcgtttaattttaggattactggcctttggttttattcttaacactgtgttcagatggacaagaaaagttgagaaaagacctattcgaaccttgggattttatagagagaatttcctcagcaatcttctgaaaggatttagtctaggcctggcactttttcttctgaccttgttaggtttagtggtcttaggtcaatatcgtttggaatccattcacttgaatccttattctcttgcctttgtcgtctttactatcccattttggattttacaggggacagcagaagaagtggtggcccgtgcttggctacttcctcaattggcctcaagaaccaatctaaaactagctattcttatatctagcctgttctttaccctgcttcatatgggcaattctggtctcacccctctatctctagtaaatctctttttattcggagttgccatggctctttaccttctcaaaactgatacagtttggggtgttgcaggtattcatggtgcttggaattttgctcagggtaatctctttgggattttagttagtggtcaaccgtcagaacgtctc

SEQ ID NO: 2492 - protein, 269 aa, Streptococcus pneumoniae
  conserved hypothetical protein, FRAMESHIFT; Cellular location: membrane; Similar to strain R6 sequence 15903162 (e-179)
MKNKRIFKDFQASKMSLNIYTSPLLAFVFVFIGEFVAFTLYGIGLLALIGLARNFGEAGQNLASYLQTLHQSLTDKTSDFRLILGLLAFGFILNTVFRWTRKVEKRPIRTLGFYRENFLSNLLKGFSLGLALFLLTLLGLVVLGQYRLESIHLNPYSLAFVVFTIPFWILQGTAEEVVARAWLLPQLASRTNLKLAILISSLFFTLLHMGNSGLTPLSLVNLFLFGVAMALYLLKTDTVWGVAGIHGAWNFAQGNLFGILVSGQPSERL

SEQ ID NO: 2493 - DNA, 2163 bp, Streptococcus pneumoniae
atgaagaaaaaatttctagcatttttgctaattttattcccaattttctcattaggtattgccaaagcagaaacgattaagattgtttctgataccgcctatgcaccttttgagtttaaagattcagatcaaacttataaaggaattgatgttgacattattaacaaagtcgctgagattaaaggctggaacattcagatgtcctatcctggatttgacgcagcagtcaatgcggttcaagctgggcaagccgacgctatcatggcagggatgacaaagactaaagaacgtgaaaaagtcttcaccatgtctgatacttactatgatacaaaagttgtcattgctactacaaagtcacacaaaattagcaagtacgaccaattaactggcaaaaccgttggtgttaaaaacggaactgccgctcaacgtttccttgaaacaatcaaagataaatacggctttactattaaaacatttgacactggtgatttaatgaacaacagcttgagtgctggtgccatcgatgccatgatggatgacaaacctgttatcgaatatgccattaaccaaggtcaagacctccatattgaaatggatggtgaagctgtaggaagttttgctttcggtgtgaaaaaaggaagtaaatacgagcacctggttactgaatttaaccaagccttgtctgaaatgaaaaaagatggtagtcttgataaaattatcaagaaatggactgcttcatcatcttcagcagtgccaactacaactactctcgcaggattaaaagctattcctgttaaggctaaatatatcattgccagcgattcttcttttgccccttttgttttccaaaattcaagcaaccaatacactggtattgatatggaattgattaaggcaatcgctaaagaccaaggttttgaaattgaaatcaccaaccctggttttgatgctgctatcagtgctgtccaagctggtcaagccgatggtatcatcgctggtatgtctgtcacagatgctcgtaaggcaacttttgacttctcagaatcatactacactgctaataccattcttggtgtcaaagaatcaagcaatattgcttcttatgaagatctaaaaggaaagacagtcggtgttaaaaacggaactgcttctcaaaccttcctaacagaaaatcaaagcaaatacggctacaaaatcaaaacctttgctgatggttcttcaatgtatgacagtttaaacactggtgccattgatgccgttatggatgatgaacctgttctcaaatattctatcagccaaggtcaaaaattgaaaactccaatctctggaactccaatcggtgaaacagcctttgccgttaaaaaaggagcaaatccagaactgattgaaatgttcaacaacggacttgcaaaccttaaagcaaacggtgaattccaaaagattcttgacaaatacctagctagcgaatcttcaactgcttcaacaagtactgttgacgaaacaacgctctggggcttgcttcaaaacaactacaaacaactccttagcggtcttggtatcactcttgctctagctcttatctcatttgctattgccattgtcatcggaattatcttcggtatgtttagcgttagcccatacaaatctcttcgcgtcatctctgagattttcgttgacgttattcgtggtattccattgatgattcttgcagccttcatcttctggggaattccaaacttcatcgagtctatcacaggccaacaaagcccaattaacgactttgtagctggaaccattgccctctcactcaatgcggctgcttatatcgctgaaatcgttcgtggtggtattcaggccgttccagttggccaaatggaagccagccgaagcttgggtatctcttatggaaaaaccatgcgtaagattatcttgccacaagcaactaaattgatgttgccaaactttgtcaaccaattcgttatcgctcttaaagatacaactatcgtatctgctatcggtttggttgaactcttccaaactggtaagattatcattgctcgtaactaccaaagtttcaagatgtatgcaatccttgctatcttctatcttgtaattatcacacttttgactagactagcgaaacgcttagaaaagaggattcgt

SEQ ID NO: 2494 - protein, 721 aa, Streptococcus pneumoniae
  amino acid ABC transporter, amino acid-binding protein/permease protein; Cellular location: membrane; Similar to strain R6 sequence 15903163 (0.E+01)
MKKKFLAFLLILFPIFSLGIAKAETIKIVSDTAYAPFEFKDSDQTYKGIDVDIINKVAEIKGWNIQMSYPGFDAAVNAVQAGQADAIMAGMTKTKEREKVFTMSDTYYDTKVVIATTKSHKISKYDQLTGKTVGVKNGTAAQRFLETIKDKYGFTIKTFDTGDLMNNSLSAGAIDAMMDDKPVIEYAINQGQDLHIEMDGEAVGSFAFGVKKGSKYEHLVTEFNQALSEMKKDGSLDKIIKKWTASSSSAVPTTTTLAGLKAIPVKAKYIIASDSSFAPFVFQNSSNQYTGIDMELIKAIAKDQGFEIEITNPGFDAAISAVQAGQADGIIAGMSVTDARKATFDFSESYYTANTILGVKESSNIASYEDLKGKTVGVKNGTASQTFLTENQSKYGYKIKTFADGSSMYDSLNTGAIDAVMDDEPVLKYSISQGQKLKTPISGTPIGETAFAVKKGANPELIEMFNNGLANLKANGEFQKILDKYLASESSTASTSTVDETTLWGLLQNNYKQLLSGLGITLALALISFAIAIVIGIIFGMFSVSPYKSLRVISEIFVDVIRGIPLMILAAFIFWGIPNFIESITGQQSPINDFVAGTIALSLNAAAYIAEIVRGGIQAVPVGQMEASRSLGISYGKTMRKIILPQATKLMLPNFVNQFVIALKDTTIVSAIGLVELFQTGKIIIARNYQSFKMYAILAIFYLVIITLLTRLAKRLEKRIR

SEQ ID NO: 2495 - DNA, 738 bp, Streptococcus pneumoniae
atggcaaaattaaaaattgatgtaaatgatttacacaagcactatggaaaaaatgaagtcctaaaaggaattacgactaagttctatgaaggagatgttgtttgtatcatcggtccttcaggttctggtaagtcaactttcctccgtagcctcaatcttttagaagaagtcactagcggtcacatcactgtgaacggctatgatttaactgaaaaaacaaccaatgttgaccacgtccgtgaaaatatcggcatggtattccaacacttcaacctcttccctcatatgtctgtattggacaacatcacctttgctcctattgagcacaagttgatgactaaggaagaagctgaggaattgggaatggagttgcttgaaaaggttggactagcagataaagctaatgccaatccagatagcctatcaggtggtcaaaaacaacgtgtggccatcgctcgtggcctagcaatgaatccagacatcatgctcttcgatgaaccaacttctgcccttgaccctgagatggttggagacgtacttaacgttatgaaggaattggctgagcaaggcatgaccatgattatcgtaacccatgagatgggatttgctcgtcaggttgccaaccgcgttatctttactgcagatggcgagttccttgaagacggaacacctgaccaaatctttgataacccacaacaccctcgtctgaaagagttcttagataaggtcttaaacgtc

SEQ ID NO: 2496 - protein, 246 aa, Streptococcus pneumoniae
  amino acid ABC transporter, ATP-binding protein; Cellular location: cytoplasm; Similar to strain R6 sequence 15903164 (e-140)
MAKLKIDVNDLHKHYGKNEVLKGITTKFYEGDVVCIIGPSGSGKSTFLRSLNLLEEVTSGHITVNGYDLTEKTTNVDHVRENIGMVFQHFNLFPHMSVLDNITFAPIEHKLMTKEEAEELGMELLEKVGLADKANANPDSLSGGQKQRVAIARGLAMNPDIMLFDEPTSALDPEMVGDVLNVMKELAEQGMTMIIVTHEMGFARQVANRVIFTADGEFLEDGTPDQIFDNPQHPRLKEFLDKVLNV

SEQ ID NO: 2497 - DNA, 1485 bp, Streptococcus pneumoniae
atgtcatctaaggttattgttacaattttcggtgcgagtggagacctggctaaacgcaagctctacccttccctttttagactatatcaatccggcaatctttccaagcactttgccgttattggaactgcccgtagaccttggagtaaggaatattttgaatctgtagttgtcgagtccatccttgatttggcagatagtaccgagcaagcccaagaatttgctagccacttctactatcaaagccatgatgtcaatgattcggaacattatattgctttgcgtcaattacaagctgagcttaatgaaaaataccaagctgaacacaataagctcttcttcttgtctatggcacctcagttctttggaaccattgccaaacacctcaaatctgaaaacattgtcgatggcaaaggttttgagcgcttgatcgttgaaaaaccatttggtacagattacgcaactgcaagcaagttgaatgacgaactcctagcaacatttgacgaagaacaaattttccgtatcgaccattatcttggtaaggaaatgatccaaagcatctttgcagttcgctttgcaaacttgatttttgaaaacgtttggaacaaggattttatcgacaatgttcaaattacctttgcggagcgcttgggtgtagaagaacgtggtggctactatgaccaatccggtgccctccgtgacatggtccaaaaccacactctacaacttctttcgctcctcgccatggacaaaccagcaagcttcacaaaagacgagattcgtgctgaaaagattaaggtctttaaaaacctctatcatccaactgatgaagaactcaaagaacactttatccgtgggcaataccgctctggtaagattgatggcatgaaatacatctcttatcgtagcgagccaaatgtgaatccagaatcaacaactgaaacctttacatctggtgccttctttgtagacagcgatcgattccgtggtgttcctttctttttccgtacaggtaaacgactgactgaaaaaggaactcatgtcaacatcgtctttaaacaaatggattctatctttggagaaccacttgctccaaatattttgaccatctatattcaaccaacagaaggcttctctcttagcctaaatgggaagcaagtaggagaagaatttaacttggctcctaactcacttgattaccgtacagatgcgactgcaactggtgcttctccagaaccatacgaaaaattgatttatgatgtcctaaataacaactcaactaactttagccactgggatgaagtttgtgcgtcatggaagttgattgaccgtattgaaaagctctgggctgaaaatggtgccccacttcatgactataaagctggaagcatgggacctcaagccagctttgacctacttgaaaaattcggtgccaaatggacttggcaaccagatatcacctatcgtcaagatggtcgcttagaa

SEQ ID NO: 2498 - protein, 495 aa, Streptococcus pneumoniae
  glucose-6-phosphate 1-dehydrogenase (zwf); Cellular location: outside; Similar to strain R6 sequence 15903165 (0.E+01)
MSSKVIVTIFGASGDLAKRKLYPSLFRLYQSGNLSKHFAVIGTARRPWSKEYFESVVVESILDLADSTEQAQEFASHFYYQSHDVNDSEHYIALRQLQAELNEKYQAEHNKLFFLSMAPQFFGTIAKHLKSENIVDGKGFERLIVEKPFGTDYATASKLNDELLATFDEEQIFRIDHYLGKEMIQSIFAVRFANLIFENVWNKDFIDNVQITFAERLGVEERGGYYDQSGALRDMVQNHTLQLLSLLAMDKPASFTKDEIRAEKIKVFKNLYHPTDEELKEHFIRGQYRSGKIDGMKYISYRSEPNVNPESTTETFTSGAFFVDSDRFRGVPFFFRTGKRLTEKGTHVNIVFKQMDSIFGEPLAPNILTIYIQPTEGFSLSLNGKQVGEEFNLAPNSLDYRTDATATGASPEPYEKLIYDVLNNNSTNFSHWDEVCASWKLIDRIEKLWAENGAPLHDYKAGSMGPQASFDLLEKFGAKWTWQPDITYRQDGRLE

SEQ ID NO: 2499 - DNA, 1287 bp, Streptococcus pneumoniae
atgggattgtttgaccgtctattcggaaaaaaagaagaacctaaaatcgaagaagttgtaaaagaagctctggaaaatcttgatttgtctgaagatgttgatcctaccttcacagaagttgaggaagtttctcaggaagaagcagaggttgaaattgttgaacaagctgtgttccaagaagaggaaatccaagacacagttgaagaaagtcaggattcagagccagctgtaggggtttctcaagaagaaatagaagaattaccaaactcagaagaattaccagaggaagagaagcttgagcacgaaggaactgtagaagaaaataattctgaagtgcttgaaccagaagctcctcaaacagaagaaactgttcaggaaaaatatgaccgcagtcttaagaaaactcgcacaggtttcggtgcccgcttgaatgccttctttgctaacttccgctctgttgacgaagaatttttcgaggaactggaagaactgctgattatgagtgatgttggtgtccaagtcgcttctaacttaacggaggaactacgttacgaagccaagcttgaaaatgccaagaaacctgatgtacttcgtcgtgtcatcattgagaaattggttgagctttatgaaaaggatggtagctacgatgaaagcatccacttccaagataacttgacagttatgctctttgttggtgtgaatggtgttgggaaaacaacttctatcggaaaactagcccaccgctacaaacaagctggtaagaaggtcatgctggttgcagcagataccttccgtgcgggtgcagtagctcagctagctgaatggggccgacgagtagatgttccagtagtaactggacctgaaaaagctgatccagccagcgtggtctttgatggtatggaacgtgccgtgactgaaggtatcgatattctcatgattgatactgctggtcgtctgcaaaataaggataaccttatggctgagttggaaaagattggtcgtattatcaaacgtgttgtgccagaagcaccacatgaaaccttcttggcacttgatgcatcaacaggtcaaaatgccctagtacaggccaaagaattttcgaaaatcacacctttaacgggaattgttttgactaagattgatggaactgctcgaggaggtgtggttctagccattcgtgaagaactcaatattcctgtaaaattgattggttttggtgaaaaaatcgatgatattggagagtttaactcagaaaactttatgaaaggtctcttggaaggtttaatc

SEQ ID NO: 2500 - protein, 429 aa, Streptococcus pneumoniae
  signal recognition particle-docking protein FtsY (ftsY); Cellular location: cytoplasm; Similar to strain R6 sequence 15903166 (0.E+01)
MGLFDRLFGKKEEPKIEEVVKEALENLDLSEDVDPTFTEVEEVSQEEAEVEIVEQAVFQEEEIQDTVEESQDSEPAVGVSQEEIEELPNSEELPEEEKLEHEGTVEENNSEVLEPEAPQTEETVQEKYDRSLKKTRTGFGARLNAFFANFRSVDEEFFEELEELLIMSDVGVQVASNLTEELRYEAKLENAKKPDVLRRVIIEKLVELYEKDGSYDESIHFQDNLTVMLFVGVNGVGKTTSIGKLAHRYKQAGKKVMLVAADTFRAGAVAQLAEWGRRVDVPVVTGPEKADPASVVFDGMERAVTEGIDILMIDTAGRLQNKDNLMAELEKIGRIIKRVVPEAPHETFLALDASTGQNALVQAKEFSKITPLTGIVLTKIDGTARGGVVLAIREELNIPVKLIGFGEKIDDIGEFNSENFMKGLLEGLI

SEQ ID NO: 2501 - DNA, 816 bp, Streptococcus pneumoniae
atggcagatataaaattgattgcattggacttggacgggaccttgctgactactgataaaaggctgacggatcgtaccaaggaaaccttgcaagctgcgcgtgatcgtggtatcaaggtcgtattgacaactggtcgtcccttaaaagccatggatttctttctccatgagttagggactgacggtcaggaagatgagtataccattacttttaatggtggattagttcagaaaaatacaggagaaatccttgataaaacagtcttttcatatgatgatgtggcacgtttgtatgaagaaacagagaaattatcactgcctcttgatgccatctcagaaggaacagtttatcaaatccaatcggaccaagaaagtctttatgccaaattcaatccagctttgacctttgttccagtggactttgaagacttatctagtcaaatgacctacaacaaatgcgtgactgcctttgctcaagaacccttggatgcagccattcagaagatttctccagaattgtttgaccaatatgaaatctttaaatcacgtgaaatgttgctagaatggtcaccaaagaatgttcataaagcaacaggtttggcaaaactaatcagccatcttggaatcgaccaaagtcaagtgatggcttgtggtgacgaggccaatgacctctctatgattgaatgggcaggtcttggtgttgctatgcaaaacgctgttcctgaagtaaaggcagccgcaaatgtagtgacgccgatgaccaacgatgaggaagctgtcgcctgggctatcgaagaatatgtgctaaaggagaac

SEQ ID NO: 2502 - protein, 272 aa, Streptococcus pneumoniae
  Cof family protein; Cellular location: cytoplasm; Similar to strain R6 sequence 15903167 (e-154)
MADIKLIALDLDGTLLTTDKRLTDRTKETLQAARDRGIKVVLTTGRPLKAMDFFLHELGTDGQEDEYTITFNGGLVQKNTGEILDKTVFSYDDVARLYEETEKLSLPLDAISEGTVYQIQSDQESLYAKFNPALTFVPVDFEDLSSQMTYNKCVTAFAQEPLDAAIQKISPELFDQYEIFKSREMLLEWSPKNVHKATGLAKLISHLGIDQSQVMACGDEANDLSMIEWAGLGVAMQNAVPEVKAAANVVTPMTNDEEAVAWAIEEYVLKEN

SEQ ID NO: 2503 - DNA, 792 bp, Streptococcus pneumoniae
atgacaattaaactagtagcaacggatatggacggaaccttcctagatgggaatggacgctttgatatggatcgtctcaagtctctcttggtttcctacaaggaaaaagggatttactttgcggtagcttcgggtcggggatttctgtctctagaaaaattatttgctggtgttcgtgatgacattattttcatcgcggaaaatggcagtttggtagagtatcaaggtcaggacttgtatgaagcgactatgtctcgtgacttttatctggcaacttttgaaaagctgaaaacttcaccttatgtagatatcaataaactgctcttgacgggtaagaagggttcatatgttctagatacggttgatgagacctatttgaaagtgagtcagcactataatgaaaatatccaaaaagtagcgagtttggaagatatcacagatgacattttcaaatttacaaccaacttcacagaagaaacgctggaagatggggaggcttgggtaaacgaaaacgttcctggtgttaaggccatgacaactggctttgaatccattgatattgttctggactatgtcgataagggagtggccattgttgaattagttaaaaaacttggtatcacaatggatcaggtcatggcttttggagacaatcttaatgacttacatatgatgcaggttgtgggacatcctgtagctcctgaaaatgcacgacctgaaattttagaattagcaaagactgtgattggtcaccataaggaacggtcggttatagcttatatggagggctta

SEQ ID NO: 2504 - protein, 264 aa, Streptococcus pneumoniae
  Cof family protein; Cellular location: cytoplasm; Similar to strain R6 sequence 15903168 (e-146)
MTIKLVATDMDGTFLDGNGRFDMDRLKSLLVSYKEKGIYFAVASGRGFLSLEKLFAGVRDDIIFIAENGSLVEYQGQDLYEATMSRDFYLATFEKLKTSPYVDINKLLLTGKKGSYVLDTVDETYLKVSQHYNENIQKVASLEDITDDIFKFTTNFTEETLEDGEAWVNENVPGVKAMTTGFESIDIVLDYVDKGVAIVELVKKLGITMDQVMAFGDNLNDLHMMQVVGHPVAPENARPEILELAKTVIGHHKERSVIAYMEGL

SEQ ID NO: 2505 - DNA, 3537 bp, Streptococcus pneumoniae
atgtatttaaaggaaatcgaaattcaggggttcaagtcttttgctgataagaccaaggtcgtttttgaccaaggtgtgacggcagttgttggacccaatggatctggaaagtccaatattacagaaagtctgcgttgggctttgggggagtctagtgtcaagagtctccgtgggggcaagatgccggatatcatctttgctggaaccgaaagtcgcaaaccgctcaattatgcttctgtagttgtgactctggataatcatgacggatttatcaaggatgcaggtcaagaaatcagggtggaacgccatgtctatcgtagtggagatagcgaatacaagattgacggcaagaaagtccgtctgcgtgatattcatgacctcttcttggatactggattgggacgagattccttctctattatttcccaagggaaggttgaggagatttttaattccaagcctgaggaacgacgagctatttttgaagaagctgctggagttttaaaatacaagactcgcagaaaagaaaccgagagtaaactgcagcaaactcaggataatctggaccgcttagaggacattatctacgagttggataatcaaatcaagcctcttgagaagcaagctgagaatgcccgtaagtttttagacttggaaggacaacgtaaggctatttatttagatgttctggttgctcaaatcaaggaaaataaggctgaactagagtcgacagaagaagagttgactcaggttcaagaactcttgatgagttattaccaaaagcgtgaaaaattagaagaagaaaatcaaactcttaaaaagcaacgccaagatttacaggctgaaatggccaaagaccaaggcagtttgatggacttgactagtctgattagtgatttagaaagaaaattagccctatcgaaactggagtccgagcaagtggccttgaatcaacaggaggcacaagcccgtttggctgctttggaggataagagaaattcactcagcaaagaaaagtctgataaagaaagctctttagctctgttagagggaaatctagtccaaaataatcaaaaactcaatcgtttagaagctgaattgctggctttctcagacgatcctgatcagatgattgagctcttacgtgaacgctttgtagctcttttacaagaagaagcggatgtctcaaaccagttgacccgtattgagaatgagttggaaaatagtcgtcagctttctcaaaaacaagcagatcaactagaaaagctgaaagagcaattagctatagctaaagagaaggctagtcagcaaaaggaagagcttgaaactgccaaggagcaggttcagaaattattggctgactaccaagctattgccaaggagcaagaggagcagaaaacttcctatcaagctcaacaaagccaactctttgaccgtctggataatctcaaaaacaagcaggccagagctcaaagtttggaaaatatcctgagaaatcatagtaacttttatgcaggtgttaagagtgttctccaagaaaaagatcgcctaggtgggattattggtgcagtcagtgagcatctgacctttgatgtttattatcaaactgccctagagattgccttaggggcaagtagccagcatatcatcgtagaagatgaagagtcggcaaccaaggctattgacttccttaaacggaacagagccggtcgtgcaacctttcttcctttgaccactatcaaggcgcgtacgatttctagtcagaaccaagatgctatcgctgtaagcccaggtttccttgggatggcagatgagttggtgacttttgatactagactggaagccattttcaagaacttgctagctacgacggctatctttgataccgtagaacatgcgcgtgcagcagctcgccaagttcgttatcaggttcgtatggtgacattggatgggacagagttgcgcacaggtggttcttatgcaggtggtgccaatcgccagaataacagcatttttatcaagccagaactggagcaattacaaaaagaaattgctgaagaagaagcaagcttgggttcagaagaggcgactttgaagaccttgcaagatgagatggccagattgaccgagtcattagaagctattaaatctcaaggagagcaggcacgtattcaggagcaaggcttgttcctcgcttatcagcaaactagtcagcaagttgaagaactggaaactctttggaaactccaagaagaggaaatagatcgtctttccgagggagattggcaagcggataaggaaaactgccaagagcgtcttgctgcaatctccagtgacaagcaaaatctggaagctgagattgaagagattaagtctaacaaaaatgccatccaagaacgctatcaaaacttgcaggaagagctagcgcaagctcgtttgcttaagacagaactgcaagggcaaaaacgttatgaagttgctgatattgaacgcttaggcaaggaattggacaatcttgattttgaacaagaggaaatccagcgccttcttcaagaaaagattgataatcttgagaaggttgatacagaattgctcagtcaacaggcggaagaatccaaaactcaaaaaacaaatctccaacaaggtttgattcgcaagcagtttgagttggatgatattgagggtcaactggatgatattgctagtcatttggatcaggctcgccagcagaatgaagagtggattcgcaagcaaactcgtgctgaagccaagaaagaaaaggttagcgagcgcttgcgccatctacaaagtcaattaacagaccagtaccagatcagctacacagaagctttagaaaaggcgcatgagttggaaaatctcaatctggcagagcaagaagttaaggatttagagaaggctatacgctcactgggtcctgtcaatttagacgctattgaacagtacgaagaagttcacaaccgtctggatttcctaaatagccaacgtgatgatattttgtctgcgaaaaacctgctccttgagaccattacagagatgaatgatgaggtcaaggaacgctttaaatcaacctttgaggtcattcgtgagtcctttaaagtgaccttcaagcagatgtttggtggaggtcaggctgacctcattttgactgaaggagacttgctgacagctggggttgaaatttctgtccaaccaccaggcaagaaaatccagtctcttaatctcatgagtggtggtgaaaaagccctatcggctcttgccttgctcttctccattattcgtgtcaagactattccatttgttatcttggatgaggtggaagctgcgctggatgaagccaatgttaaacgttttggggattacctcaaccgctttgacaaggacagccagttcatcgtcgtaacccaccgtaagggaaccatggcagcggctgattccatctatggagtgaccatgcaagaatcgggtgtttcaaagattgtttcagttaagttaaaagatttagaaagtattgaagga

SEQ ID NO: 2506 - protein, 1179 aa, Streptococcus pneumoniae
  conserved hypothetical protein (); Cellular location: membrane; Feature of note: similar to LF and M prt; Similar to strain R6 sequence 15903169 (0.E+01)
MYLKEIEIQGFKSFADKTKVVFDQGVTAVVGPNGSGKSNITESLRWALGESSVKSLRGGKMPDIIFAGTESRKPLNYASVVVTLDNHDGFIKDAGQEIRVERHVYRSGDSEYKIDGKKVRLRDIHDLFLDTGLGRDSFSIISQGKVEEIFNSKPEERRAIFEEAAGVLKYKTRRKETESKLQQTQDNLDRLEDIIYELDNQIKPLEKQAENARKFLDLEGQRKAIYLDVLVAQIKENKAELESTEEELTQVQELLMSYYQKREKLEEENQTLKKQRQDLQAEMAKDQGSLMDLTSLISDLERKLALSKLESEQVALNQQEAQARLAALEDKRNSLSKEKSDKESSLALLEGNLVQNNQKLNRLEAELLAFSDDPDQMIELLRERFVALLQEEADVSNQLTRIENELENSRQLSQKQADQLEKLKEQLAIAKEKASQQKEELETAKEQVQKLLADYQAIAKEQEEQKTSYQAQQSQLFDRLDNLKNKQARAQSLENILRNHSNFYAGVKSVLQEKDRLGGIIGAVSEHLTFDVYYQTALEIALGASSQHIIVEDEESATKAIDFLKRNRAGRATFLPLTTIKARTISSQNQDAIAVSPGFLGMADELVTFDTRLEAIFKNLLATTAIFDTVEHARAAARQVRYQVRMVTLDGTELRTGGSYAGGANRQNNSIFIKPELEQLQKEIAEEEASLGSEEATLKTLQDEMARLTESLEAIKSQGEQARIQEQGLFLAYQQTSQQVEELETLWKLQEEEIDRLSEGDWQADKENCQERLAAISSDKQNLEAEIEEIKSNKNAIQERYQNLQEELAQARLLKTELQGQKRYEVADIERLGKELDNLDFEQEEIQRLLQEKIDNLEKVDTELLSQQAEESKTQKTNLQQGLIRKQFELDDIEGQLDDIASHLDQARQQNEEWIRKQTRAEAKKEKVSERLRHLQSQLTDQYQISYTEALEKAHELENLNLAEQEVKDLEKAIRSLGPVNLDAIEQYEEVHNRLDFLNSQRDDILSAKNLLLETITEMNDEVKERFKSTFEVIRESFKVTFKQMFGGGQADLILTEGDLLTAGVEISVQPPGKKIQSLNLMSGGEKALSALALLFSIIRVKTIPFVILDEVEAALDEANVKRFGDYLNRFDKDSQFIVVTHRKGTMAAADSIYGVTMQESGVSKIVSVKLKDLESIEG

SEQ ID NO: 2507 - DNA, 696 bp, Streptococcus pneumoniae
atgaaagaattacaaactgtactaaagaatcattttgcaatcgaatttgcagacaaaaagttactggaaactgcctttactcatacgagttatgccaatgagcaccgcctcttaaaaatttcacacaatgaacgcttggaatttttaggagacgctgttctacagttattgatttcagaatatctatataaaaaatatcctaaaaagcctgaaggtgacctatcaaaactccgtgctatgattgtccgtgaggagagtttagctggttttgcgcgtgattgccagtttgaccagtttatcaagttgggtaaaggggaagaaaaatcaggtggtcgcaatcgtgacaccattcttggtgatgcctttgaagcctttcttggtgcccttcttttggataaggatgtggccaaggtcaaggaatttatctatcaagtcatgattcctaaggttgaagcaggcgagtttgagatgattacagactataaaacccatctccaagagttgcttcaggtcaatggtgatgtggctattcgttatcaggtgatttctgaaacagggcctgctcacgataaggtttttgatgtagaagttcttgttgaaggtaagagcatcggtcaaggccaaggtcgttctaagaaattagcagagcaggaagctgccaaaaatgccgttgagaaggggctggattcatgtatt

SEQ ID NO: 2508 - protein, 232 aa, Streptococcus pneumoniae
  ribonuclease III (rnc); Cellular location: cytoplasm; Similar to strain R6 sequence 15903170 (e-129)
MKELQTVLKNHFAIEFADKKLLETAFTHTSYANEHRLLKISHNERLEFLGDAVLQLLISEYLYKKYPKKPEGDLSKLRAMIVREESLAGFARDCQFDQFIKLGKGEEKSGGRNRDTILGDAFEAFLGALLLDKDVAKVKEFIYQVMIPKVEAGEFEMITDYKTHLQELLQVNGDVAIRYQVISETGPAHDKVFDVEVLVEGKSIGQGQGRSKKLAEQEAAKNAVEKGLDSCI

SEQ ID NO: 2509 - DNA, 984 bp, Streptococcus pneumoniae
atgttaaatgaatttccaatttttgattacgaagatattcaattgattccaaataaatgtgtcattaaaagccgtgcagaagcggatacaagtgtcactttaggaaatcacacctttaaactacctgttgtgccagcgaatatgcagacgattttggatgaaaatgtagcagagcaactggctaaaggtggttacttctacattatgcaccgttttgatgaggcaggacgcattccttttattaaacgaatgcacaatcaagggctcattgcttctatctctgtcggtgttaaggattatgagtatgattttgttagccagctcaaggctgatactcctgagtatatcactattgatattgctcatggtcatgcggatagcgtgatttctatgattcaacacatcaagaaagaattgccagatacctttgtcattgctggaaatgtgggaacaccagaagctgtgcgtgaattggaaaatgctggtgcggatgctactaaggtcggaatcggtcctggtaaggtttgtatcaccaaggttaagactggttttggtacaggtggttggcagttggctgctctacgctggtgtgccaaggctgcgcgtaaaccgattatcgctgatggaggaattcgtactcacggtgatattgctaagtctatccgcttcggtgctagcatgatcatgattggttccctctttgcaggacacattgaaagtccagggaaaacgattgaagtcgatggtgaacagttcaaagaatattatggttcagcctcacaatatcaaaaaggtgcttacaaaaatgtggaaggcaaacgtatcttgcttcctgctaaaggtcatctgcaagacactttaactgagatggaacaagaccttcaaagtgctatttcttatgcaggtggacgtcaggttgctgaccttaaacacgttgattatgtgatcgtgaaaaactccatctggaatggggatgcttcccac

SEQ ID NO: 2510 - protein, 328 aa, Streptococcus pneumoniae
  conserved hypothetical protein; Cellular location: cytoplasm; Similar to strain R6 sequence 15903171 (0.E+01)
MLNEFPIFDYEDIQLIPNKCVIKSRAEADTSVTLGNHTFKLPVVPANMQTILDENVAEQLAKGGYFYIMHRFDEAGRIPFIKRMHNQGLIASISVGVKDYEYDFVSQLKADTPEYITIDIAHGHADSVISMIQHIKKELPDTFVIAGNVGTPEAVRELENAGADATKVGIGPGKVCITKVKTGFGTGGWQLAALRWCAKAARKPIIADGGIRTHGDIAKSIRFGASMIMIGSLFAGHIESPGKTIEVDGEQFKEYYGSASQYQKGAYKNVEGKRILLPAKGHLQDTLTEMEQDLQSAISYAGGRQVADLKHVDYVIVKNSIWNGDASH

SEQ ID NO: 2511 - DNA, 1326 bp, Streptococcus pneumoniae
atgaaaacgatgatgcggattactgataatcaacacaagattattaaagaaaaatttgttgaagaatatcctaaactaagcaatcctcttttagacagaaccttggaaagtctatcccaagatgaacgtattttcatttttccaaatgatttgactcatactcctgatttggataaggaccaaaagatttttgaaacagtcaatcagaaaatcaagacagggaacgtgattggttttcttggatatggtcaggaaagattaacgatttcctcacgattttctgatgagagtaatgaccactttttgcattatctcttaaacaaggttcttcatatcaatctcactagtttagatgttgctttgtctcgtgaagagaggctttatcaacttttggtgtatctctttcccaagtatctacaagctgctattcgaaaaggtctttataaggaatatcatcgattttctcataacgacagtcatgttaagggagtgattgatgtaagaaaccatctcaagaaaaatcttcctttcacgggaaatattgcctacgcaacgagagagttcacctatgataatcccctcatgcagttggtccgtcacactattgaatacattaagaatcagaaaagcattggtcaaggggtactagataatctctcaactagtcgtgaaaacgtatctgaaatcgtgcgtgtaacgccctcttataaactagctgatcgtgctaagattattcggggaaatcaatctaaacctatacgtcatgcatactttcacgagtacagaaacttacaagaactttgtctgatgatcctaaaccaagaaaagcacggtttagggtatcaagatcaaaaaatctatggtattctctttgatgttgcctggctttgggaagagtatgtttacaccttgttgccaaaaggttttgtacatcccagaaataaggataagacggatggaatttcagtattttctgttgggaaacgaaaagtatatccagatttttatgacagagaacgaaagattgttctagatgcaaaatataaaaaactggaattgactgaaaaaggaatcaaccgtgaggacttattccagctgatttcctattcttatattttaaaagctgagaaggctggactgatttttcctagtatggagcagtcagtaaatagtgaaataggaaaagtagctggctatggagctcaattgaagaagtggtctattcgaatccctcagaatgcctcattctatagtacattttgtaaaatgatggaaaattcagaagaaaattttaaagcgattattgatgaagaagtggggagaaaa

SEQ ID NO: 2512 - protein, 442 aa, Streptococcus pneumoniae
  conserved domain protein; Cellular location: cytoplasm; Similar to strain R6 sequence 15903172 (0.E+01)
MKTMMRITDNQHKIIKEKFVEEYPKLSNPLLDRTLESLSQDERIFIFPNDLTHTPDLDKDQKIFETVNQKIKTGNVIGFLGYGQERLTISSRFSDESNDHFLHYLLNKVLHINLTSLDVALSREERLYQLLVYLFPKYLQAAIRKGLYKEYHRFSHNDSHVKGVIDVRNHLKKNLPFTGNIAYATREFTYDNPLMQLVRHTIEYIKNQKSIGQGVLDNLSTSRENVSEIVRVTPSYKLADRAKIIRGNQSKPIRHAYFHEYRNLQELCLMILNQEKHGLGYQDQKIYGILFDVAWLWEEYVYTLLPKGFVHPRNKDKTDGISVFSVGKRKVYPDFYDRERKIVLDAKYKKLELTEKGINREDLFQLISYSYILKAEKAGLIFPSMEQSVNSEIGKVAGYGAQLKKWSIRIPQNASFYSTFCKMMENSEENFKAIIDEEVGRK

SEQ ID NO: 2513 - DNA, 117 bp, Streptococcus pneumoniae
atggctccaactcaggataagttttggacaccagttcaattattttatgattttgcagataaggtccaccttgatttgtctgagaaacaaagtggttccaaaattctttctgactat

SEQ ID NO: 2514 - protein, 39 aa, Streptococcus pneumoniae
  hypothetical protein
MAPTQDKFWTPVQLFYDFADKVHLDLSEKQSGSKILSDY

SEQ ID NO: 2515 - DNA, 1932 bp, Streptococcus pneumoniae
ttgatgaataaaagaaaagttagtttagaagatttttataaatggtatagtctaaataaagaagagttattaaataaggcaactgttggtgaaaagtttaatgataaattaaaagaagagtttctccaggaatggcctttggataggattttaacaatgtcaatcgatgaatatgtaataggaaagggacagcaaaataagtctttatgctacgctcttgagaagggaaaatacaaaaatctatttcttggaatttctggtggctcagcttcaaaatttggtatttattggaataaaaaaacaaacaaatataaagatcaagctaataatgagatttcagagttggatcagcgattttcaaaattaaaatcagatttgtatgaaattatcaaagaaggtattcgttttaactttgaaaatcctatttttgatatgaaaagatcaacaaatgaatttattggtcgttctgctatggtgacaaaattactttgtatctatactgagggagatcctttctttggtgtaaatattaatagtcagaaagaattttggaaccactttgtttctcagacaaatcaaggtggaccttatctgcaaaatcataaaataattgaactggtgtccaaaacttatcctgagttggagccatcgaaattaggaactatgctttttgagtattctaagctttttatggaaaataaggaagacaatagtacaatggattcatcaaacaattttcgtcatcaattaactcaatctctattaaagtctccaaacctcatcctccgcggtgctcctggcacgggaaaaacttatcttgctaaagaaattgctaaagaattaacggatggcaacgaagatcaaatcggatttgtacaatttcacccatcatatgattatacggattttgtagaaggtttaagaccagtatcaaatggggatggagctattgagtttaggctacaggacggtatttttaaagatttttgtcagaaagcaaaagaaacccaattgattggaggacaagataattttgatgaggcttgggattcttacttagaatatataaatgttgctgaagaaaaagaatatataacaaaaacatcttacttatctgttaatagtagacaaaatttgtcagtaaattatgatagtggtgttccaggatggtcactacctagcaaatatgtttacgagttgtataaagataaaaattataataagcaagaatactacaaaagtggtggaaaaactgtcctagaaacattgagaaagagatttggtttgaaagactatgtttccccaacagaaattgatactgataagaattttgtcttcatcatcgatgagatcaatcgtggggagatttctaagatttttggcgaactctttttctctatcgaccccggctatcgtggtgaaaaaggaagtgtttctacccaatatgcaaatctacacgaaactgatgaaaagttctatatccccgaaaatgtttacatcatcggaactatgaatgatattgatcgttcagtggatacctttgattttgctatgcgtcgtcgttttcgttttgttgaagttactgtcgagggtcaagctggcatgttggataaagagttgaatatccatgcagaagaagcaaaaattcgtctaagaaacttgaacgctgctatcgaaaatattcaggaattaaacagtcattatcatattggaccaagttattttcttaagttgaaggatgtagattttgactatgaattactctggtctgattatattaagcctctcctagaagactacttgcgaggttcttatgatgaggttgaaactttggaaactttgaaaaaagcatttgatctgacaaataatgagcaaaaagatcaggcagtagctgatgacaatgaaggcgatgaaaacgatgatgcggattac

SEQ ID NO: 2516 - protein, 644 aa, Streptococcus pneumoniae
  endonuclease, putative; Cellular location: cytoplasm; Similar to strain R6 sequence 15903173 (0.E+01)
MMNKRKVSLEDFYKWYSLNKEELLNKATVGEKFNDKLKEEFLQEWPLDRILTMSIDEYVIGKGQQNKSLCYALEKGKYKNLFLGISGGSASKFGIYWNKKTNKYKDQANNEISELDQRFSKLKSDLYEIIKEGIRFNFENPIFDMKRSTNEFIGRSAMVTKLLCIYTEGDPFFGVNINSQKEFWNHFVSQTNQGGPYLQNHKIIELVSKTYPELEPSKLGTMLFEYSKLFMENKEDNSTMDSSNNFRHQLTQSLLKSPNLILRGAPGTGKTYLAKEIAKELTDGNEDQIGFVQFHPSYDYTDFVEGLRPVSNGDGAIEFRLQDGIFKDFCQKAKETQLIGGQDNFDEAWDSYLEYINVAEEKEYITKTSYLSVNSRQNLSVNYDSGVPGWSLPSKYVYELYKDKNYNKQEYYKSGGKTVLETLRKRFGLKDYVSPTEIDTDKNFVFIIDEINRGEISKIFGELFFSIDPGYRGEKGSVSTQYANLHETDEKFYIPENVYIIGTMNDIDRSVDTFDFAMRRRFRFVEVTVEGQAGMLDKELNIHAEEAKIRLRNLNAAIENIQELNSHYHIGPSYFLKLKDVDFDYELLWSDYIKPLLEDYLRGSYDEVETLETLKKAFDLTNNEQKDQAVADDNEGDENDDADY

SEQ ID NO: 2517 - DNA, 168 bp, Streptococcus pneumoniae
atggtgtctatggtcgataaggacggcaaactcatcccagaacaaggaggagcacgttcaacttcaccagctccagttgtgatccgtaaagggcttgacattgataaaatcatgatgcacctgtcagatacttttaactcatgggactaccgtcaggttgagtattat

SEQ ID NO: 2518 - protein, 56 aa, Streptococcus pneumoniae
  hypothetical protein; Cellular location: cytoplasm; Similar to strain R6 sequence 15903174 (4.E-29)
MVSMVDKDGKLIPEQGGARSTSPAPVVIRKGLDIDKIMMHLSDTFNSWDYRQVEYY

SEQ ID NO: 2519 - DNA, 90 bp, Streptococcus pneumoniae
ttggctgccaagctttgggaagaaggtaaaatggtctacgcctcatctgcttcaatgacaaaacgattgaaactcgctatgagcaaggtg

SEQ ID NO: 2520 - protein, 30 aa, Streptococcus pneumoniae
  hypothetical protein; Cellular location: cytoplasm; Similar to strain R6 sequence 15903175 (3.E-09)
MAAKLWEEGKMVYASSASMTKRLKLAMSKV

SEQ ID NO: 2521 - DNA, 141 bp, Streptococcus pneumoniae
atgaccagtgacaaggcaggacttgagcgtaagttcgcagccaaagaacgtaagcgtaacaaaccaggtgttgttctctgcggtagcatggatgaactttgcgctttagcgcaactcaacccagaaattgaagcattctac

SEQ ID NO: 2522 - protein, 47 aa, Streptococcus pneumoniae
  hypothetical protein; Cellular location: cytoplasm
MTSDKAGLERKFAAKERKRNKPGVVLCGSMDELCALAQLNPEIEAFY

SEQ ID NO: 2523 - DNA, 357 bp, Streptococcus pneumoniae
atggcagggtcttcgagggaatacgctgcttgggctctagcggactatggttttaaggtcgtgattgcaggatctttcggtgacattcattacaataatgaactcaataatggcatgttgccaatcgttcagcctagagaggttagagagaaactagcccagctaaaaccaaccgaccaggtaactgtggacttggaacaacaaaaaatcatctcaccagttgaagaattcaccttcgagatagatagcgagtggaaacataaactcctaaatagtttggatgatatcggtattaccttgcagtatgaagagttgattgctgcttatgaaaaacaacgaccagcctactggcaggat

SEQ ID NO: 2524 - protein, 119 aa, Streptococcus pneumoniae
  3-isopropylmalate dehydratase, small subunit, putative; Cellular location: cytoplasm; Similar to strain R6 sequence 15903176 (5.E-65)
MAGSSREYAAWALADYGFKVVIAGSFGDIHYNNELNNGMLPIVQPREVREKLAQLKPTDQVTVDLEQQKIISPVEEFTFEIDSEWKHKLLNSLDDIGITLQYEELIAAYEKQRPAYWQD

SEQ ID NO: 2525 - DNA, 267 bp, Streptococcus pneumoniae
atgaagttagacgaaaaaattactctagtccttttgatttggaatgtcatcattttcttgatttatggtattgacaaatctaaggcaaggagaagagtttggcgcatccctgagaaaatcttacttattttagcctttacttttggtggttttggtgcctggctagcaggaatcatctttcaccacaagactcgaaaatggtactttaaaatagtttggtttcttgggatggtgaccacactagtagccttatattttatttggagg

SEQ ID NO: 2526 - protein, 89 aa, Streptococcus pneumoniae
  conserved hypothetical protein; Cellular location: membrane; Similar to strain R6 sequence 15903177 (3.E-45)
MKLDEKITLVLLIWNVIIFLIYGIDKSKARRRVWRIPEKILLILAFTFGGFGAWLAGIIFHHKTRKWYFKIVWFLGMVTTLVALYFIWR

SEQ ID NO: 2527 - DNA, 789 bp, Streptococcus pneumoniae
gtggttcgccctgaacaaggcctgatggctctccgtaaggaactcaatctttacgctaatattcgtcctgtaaaaatctttgacagtctcaagcatttgtcaccactcaaactggaacgaattgctggtgtagactttgtcgtggtgcgtgaattgacaggcgggatttactttggatatcatattcttgaagagcgcaatgcgcgtgatatcaacgactatagctatgaggaagtggagcggattattcgcaaagcctttgaaattgcaagaaatcgcagaaaaatcgttactagtatcgataagcaaaatgttctagcgacctcaaaactctggcggaaagtagctgaggaagtcgcacaggatttcccagatgtaaccttggaacatcagctggtagactcagctgctatgcttatgattaccaatcctgctaagtttgatgttattgtaacggagaatctttttggagatattttatctgatgaatcaagcgtcttatctggtacacttggggttatgccatcagccagtcattctgaaaatggaccaagtctctatgaacctattcacggttcagcacctgatattgcaggtcaaggaattgccaatcctatttccatgattttatcagtttccatgatgttgagagatagtttcggacgttatgaggatgcagagcgtatcaaacgtgctgttgagacaagtctggcggcaggaattttaacgagagatataggaggtcaggcttcaacaaaggaaatgacggaagctattattgcaaggtta

SEQ ID NO: 2528 - protein, 263 aa, Streptococcus pneumoniae
  3-isopropylmalate dehydrogenase (ec 1.1.1.85) (beta-ipm dehydrogenase)
MVRPEQGLMALRKELNLYANIRPVKIFDSLKHLSPLKLERIAGVDFVVVRELTGGIYFGYHILEERNARDINDYSYEEVERIIRKAFEIARNRRKIVTSIDKQNVLATSKLWRKVAEEVAQDFPDVTLEHQLVDSAAMLMITNPAKFDVIVTENLFGDILSDESSVLSGTLGVMPSASHSENGPSLYEPIHGSAPDIAGQGIANPISMILSVSMMLRDSFGRYEDAERIKRAVETSLAAGILTRDIGGQASTKEMTEAIIARL

SEQ ID NO: 2529 - DNA, 1035 bp, Streptococcus pneumoniae
atggcaaagaaaatagtagctctagcaggagacggaattggcccagaaatcatggaggttggtttagaagttctggaggctctagctgaaaaaacaggttttgactatgagattgacagacgaccgttcggaggtgcagatattgatgcagcatgacctcccttacctgatgaaacccttaaggcaagtagggaagcagatgctatcctactagtagctatcggtagtcctcagtatgatggagcagtggttcgccctgaacaaggcctgatggctctccgtaaggaactcaatctttacgctaatattcgtcctgtaaaaatctttgacagtctcaagcatttgtcaccactcaaactggaacgaattgctggtgtagactttgtcgtggtgcgtgaattgacaggcgggatttactttggatatcatattcttgaagagcgcaatgcgcgtgatatcaacgactatagctatgaggaagtggagcggattattcgcaaagcctttgaaattgcaagaaatcgcagaaaaatcgttactagtatcgataagcaaaatgttctagcgacctcaaaactctggcggaaagtagctgaggaagtcgcacaggatttcccagatgtaaccttggaacatcagctggtagactcagctgctatgcttatgattaccaatcctgctaagtttgatgttattgtaacggagaatctttttggagatattttatctgatgaatcaagcgtcttatctggtacacttggggttatgccatcagccagtcattctgaaaatggaccaagtctctatgaacctattcacggttcagcacctgatattgcaggtcaaggaattgccaatcctatttccatgattttatcagtttccatgatgttgagagatagtttcggacgttatgaggatgcagagcgtatcaaacgtgctgttgagacaagtctggcggcaggaattttaacgagagatataggaggtcaggcttcaacaaaggaaatgacggaagctattattgcaaggtta

SEQ ID NO: 2530 - protein, 51 aa, Streptococcus pneumoniae
  3-isopropylmalate dehydrogenase POINT MUTATION (leuB)
MAKKIVALAGDGIGPEIMEVGLEVLEALAEKTGFDYEIDRRPFGGADIDAA

SEQ ID NO: 2531 - DNA, 1092 bp, Streptococcus pneumoniae
atgaactttcaattagctaaatattctttactgaagagatttttagaaaatataggatttaccacactagaggaatatggtgccatcttcaaatacctgattgagaatgtcaagacggatcgtcagatcatctattcgcctcactgtcatgatgacctcggaatggcagtggcaaatagccttgctgctgtcaagaatggtgcaggacgtgttgaagggactatcaatggtattagggagcgagctgaaaatgctgctttggaagaaattgcagtggctctcaatattcgccaagattactaccaagtagaaaccagtattgtcctaaatgagaccatcaatacgtcagaaatggtttctcgcttctctggtattccagttcctaaaaacaaagccgtcgttggtggcaataccttctcccacgaatctggtattcaccaagatggagtccttaaaaatcctctcacttatgagatcatcacacctgaattggttggtgttaagattctgcttggaaaattatctggtcgccatgcttttgttgagaaactgagagaattggccctagattttacagaagaggatatcaaaccactctttgctaagttcaaggcactggtcgataagaagcaagaaatcacagatgcagatattcgagctttggtagctggaaccatggttgaaaatccagaaggcttccactttgatgatttacaacttcaaactcatgcagataatgacattgaagcgctcgttagcctagccaatatggatggtgagaaagtcgaatttaatgcgacagggcaaggttccgttgaagcaatctttaatgctatcgataagttctttaaccaatctgttcgtttggtgtcctacactatcgatgcggtaacagatggaatcgatacccaggatcgggttttggtcactgttgaaaacagagatacagaaaccatctttaatgcagcagggcttgattttgatgtgttgaaggcttctgctattgtctatataaacgctaatacctttgttcaaaaagagaatgcaggtgagatgggacgcagtgtttcttaccacgatatgcctagtgtg

SEQ ID NO: 2532 - protein, 364 aa, Streptococcus pneumoniae
  2-isopropylmalate synthase, putative; Cellular location: cytoplasm; Similar to strain R6 sequence 15903180 (e-112)
MNFQLAKYSLLKRFLENIGFTTLEEYGAIFKYLIENVKTDRQIIYSPHCHDDLGMAVANSLAAVKNGAGRVEGTINGIRERAENAALEEIAVALNIRQDYYQVETSIVLNETINTSEMVSRFSGIPVPKNKAVVGGNTFSHESGIHQDGVLKNPLTYEIITPELVGVKILLGKLSGRHAFVEKLRELALDFTEEDIKPLFAKFKALVDKKQEITDADIRALVAGTMVENPEGFHFDDLQLQTHADNDIEALVSLANMDGEKVEFNATGQGSVEAIFNAIDKFFNQSVRLVSYTIDAVTDGIDTQDRVLVTVENRDTETIFNAAGLDFDVLKASAIVYINANTFVQKENAGEMGRSVSYHDMPSV

SEQ ID NO: 2533 - DNA, 333 bp, Streptococcus pneumoniae
atgactcaagttcaggaaaagtatggaaaccagttggagtatctgtgggaaaaatcgcctgatacagctgtattgcgccatgaaggcaatcaaaagtggtatgccgtcttgatgaaaatctcttggaataagctggaaaagggcagagaaggacaagtggaagcagtcaacctcaagcatgaccaagtagctaatttgctttcacaaaaggggatttatccagccttccatatgagcaagcgctactggattagtgtgtcccttgatgatactttatcagatgaagaagtactggaattgatagaaaaaagttggaacttaacctctaaaaaa

SEQ ID NO: 2534 - protein, 111 aa, Streptococcus pneumoniae
  conserved hypothetical protein; Cellular location: cytoplasm; Similar to strain R6 sequence 15903181 (2.E-62)
MTQVQEKYGNQLEYLWEKSPDTAVLRHEGNQKWYAVLMKISWNKLEKGREGQVEAVNLKHDQVANLLSQKGIYPAFHMSKRYWISVSLDDTLSDEEVLELIEKSWNLTSKK

SEQ ID NO: 2535 - DNA, 630 bp, Streptococcus pneumoniae
atgatttacgaattttgtgctgaaaatgtgactttacttgaaaaagcgatgcaggctggagctcgtcggattgaactctgtgataatctagcagttggtgggacaacacccagctatggagtgactaaggcagcggttgaactggcagctaactacgatacaaccatcatgaccatgattcggccacgtggtggtgactttgtctataatgacctagaaattgctatcatgctagaagacattcgtttgactgctcaggctggaagtcaaggggttgtatttggagctttaactgctgataaaaagttggataagcctaatctggaaaagttaattgctgcatcaaaaggaatggaaattgtctttcacatggcctttgatgaactaagtgatgaagatcaagcggaagctattgactggctcagtcaagccggtgtcactcgtatcctaactcgtgctggtgtgtctggcgactccttagaaaaacgttttgttcactatcacagaattttggagtacgctaaaggtaaaattgaaattctaccaggtggggggattgaccttgaaaaccgtcaaacctttatcgaccaggtgggggtaacacaattgcatggtactaaggttgttttt

SEQ ID NO: 2536 - protein, 210 aa, Streptococcus pneumoniae
  copper homeostasis protein CutC (cutC); Cellular location: cytoplasm; Similar to strain R6 sequence 15903182 (e-116)
MIYEFCAENVTLLEKAMQAGARRIELCDNLAVGGTTPSYGVTKAAVELAANYDTTIMTMIRPRGGDFVYNDLEIAIMLEDIRLTAQAGSQGVVFGALTADKKLDKPNLEKLIAASKGMEIVFHMAFDELSDEDQAEAIDWLSQAGVTRILTRAGVSGDSLEKRFVHYHRILEYAKGKIEILPGGGIDLENRQTFIDQVGVTQLHGTKVVF

SEQ ID NO: 2537 - DNA, 357 bp, Streptococcus pneumoniae
atgcgtattatctatctaattattggttttttatcgctgaccttggctattgttggggttgttttacccttgttgcctacaacacctttccttttgttgtctattgcttgtttctccagaagttccaagcgattcgaagattggctttatcataccaagctctatcaagcatatgtagctgattttcgtgagaccaagtctattgcgcgtgaacgaaagaaaaaaatcatcgtctctatctacgtcttgatgggaatttctatttattttgcacctcttttaccagtcaaaatcggtctgggtgctttgaccatctttattacttattatctcttcaaggtcattccagacaaagaa

SEQ ID NO: 2538 - protein, 119 aa, Streptococcus pneumoniae
  conserved hypothetical protein; Cellular location: membrane; Similar to strain R6 sequence 15903183 (1.E-61)
MRIIYLIIGFLSLTLAIVGVVLPLLPTTPFLLLSIACFSRSSKRFEDWLYHTKLYQAYVADFRETKSIARERKKKIIVSIYVLMGISIYFAPLLPVKIGLGALTIFITYYLFKVIPDKE

SEQ ID NO: 2539 - DNA, 1254 bp, Streptococcus pneumoniae
atggaacaattacattttatcacaaaattactagacattaaagaccctaatatccagattttagacatcatcaataaggatacacacaaggaaatcatcgccaaactggactacgacgccccatcttgccctgagtgcggaaaccaattgaagaaatatgactttcaaaaaccttctaaaattccttatcttgaaacgactggtatgcctactagaattctccttagaaagcgtcgattcaagtgctatcactgttcaaaaatgatggtcgctgaaacttctatcgtcaagaagaatcaccaaatccctcgtatcatcaaccaaaaaattgctcaaaagttaattgaaaagatttctatgactgatattgcccatcagctttccatctcaacttcaactgttattcgtaagctcaatgactttcactttaaacatgatttttcttgtcttcctgagattatgtcttgggatgagtatgcttttacaaagggaaagatgagcttcattgcgcaagattttaacaatctcaatatcatcactgttcttgagggaagaacacaagctatcattcgaaatcactttcttaaatatgatagagccgtccgatgtcgcgtcaaaattattactatggatatgtttagtccttactatgacttagctagacaacttttcccatgtgctaaaatcgtgttggatcgctttcacattgtacaacatcttagccgtgctatgagtcgtgtgcgtgttcaaatcatgaatcaattggatcgaaagtctcatgaatacaaggctatcaagcgctactggaagctcatacaacaggatagtcgtaaactcagcgataaacatttttatcgccctacttttcgtatgcatttaaccaataaagagattttaaacaagcttttgagctattcacaagacttgaaacatcactatcagctctatcaactcttgctgtttcactttcagaataaggaaccggagaaatttttcggactcattgaggacaatctaaagcaggttcatcctctttttcagactgtctttaaaacctttctaaaggacaaagagaaaatcgtcaacgcccttcaactacactattctaacgccaaattggaagcgaccaataatctcatcaaacttatcaagcgcaatgcctttggttttcggaactttgaaaacttcaaaaaacggatttttatcgctctgaatatcaaaaaagaaaggacaaaatttgtcctttctcgagct

SEQ ID NO: 2540 - protein, 418 aa, Streptococcus pneumoniae
  IS1167, transposase; Cellular location: cytoplasm; Similar to strain R6 sequence 15903763 (0.E+01)
MEQLHFITKLLDIKDPNIQILDIINKDTHKEIIAKLDYDAPSCPECGNQLKKYDFQKPSKIPYLETTGMPTRILLRKRRFKCYHCSKMMVAETSIVKKNHQIPRIINQKIAQKLIEKISMTDIAHQLSISTSTVIRKLNDFHFKHDFSCLPEIMSWDEYAFTKGKMSFIAQDFNNLNIITVLEGRTQAIIRNHFLKYDRAVRCRVKIITMDMFSPYYDLARQLFPCAKIVLDRFHIVQHLSRAMSRVRVQIMNQLDRKSHEYKAIKRYWKLIQQDSRKLSDKHFYRPTFRMHLTNKEILNKLLSYSQDLKHHYQLYQLLLFHFQNKEPEKFFGLIEDNLKQVHPLFQTVFKTFLKDKEKIVNALQLHYSNAKLEATNNLIKLIKRNAFGFRNFENFKKRIFIALNIKKERTKFVLSRA

SEQ ID NO: 2541 - DNA, 2115 bp, Streptococcus pneumoniae
ttgaaaaggtgtgatactgtggctacggcaacaaaaaagaaaaaatcaacagttaaaaaaaatctagtcatcgtggagtcgcctgctaaggccaagacgattgaaaaatatctaggcagaaactacaaggttttagccagtgtcgggcatatccgtgatttgaagaaatccagtatgtccgtcgatattgaaaataattatgaaccgcaatatattaatatccgaggaaaaggccctcttatcaatgacttgaaaaaagaagctaaaaaagctaataaagtttttctcgcgagtgacccggaccgtgaaggagaagcgatttcttggcatttggcccatattctcaacttggatgaaaatgatgccaaccgtgtggtcttcaatgaaatcaccaaggatgcagtcaaaaatgcttttaaagaacctcgtaagatcgatatggacttggtcgatgcccaacaagctcgtcggatcttggatcgcttggtagggtattcgatttcgcctattttgtggaagaaggtcaagaagggcttgtcagcaggtcgcgttcagtccattgcccttaaactcatcattgaccgtgaaaatgaaatcaatgccttccagccagaagaatactggacagttgatgctgtctttaaaaagggaaccaaacaatttcatgcttccttctatggagtagatggtaaaaagatgaaactgaccagcaataacgaagtcaaggaagtcttgtctcgtctgacgagtaaagacttttcagtagatcaggtggataagaaagagcgcaagcgcaatgctcctttaccctataccacttcatctatgcagatggatgctgccaataaaatcaatttccgtactcgaaaaaccatgatggttgcccaacagctctatgaaggaattaatatcggttctggtgttcaaggtttgattacctatatgcgtaccgattcgactcgtatcagtcctgtagcgcaaaatgaggcggcaagcttcattacggatcgttttggtagcaagtattctaagcacggtagcaaggtcaaaaacgcatcaggtgctcaggatgcccatgaggctattcgtccgtcaagtgtctttaatacaccagaaagcatcgctaagtatctggacaaggatcagcttaagctatatacccttatctggaatcgttttgtggctagccagatgacagcggccgtttttgataccatggctgttaaattgtctcaaaaaggggttcaatttgctgccaatggtagtcaggttaagtttgatggttatcttgccatttataatgattctgacaagaataagatgttaccggacatggttgttggagatgtggtcaaacaggtcaatagcaaaccagagcaacatttcacccaaccgcctgcccgttattctgaagcaacactgattaaaaccttagaggaaaatggggttggacgtccatcaacctacgcgccaaccattgaaaccattcagaaacgttattatgttcgcctggcagccaaacgttttgaaccgacagagttgggagaaattgtcaataagctcatcgttgaatatttcccagatatcgtaaacgtgaccttcacagctgaaatggaaggtaaactggatgatgtcgaagttggaaaagagcagtggcgacgggtcattgatgccttttacaaaccattctctaaagaagttgccaaggctgaagaagaaatggaaaaaatccagattaaggatgaaccagctggatttgactgtgaagtgtgtggcagtccaatggtcattaaacttggtcgttttggtaaattctacgcttgtagcaatttcccagattgccgtcatacccaagcaatcgtgaaagagattggtgttgagtgtccaagctgtcatcagggacaaattattgagcgaaaaaccaagcgtaatcgcctattctatggttgcaatcgctatccagaatgtgaatttacctcttgggacaagcctgttggtcgtgactgtccaaaatgtggcaacttcctcatggagaaaaaagtccgtggtggtggcaagcaggttgtttgtagcaaaggcgactacgaggaagaaaagatggctctttgtcaactg

SEQ ID NO: 2542 - protein, 705 aa, Streptococcus pneumoniae
  DNA topoisomerase I (topA); Cellular location: cytoplasm; Similar to strain R6 sequence 15903580 (8.E-38)
MKRCDTVATATKKKKSTVKKNLVIVESPAKAKTIEKYLGRNYKVLASVGHIRDLKKSSMSVDIENNYEPQYINIRGKGPLINDLKKEAKKANKVFLASDPDREGEAISWHLAHILNLDENDANRVVFNEITKDAVKNAFKEPRKIDMDLVDAQQARRILDRLVGYSISPILWKKVKKGLSAGRVQSIALKLIIDRENEINAFQPEEYWTVDAVFKKGTKQFHASFYGVDGKKMKLTSNNEVKEVLSRLTSKDFSVDQVDKKERKRNAPLPYTTSSMQMDAANKINFRTRKTMMVAQQLYEGINIGSGVQGLITYMRTDSTRISPVAQNEAASFITDRFGSKYSKHGSKVKNASGAQDAHEAIRPSSVFNTPESIAKYLDKDQLKLYTLIWNRFVASQMTAAVFDTMAVKLSQKGVQFAANGSQVKFDGYLAIYNDSDKNKMLPDMVVGDVVKQVNSKPEQHFTQPPARYSEATLIKTLEENGVGRPSTYAPTIETIQKRYYVRLAAKRFEPTELGEIVNKLIVEYFPDIVNVTFTAEMEGKLDDVEVGKEQWRRVIDAFYKPFSKEVAKAEEEMEKIQIKDEPAGFDCEVCGSPMVIKLGRFGKFYACSNFPDCRHTQAIVKEIGVECPSCHQGQIIERKTKRNRLFYGCNRYPECEFTSWDKPVGRDCPKCGNFLMEKKVRGGGKQVVCSKGDYEEEKMALCQL

SEQ ID NO: 2543 - DNA, 1041 bp, Streptococcus pneumoniae
gtgacaaataataaactgtattcgttgatagaatttagaaataaaatatatgaagaattagaactttccagaagtgatttagcgattttactatgtgccatgcttatcgcctctatcggattaaatatggattcgactcccgtgattattggagccatgttaatctctcctttgatgacacctattctgggagtggggctctctctagctatatttgattttaaattgttaagaaaatcttttaaaatattagctattcaaattcttgccagtctaatagcttcaacactttatttttatctttctcccatttcgtatgctagttcggagattgttgctagaacctctccgactatttgggatgttctcattgcttttgtaggagggatagcaggtatcattggtgctaggaaaaaagagaccaataatattgttcctggtgttgctattgcaaccgccttgatgcctcctctttgtacagtaggttatgctattgcttctgctaatctaaaatttatcataggctcctcttacctattcctcatcaattgtagctttattgtcattgcgacttatataggtgttaggttgatgatggttaagaaacattattttaaagataatgaagaagactctaaaatgcgtaggattttgcttctagttgctgttttgctgatgattccgagtttcatctctgcaacgactttagtgagagaaacgttgaaaaaagagtcccttaagaaatttatatcagagcagtttcaggggtataatattttgaaaaaaacctattctaaaaagactcataccctaaagctaaccatttcaggaaattatttgacagaagaagaactcgatatgatttcaagtaagagaggtgactatggtttaagtgatgtttctgttcaagtttcacaattgtctgattcagaacaacttagtaaggaagagctggtggagtatttcttccagtatatcaaggataaggaagcaaaagaaaaggagaaagccaataaatttgatacagagtctgaggagcaa

SEQ ID NO: 2544 - protein, 347 aa, Streptococcus pneumoniae
  conserved domain protein; Cellular location: membrane; Feature of note: RGD motif; Similar to strain R6 sequence 15903185 (0.E+01)
MTNNKLYSLIEFRNKIYEELELSRSDLAILLCAMLIASIGLNMDSTPVIIGAMLISPLMTPILGVGLSLAIFDFKLLRKSFKILAIQILASLIASTLYFYLSPISYASSEIVARTSPTIWDVLIAFVGGIAGIIGARKKETNNIVPGVAIATALMPPLCTVGYAIASANLKFIIGSSYLFLINCSFIVIATYIGVRLMMVKKHYFKDNEEDSKMRRILLLVAVLLMIPSFISATTLVRETLKKESLKKFISEQFQGYNILKKTYSKKTHTLKLTISGNYLTEEELDMISSKRGDYGLSDVSVQVSQLSDSEQLSKEELVEYFFQYIKDKEAKEKEKANKFDTESEEQ

SEQ ID NO: 2545 - DNA, 174 bp, Streptococcus pneumoniae
atgatacttttcgaaaatctcttcaaatacgtcagctcagctttgccttgctgtgttttgagcaagctacggttagcttccgagtttgattttcatttactagaaatgaaactgatgagagatatcagtagacatttgagtcaggatattatggaaaatgataaaaagagctcg

SEQ ID NO: 2546 - protein, 58 aa, Streptococcus pneumoniae
  box element
MILFENLFKYVSSALPCCVLSKLRLASEFDFHLLEMKLMRDISRHLSQDIMENDKKSS

SEQ ID NO: 2547 - DNA, 108 bp, Streptococcus pneumoniae
ttgaagagattttcgaaaagtatcatcatctatttcagaccattttttataataaccattttatttttatttgtcaaggtctttgaattctttcttaaacaagccttg

SEQ ID NO: 2548 - protein, 36 aa, Streptococcus pneumoniae
  box element
MKRFSKSIIIYFRPFFIITILFLFVKVFEFFLKQAL

SEQ ID NO: 2549 - DNA, 117 bp, Streptococcus pneumoniae
ttgtcagtaaggaaaaataaattcttcaaaagtagagattacaaggcttgtttaagaaagaattcaaagaccttgacaaataaaaataaaatggttattataaaaaatggtctgaaa

SEQ ID NO: 2550 - protein, 39 aa, Streptococcus pneumoniae
  hypothetical protein; Cellular location: cytoplasm; Similar to strain R6 sequence 15903186 (1.E-15)
MSVRKNKFFKSRDYKACLRKNSKTLTNKNKMVIIKNGLK

SEQ ID NO: 2551 - DNA, 858 bp, Streptococcus pneumoniae
atggagttatttatgaaaatcacaaactatgaaatctataagttaaaaaaatcaggtttgaccaatcaacagattttgaaagtgctagaatacggtgaaaatgttgatcaggagcttttgttgggtgatattgcagatatctcaggttgccgtaatccagccgtttttatggaacgttattttcagatagacgatgcgcatttgtcgaaagagtttcaaaaatttccatctttctctattttagatgactgttatccttgggatttgagtgaaatatatgatgcgcctgtacttttattttacaagggaaatcttgacctcctgaaattcccgaaggtagcggtcgtgggcagtcgtgcttgtagcaaacagggagctaagtcagttgaaaaagtcattcaaggcttggaaaatgaactggttattgtcagtggtctggccaagggcattgacacagcagctcatatggcagctcttcagaatggcggaaaaaccattgcagtgattggaacaggactggatgtgttttatcctaaagccaataaacgcttgcaagactacatcggcaatgaccatctggttctaagtgaatatggacctggtgaacaacctctgaaatttcattttcctgcccgtaatcgcatcattgctggactttgtcgtggtgtgattgtagcagaggctaagatgcgttcaggtagtctcattacgtgtgagcgagcaatggaagaaggacgcgatgtctttgctattcctggtagcattttagatggactatcagacggttgccatcatttgattcaagaaggagcaaaattggtcaccagtgggcaagatgttcttgcggaatttgaattt

SEQ ID NO: 2552 - protein, 286 aa, Streptococcus pneumoniae
  DNA processing protein DprA, putative; Cellular location: cytoplasm; Similar to strain R6 sequence 15903187 (e-165)
MELFMKITNYEIYKLKKSGLTNQQILKVLEYGENVDQELLLGDIADISGCRNPAVFMERYFQIDDAHLSKEFQKFPSFSILDDCYPWDLSEIYDAPVLLFYKGNLDLLKFPKVAVVGSRACSKQGAKSVEKVIQGLENELVIVSGLAKGIDTAAHMAALQNGGKTIAVIGTGLDVFYPKANKRLQDYIGNDHLVLSEYGPGEQPLKFHFPARNRIIAGLCRGVIVAEAKMRSGSLITCERAMEEGRDVFAIPGSILDGLSDGCHHLIQEGAKLVTSGQDVLAEFEF

SEQ ID NO: 2553 - DNA, 687 bp, Streptococcus pneumoniae
gtgaaagccattatcttagcagcgggattgggaactcgcttgcgtcctatgactgaaaatacccctaaagccttggttcaggttaatcaaaaacctttgattgagtaccaaattgagtttctcaaagaaaaaggaatcaatgacatcatcatcattgttggttatcttaaagaacaattcgattacttgaaagagaaatacggtgttcgtctcgttttcaatgataaatacgctgactacaataacttttactctctctatcttgtaaaagaagaattggccaacagctatgttattgatgctgacaattatctctttaaaaatatgttccgcaatgatttgacacgttcgacttattttagtgtttatcgtgaagattgtaccaacgaatggttcttggtttatggagatgactacaaggttcaagacattattgttgatagcaaggcaggtcgcatccttagtggtgtatccttctgggatgctccaactgcagaaaagattgtcagctttatcgacaaggcttatgtaagtggtgaatttgttgatctctattgggacaatatggttaaggataatatcaaagagctagatgtctatgttgaagaattagaaggcaatagcatttatgagatcgatagtgtccaagactatcgtaaattagaagaaattcttaaaaacgaaaat

SEQ ID NO: 2554 - protein, 229 aa, Streptococcus pneumoniae
  licC protein (licC); Cellular location: outside; Similar to strain R6 sequence 15903188 (e-131)
MKAIILAAGLGTRLRPMTENTPKALVQVNQKPLIEYQIEFLKEKGINDIIIIVGYLKEQFDYLKEKYGVRLVFNDKYADYNNFYSLYLVKEELANSYVIDADNYLFKNMFRNDLTRSTYFSVYREDCTNEWFLVYGDDYKVQDIIVDSKAGRILSGVSFWDAPTAEKIVSFIDKAYVSGEFVDLYWDNMVKDNIKELDVYVEELEGNSIYEIDSVQDYRKLEEILKNEN

SEQ ID NO: 2555 - DNA, 888 bp, Streptococcus pneumoniae
atggaggttcagatgaaaagtaaaaacggagttccttttggccttctctcaggtattttctggggcttgggtctaacggttagtgcttatatcttttcgatttttacagatttgtcaccctttgtggtggctgcaactcatgattttttgagcatctttatcttactagcttttctcttggtaaaagaagggaaagttcgcctctcaattttcttaaatattcgcaatgtcagtgttatcatcggagccttgctagcaggccctatcggtatgcaggccaatctttatgcagttaagtatatcggaagttctttagcttcatctgtatcggctatttaccctgcgatttcagttctattggctttcttctttttgaagcacaagatttcgaaaaatactgtatttgggattgtcttgattattggagggattattgctcagacctataaggttgaacaggttaattctttctacattgggattctttgtgctttggtttgtgctattgcatggggaagtgagagtgttcttagctcttttgccatggaaagtgaattgagtgaaatcgaagccctcttaatccgtcaagtaacttcgttcttgtcctatcttgtgattgtgctcttctctcatcagtcatttactgcagtagccaatggacaattgctaggtctcatgattgtttttgcagcctttgatatgatttcctacttggcttattatatcgctatcaatcgcttgcaaccagccaaggctacaggcttgaacgtgagctatgtagtatggacggtcttgtttgcagttgttttcttgggtgcaccgctagatatgctgaccattatgacgtcacttgtcgtcattgctggagtttatattattattaaagaa

SEQ ID NO: 2556 - protein, 296 aa, Streptococcus pneumoniae
  licB protein (licB); Cellular location: membrane; Similar to strain R6 sequence 15903189 (e-159)
MEVQMKSKNGVPFGLLSGIFWGLGLTVSAYIFSIFTDLSPFVVAATHDFLSIFILLAFLLVKEGKVRLSIFLNIRNVSVIIGALLAGPIGMQANLYAVKYIGSSLASSVSAIYPAISVLLAFFFLKHKISKNTVFGIVLIIGGIIAQTYKVEQVNSFYIGILCALVCAIAWGSESVLSSFAMESELSEIEALLIRQVTSFLSYLVIVLFSHQSFTAVANGQLLGLMIVFAAFDMISYLAYYIAINRLQPAKATGLNVSYVVWTVLFAVVFLGAPLDMLTIMTSLVVIAGVYIIIKE

SEQ ID NO: 2557 - DNA, 867 bp, Streptococcus pneumoniae
gtggagaaaatcattaaagaaaaaatttcttccttacttagtcaagaagaggaagtcctcagtgttgaacaactgggtggaatgaccaatcaaaactatttggccaaaacaacaaataagcaatacattgttaaattctttggtaaagggacagaaaagcttatcaatcgacaagatgaaaagtacaatcttgaactactaaaggatttaggcttagatgtaaaaaattatctttttgatattgaagctggtatcaaagtaaatgagtatatcgaatctgcgattacgcttgattcaacgtcaatcaagaccaagttcgacaaaattactccaatattacaaactattcatacgtctgctaaggaattaagaggagaatttgctccttttgaagaaatcaaaaaatacgaatccttgattgaagaacaaattccttatgccaactatgaatctgttagaaatgcagtcttctccttagagaaaagactggctgacttaggtgttgacagaaaatcttgtcatatcgatttggtgcctgaaaactttatcgaatcacctcaaggacgactttatttgattgactgggaatattcatcaatgaatgatccaatgtgggatttggctgccctctttttagagtctgaattcacttcccaagaggaagaaactttcttatctcactatgagagtgaccaaacaccggtttctcatgaaaagattgctatttataaaattttacaagatactatttggagtctatggactgtctataaggaagagcaaggtgaagattttggtgactatggtgtgaatcgttaccaaagagctattaaaggtttggcttcttatggaggttcagatgaaaag

SEQ ID NO: 2558 - protein, 289 aa, Streptococcus pneumoniae
  choline kinase (pck); Cellular location: cytoplasm; Similar to strain R6 sequence 15903190 (e-151)
MEKIIKEKISSLLSQEEEVLSVEQLGGMTNQNYLAKTTNKQYIVKFFGKGTEKLINRQDEKYNLELLKDLGLDVKNYLFDIEAGIKVNEYIESAITLDSTSIKTKFDKITPILQTIHTSAKELRGEFAPFEEIKKYESLIEEQIPYANYESVRNAVFSLEKRLADLGVDRKSCHIDLVPENFIESPQGRLYLIDWEYSSMNDPMWDLAALFLESEFTSQEEETFLSHYESDQTPVSHEKIAIYKILQDTIWSLWTVYKEEQGEDFGDYGVNRYQRAIKGLASYGGSDEK

SEQ ID NO: 2559 - DNA, 1038 bp, Streptococcus pneumoniae
ttgagaaagactagtaaaatgattaatcaaatttatcaactaactaagcctaagtttatcaatgtcaaatatcaggaagaggctattgaccaagagaatcatatccttatccgtcccaactacatggctgtctgtcatgcggatcagcgttactatcagggaaaacgtgatcccaagattttgaataaaaagcttccaatggcaatgattcacgagtcatgtggaaccgtcatttctgacccgaccggaacctacgaggttggtcaaaaagttgtcatgattcccaatcagtctcctatgcagagtgatgaagaattctatgaaaactacatgacagggacccatttcttgtctagtggatttgatggctttatgagagagtttgtttctctccctaaagatcgtgtggtggcttatgatgctattgaagatacggttgcagccattacagagtttgtcagtgtgggcatgcacgctatgaatcgtctattgactcttgctcatagcaagcgggagcggatcgccgttattggagatggaagtttagcttttgtggttgccaatattatcaactatactttgccagaagcagagattgtggttattggtcgtcattgggaaaagttggaactcttctcatttgccaaagaatgctatattacggataatattcctgaagatttggcctttgaccatgcttttgaatgttgtggtggtgatggtactggaccagctattaatgacttgattcgctacattcgtcctcagggaacgattctcatgatgggagttagcgaatataaagtcaatctcaatactcgcgatgccttagaaaagggcttgattttggttgggtcatctcgttctggtcgcattgattttgaaaatgctatccaaatgatggaagtcaagaaatttgccaatcgtcttaaaaatatcctttatctagaagaacctgtaagagaaattaaagatattcatcgtgtctttgcaaccgatttaaacacagcctttaaaacagtgtttaagtgggaagta

SEQ ID NO: 2560 - protein, 346 aa, Streptococcus pneumoniae
  alcohol dehydrogenase, zinc-containing; Cellular location: membrane; Similar to strain R6 sequence 15903191 (0.E+01)
MRKTSKMINQIYQLTKPKFINVKYQEEAIDQENHILIRPNYMAVCHADQRYYQGKRDPKILNKKLPMAMIHESCGTVISDPTGTYEVGQKVVMIPNQSPMQSDEEFYENYMTGTHFLSSGFDGFMREFVSLPKDRVVAYDAIEDTVAAITEFVSVGMHAMNRLLTLAHSKRERIAVIGDGSLAFVVANIINYTLPEAEIVVIGRHWEKLELFSFAKECYITDNIPEDLAFDHAFECCGGDGTGPAINDLIRYIRPQGTILMMGVSEYKVNLNTRDALEKGLILVGSSRSGRIDFENAIQMMEVKKFANRLKNILYLEEPVREIKDIHRVFATDLNTAFKTVFKWEV

SEQ ID NO: 2561 - DNA, 705 bp, Streptococcus pneumoniae
atgatttatgcaggaattcttgccggtggaactggcacacgcatggggatcagtaacttgccaaaacaatttttagagctaggtgatcgacctattttgattcatacaattgaaaaatttgtcttggagccaagtattgaaaaaattgtagttggtgttcatggagactgggtttctcatgcagaagatcttgtagataaatatcttcctctttataaggaacgtatcatcattacaaagggtggtgctgaccgcaatacaagtattaagaacatcattgaagccattgatgcttatcgtccgcttactccagaggatatcgttgttacccacgattctgttcgtccatttattacacttcgcatgattcaggacaatatccaacttgcccaaaatcatgacgcagtggacacagtggtagaagcggttgatactatcgttgaaagtaccaatggtcaatttattacagatattccaaatcgtgctcacctttatcaaggacaaacacctcaaacattccgttgcaaggacttcatggacctttatggatctctttctgatgaagagaaggaaatcttgacagatgcatgtaaaatctttgtgatcaaaggaaaagatgtggctttggccaaaggtgaatactcaaatctgaagattacaaccgtaacagatttgaagattgcaaaaagtatgattgagaaagac

SEQ ID NO: 2562 - protein, 235 aa, Streptococcus pneumoniae
  cytidine diphosphocholine pyrophosphorylase, putative; Cellular location: cytoplasm; Similar to strain R6 sequence 15903192 (e-133)
MIYAGILAGGTGTRMGISNLPKQFLELGDRPILIHTIEKFVLEPSIEKIVVGVHGDWVSHAEDLVDKYLPLYKERIIITKGGADRNTSIKNIIEAIDAYRPLTPEDIVVTHDSVRPFITLRMIQDNIQLAQNHDAVDTVVEAVDTIVESTNGQFITDIPNRAHLYQGQTPQTFRCKDFMDLYGSLSDEEKEILTDACKIFVIKGKDVALAKGEYSNLKITTVTDLKIAKSMIEKD

SEQ ID NO: 2563 - DNA, 1485 bp, Streptococcus pneumoniae
atgaaaagtataaaattaaatgctctatcttacatgggaattcgtgtcttgaatattatttttcccatcctaactggaacctatgtcgcgcgtgtcttggaccgaactgactatggttacttcaactcagtcgacactattttgtcatttttcttgccctttgcaacttatggtgtctataactacggtttaagggctatcagtaatgtcaaggataacaaaaaagatcttaacagaaccttttctagtcttttttatttgtgcatcgcttgtacgattttgaccactgctgtctatatcctagcctatcctctcttctttactgataatccaatcgtcaaaaaggtctaccttgttatggggattcaactcattgcccagattttttcaatcgaatgggtcaatgaagctctggaaaattacagttttctcttttacaaaactgccttcatccgtatcctgatgctggtctctattttcttatttgttaaaaatgaacacgatattgttgtctatacacttgtgatgagtttatcgacgctgattaactacctgattagttatttttggattaaaagagacatcaaacttgttaaaattcacctaagtgattttaaaccactctttctccctctgacagccatgttagtctttgccaatgccaatatgctcttcacttttttagatcgcctcttcctcgttaaaacagggattgatgtcaacgttagttactataccatagctcagcgaattgtgaccgttatagctggggttgtaacaggtgcaattggagtgagtgtgcctcgtctcagttactatctggggaaaggagacaaagaagcctatgtttctctggttaatagaggtagtcgaatctttaacttctttatcattccactgagttttggactcatggttttaggaccaaatgccatcctactttacggtagtgaaaaatatatcggaggcggcatcttgacctctctcttcgcttttcgtacgattatcctggccttagataccattcttggttcccaaattctctttaccaatggctatgaaaaacgtatcacagtctatacagtctttgctgggctactcaatttgggcttgaatagtctcctttttttcaaccatatcgtggctcctgaatactacttactgacaactatgctatcagagacttctctacttgttttctatatcattttcatccatagaaaacaactcatccacttgggacatatctttagctatactgttcgatactctctcttttcactttcctttgtagcaatttatttcctgattaatttcgtgtatcctgtagatatggtcattaatttgccatttttgattaatactggtttgattgtcttgctatcagctatctcttatattagtctacttgtcttcacaaaagatagcattttctatgaatttttaaaccatgtcctagccttaaaaaataaatttaaaaaatca

SEQ ID NO: 2564 - protein, 495 aa, Streptococcus pneumoniae
  polysaccharide biosynthesis protein, putative; Cellular location: membrane; Similar to strain R6 sequence 15903193 (0.E+01)
MKSIKLNALSYMGIRVLNIIFPILTGTYVARVLDRTDYGYFNSVDTILSFFLPFATYGVYNYGLRAISNVKDNKKDLNRTFSSLFYLCIACTILTTAVYILAYPLFFTDNPIVKKVYLVMGIQLIAQIFSIEWVNEALENYSFLFYKTAFIRILMLVSIFLFVKNEHDIVVYTLVMSLSTLINYLISYFWIKRDIKLVKIHLSDFKPLFLPLTAMLVFANANMLFTFLDRLFLVKTGIDVNVSYYTIAQRIVTVIAGVVTGAIGVSVPRLSYYLGKGDKEAYVSLVNRGSRIFNFFIIPLSFGLMVLGPNAILLYGSEKYIGGGILTSLFAFRTIILALDTILGSQILFTNGYEKRITVYTVFAGLLNLGLNSLLFFNHIVAPEYYLLTTMLSETSLLVFYIIFIHRKQLIHLGHIFSYTVRYSLFSLSFVAIYFLINFVYPVDMVINLPFLINTGLIVLLSAISYISLLVFTKDSIFYEFLNHVLALKNKFKKS

SEQ ID NO: 2565 - DNA, 801 bp, Streptococcus pneumoniae
atgaaacaactaaccgttgaagatgccaaacaaattgaattagaaattttggattatattgatactctctgtaaaaagcacaatatcaactatattattaactacggtactctgattggggcggttcgacatgagggctttatcccttgggacgacgatattgatctgtccatgcctagagaagactaccaacgatttattaacatttttcaaaaggaaaaaagcaagtataagctcctatccttagaaactgataagaactactttaacaactttatcaagataaccgacagtacgactaaaattattgatactcgaaatacaaaaacctatgagtctggtatctttatcgatattttccctatagatcgctttgatgatcctaaggtcattgatacttgttataaactggaaagcttcaaactgctgtctttcagtaaacataaaaatattgtctataaggatagccttttaaaagattggatacgaacagccttctggttactccttcgaccggtttctcctcgttattttgcaaataaaatcgagaaagaaattcaaaaatatagtcgtgaaaatgggcaatatatggcttttatcccttcaaaatttaaggaaaaggaagtcttcccaagtggtacctttgataaaacaatcgatttaccctttgagaatttaagccttcctgcacctgaaaaatttgatactattttgacacaattttatggagattatatgaccctaccaccagaagaaaaacgcttctacagtcatgaatttcacgcttataaattggaggat

SEQ ID NO: 2566 - protein, 267 aa, Streptococcus pneumoniae
  licD1 protein (licD1); Cellular location: cytoplasm; Similar to strain R6 sequence 15903194 (e-158)
MKQLTVEDAKQIELEILDYIDTLCKKHNINYIINYGTLIGAVRHEGFIPWDDDIDLSMPREDYQRFINIFQKEKSKYKLLSLETDKNYFNNFIKITDSTTKIIDTRNTKTYESGIFIDIFPIDRFDDPKVIDTCYKLESFKLLSFSKHKNIVYKDSLLKDWIRTAFWLLLRPVSPRYFANKIEKEIQKYSRENGQYMAFIPSKFKEKEVFPSGTFDKTIDLPFENLSLPAPEKFDTILTQFYGDYMTLPPEEKRFYSHEFHAYKLED

SEQ ID NO: 2567 - DNA, 840 bp, Streptococcus pneumoniae
atgaatttcacgcttataaattggaggattaggatgcaatatttagaaaaaaaagaaattaaagaaattcaactagccctgctggactatattgatgagacttgtaagaaacatgatattccttattttctcagttatggaaccatgcttggagccatccgccacaaaggtatgattccttgggatgatgatattgatatttccctttatcgtgaggattatgagcgtttactgaagattattgaagaagaaaatcaccctcgctacaaggttctttcctacgatacatcttcttggtacttccataatttcgcatcgattttggacacttctactgttatagaagaccatgttaagtacaagcgtcatgataccagccttttcatcgatgtcttcccaattgatcgatttacagacttgagcattgtcgacaagagctataagtatgtggctcttcgtcaactagcttatatcaaaaaatcacgagcagttcacggtgatagcaaactaaaagattttcttagattatgtagctggtacgctctccgatttgtcaatcctcgctacttttacaagaaaattgatcaactagtcaaaaatgctgtaaccaacactcctcaatatgaaggaggagttgggatcggtaaggaagggatgaaagaaatcttcccagttgatacctttaaagaactgattttaactgagtttgagggccgtatgttgcctgttcccaaaaaatatgaccaatttttaacccagatgtatggcgattatatgacaccaccatcaaaagaaatgcaagagtggtatagtcatagcattaaagcttatcgcaaaaac

SEQ ID NO: 2568 - protein, 280 aa, Streptococcus pneumoniae
  licD2 protein (licD2); Cellular location: cytoplasm; Similar to strain R6 sequence 15903195 (e-160)
MNFTLINWRIRMQYLEKKEIKEIQLALLDYIDETCKKHDIPYFLSYGTMLGAIRHKGMIPWDDDIDISLYREDYERLLKIIEEENHPRYKVLSYDTSSWYFHNFASILDTSTVIEDHVKYKRHDTSLFIDVFPIDRFTDLSIVDKSYKYVALRQLAYIKKSRAVHGDSKLKDFLRLCSWYALRFVNPRYFYKKIDQLVKNAVTNTPQYEGGVGIGKEGMKEIFPVDTFKELILTEFEGRMLPVPKKYDQFLTQMYGDYMTPPSKEMQEWYSHSIKAYRKN

SEQ ID NO: 2569 - DNA, 3174 bp, Streptococcus pneumoniae
atgcctaaacgtactgatattcaaaaaattatggtgattggttctggtccgattattattggtcaggctgctgagtttgactacgctgggactcaggcttgcttgtcgttgaaagaggaaggttatgaggttgttttggttaactcaaatcctgcaaccatcatgacggacaaggaaattgctgacaaggtttacattgaaccgattacacttgagtttgtgacacgtattcttcgtaaggaaggtccagatgccttgctaccaacactcggtggtcagacaggtctcaacatggccatggaattatctaaaaatggtatcctagacgagcttggcgttgaacttctgggtaccaaattatctgccattgaccaagcggaggaccgtgacctctttaaacaattgatggaagagcttgaacaacccattccagaatctgaaattgttaacacagtagaagaagcagttgcctttgcagcgacaattggctacccagtcatcgttcgtccagcctttacccttggtggtactggtggtggtatgtgtgccaacgagaaagaattgcgtgaaatcactgaaaatggtttgaaattgtcacctgttacccaatgtttgattgagcgttcgattgccggtttcaaggaaattgaatacgaagtgatgcgtgactcagctgacaatgccttggttgtttgtaacatggaaaactttgacccagttgggattcacacaggggattccattgtatttgcccctgcgcaaaccatgtcagactatgaaaaccaaatgcttcgtgatgcgagcttgagcattattcgtgccctcaagattgaaggtggatgtaatgttcagctagctcttgatcctaacagcttcaagtattatgttatcgaagtaaaccctcgtgtatcacgttcgtcagcccttgcttctaaagcgacaggatatccgattgctaagttggctgccaagattgcagtaggtttgaccttggatgaggttataaacccagttacaggttcaacctatgccatgtttgaaccagcccttgactacgtagttgctaagattccacgtttcccatttgacaagtttgaaaagggtgaacgccgtctcggtacacaaatgaaggcgactggagaagtcatggcaatcggtcgtaacatcgaggaatctcttctcaaggcctgccgctcccttgaaattggggtgcaccacaatgaaatacctgaacttgcagcagtttctgatgatgccttgattgaaaaggttgtcaaagcccaagatgaccgtctcttctacgtatcagaagccattcgtcgtggctacacacctgaagaaattgcagagcttacaaaaattgatatcttctatcttgataaactcttgcatatctttgaaattgagcaagaattgggtgctcatccacaagatttagaagttttgaaaacagccaaacttaatggtttttcagaccgtaagattgctgaactctggggaacgactgatgataaagttcgccaacttcgcttggaaaacaagattgttccagtttataagatggtagacacttgtgcggcagagttcgactccgaaacgccatatttctattcaacctatggttgggaaaatgaatctatcagatctgataaagaatctgtacttgtcctaggttcaggtccaatccgtatcggtcaaggggttgagtttgactacgcaaccgttcactctgttaaggctatccaggcagctggttatgaagctatcatcatgaactcaaacccagagaccgtttcaacagacttctctgtatcagataagctttactttgagccattgacattcgaagatgttatgaacgtcattgacttggaacaaccaaagggagttatcgttcagttcggtggtcaaacagccatcaaccttgcggagccattggcaaaagcaggtgtgaccatccttggtacacaggttgctgacctagatcgtgccgaagaccgtgacctcttcgagcaagctctcaaagaattggatattccacagccaccaggacaaacggctaccaatgaagaagaagcagctcttgcagctcgcaagattggcttcccagttcttgtccgcccatcttatgtacttggtggacgtgccatggaaatcgttgaaaacgaagaagaccttcgttcttacatgcgaactgctgttaaggctagtccagaccacccagttcttgtcgactcttatatcgttgggcaagagtgcgaagttgatgccatttcagatggtaaaaatgtactcattcctggtatcatggagcatatcgaacgtgctggtgtccactcaggtgactcaatggctgtttacccaccacaaaccttgtcgcaaaaggttcaggagaccatcgcagactacaccaaacgcttagcaatcggtcttcactgccttggaatgatgaacatccagtttgttatcaaggatgaaaaagtctacgttattgaggtcaatccacgtgccagccgtactgttccattcctatctaaggtaaccaatattcctatggctcaagtagcgaccaaactcattcttggtcaaagtttatcagaacttggctaccaaaatggactttaccctgaaagcacccgtgttcatatcaaggcacctgtcttctcctttaccaaactagctaaggtagacagcttgctcggtcctgaaatgaagtcaacaggtgaagttatgggttctgatgctactttggaaaaagctctctataaagcctttgaagcttcttatctacacttgccaacttttggtaatgtcgtctttaccatcgctgatgatgccaaagaagaagccttgaacttggctcgtcgtttccaaaacattggttatggaatccttgcgacagaagggacagcagccttctttgctagtcatggcttgcaagcccaacctgttggtaagattggtgatgacgataaggatatcccaagttttgtacgcaaaggaagaattcaagctatcattaacacagtaggaacaaaacgaactgctgacgaagatggtgagcaaattcgtcgttcagccattgaacacggggtgcccctcttcacagcgctagatacagctaatgccatgcttaaggtacttgaaagtcgtagctttgttacagaagcgatt

SEQ ID NO: 2570 - protein, 1058 aa, Streptococcus pneumoniae
  carbamoyl-phosphate synthase, large subunit (carB); Cellular location: outside; Similar to strain R6 sequence 15903196 (0.E+01)
MPKRTDIQKIMVIGSGPIIIGQAAEFDYAGTQACLSLKEEGYEVVLVNSNPATIMTDKEIADKVYIEPITLEFVTRILRKEGPDALLPTLGGQTGLNMAMELSKNGILDELGVELLGTKLSAIDQAEDRDLFKQLMEELEQPIPESEIVNTVEEAVAFAATIGYPVIVRPAFTLGGTGGGMCANEKELREITENGLKLSPVTQCLIERSIAGFKEIEYEVMRDSADNALVVCNMENFDPVGIHTGDSIVFAPAQTMSDYENQMLRDASLSIIRALKIEGGCNVQLALDPNSFKYYVIEVNPRVSRSSALASKATGYPIAKLAAKIAVGLTLDEVINPVTGSTYAMFEPALDYVVAKIPRFPFDKFEKGERRLGTQMKATGEVMAIGRNIEESLLKACRSLEIGVHHNEIPELAAVSDDALIEKVVKAQDDRLFYVSEAIRRGYTPEEIAELTKIDIFYLDKLLHIFEIEQELGAHPQDLEVLKTAKLNGFSDRKIAELWGTTDDKVRQLRLENKIVPVYKMVDTCAAEFDSETPYFYSTYGWENESIRSDKESVLVLGSGPIRIGQGVEFDYATVHSVKAIQAAGYEAIIMNSNPETVSTDFSVSDKLYFEPLTFEDVMNVIDLEQPKGVIVQFGGQTAINLAEPLAKAGVTILGTQVADLDRAEDRDLFEQALKELDIPQPPGQTATNEEEAALAARKIGFPVLVRPSYVLGGRAMEIVENEEDLRSYMRTAVKASPDHPVLVDSYIVGQECEVDAISDGKNVLIPGIMEHIERAGVHSGDSMAVYPPQTLSQKVQETIADYTKRLAIGLHCLGMMNIQFVIKDEKVYVIEVNPRASRTVPFLSKVTNIPMAQVATKLILGQSLSELGYQNGLYPESTRVHIKAPVFSFTKLAKVDSLLGPEMKSTGEVMGSDATLEKALYKAFEASYLHLPTFGNVVFTIADDAKEEALNLARRFQNIGYGILATEGTAAFFASHGLQAQPVGKIGDDDKDIPSFVRKGRIQAIINTVGTKRTADEDGEQIRRSAIEHGVPLFTALDTANAMLKVLESRSFVTEAI

SEQ ID NO: 2571 - DNA, 1077 bp, Streptococcus pneumoniae
atgacaaaaagaattctagtattagaagatggcacagtttttgaaggcaaggccttcggagcagatattgatgtaacaggcgaaatcgtctttaatacagggatgaccggctaccaagaatccattacagaccagtcttataatggacaaatcttgacctttacttatcctttggtaggaaattatggtattaatcgtgatgattatgaatccattattccaacttgtaagggagtcgttgtttttgaagaagcgcgtagagctagcaactggcgcaaccaaatgaccttggatgaatttttgaaagccaagaaaattccagggatttcaggaattgatacgcgtgctcttaccaagattatccgtaagcatggtactatgcgtgcaaccttgacccatgttggggacagtatggaccatgtgacggaccagctccaagcaacagttttaccgacagacaatatcaaacaggtttctactaaaacgtcttatccagctccaggagttggtttgagcgtggtgctagtggactttggtctcaagcactcaatcctacgtgaactttctaaacgcaactgtaacgtgacagttgttccttattcgacaacggctgaagaaattctccatctcaatcctgacggagttatgttgtcaaatggtccaggtaacccagaagacgttccacaagcactcgacatgattcgcggtgtacaaggaaaaattccaatctttggtatttgtatgggacaccaactctttgcaatggcaaacggggctaagacctataagatgaagtttggccaccgtggattcaaccatgcggtacgtgaaatcgcaacaggacgagtagacttcaccagccagaaccatggttatgcagtcagccgcgaggatttgccagagcacttgattattacccacgaagaaatcaatgacaagtcagtggaaggtgtgcgccacagataccaacctgctttctctgttcaataccacccagatgcagctcctgggccacacgacgctagctacctatttgacgagtttatcgagatgatggaagtttttaaacaatcaaac

SEQ ID NO: 2572 - protein, 359 aa, Streptococcus pneumoniae
  carbamoyl-phosphate synthase, small subunit (carA); Cellular location: cytoplasm; Similar to strain R6 sequence 15903197 (0.E+01)
MTKRILVLEDGTVFEGKAFGADIDVTGEIVFNTGMTGYQESITDQSYNGQILTFTYPLVGNYGINRDDYESIIPTCKGVVVFEEARRASNWRNQMTLDEFLKAKKIPGISGIDTRALTKIIRKHGTMRATLTHVGDSMDHVTDQLQATVLPTDNIKQVSTKTSYPAPGVGLSVVLVDFGLKHSILRELSKRNCNVTVVPYSTTAEEILHLNPDGVMLSNGPGNPEDVPQALDMIRGVQGKIPIFGICMGHQLFAMANGAKTYKMKFGHRGFNHAVREIATGRVDFTSQNHGYAVSREDLPEHLIITHEEINDKSVEGVRHRYQPAFSVQYHPDAAPGPHDASYLFDEFIEMMEVFKQSN

SEQ ID NO: 2573 - DNA, 921 bp, Streptococcus pneumoniae
atgtcagaaaatcaacaagcattgaaccatgtggtgtccatggaagacctcactgtcgatcaagtaatgaaattgatcaagcgaggaattgagtttaaaaatggagcccagcttccctatgaagaccatccgattgtttccaatctcttctttgaggattctacacggacacataagtcctttgaagtcgcagagattaaacttggattggaacgacttgactttgatgtgaagactagctcggttaataagggtgagacactttatgacaccattttgactctgtctgctttaggagtggatgtctgtgtgattcgccatccagaggtcgactactatagagaattgattgctagtccaacgattacgacttccatcatcaatggtggagatggttcgggccaacaccctagccagagcttgcttgatttgatgaccatttatgaggaatttggccactttgagggtcttaaagttgctattgcaggtgacttggaccactcacgcgttgccaaatccaatatgcagattttgaaacgcttgggagctgaactctttttcgctggacctgaggaatggagaagtcaagagtttgcagactatggacagtttgtaaccattgatgaaatcattgatcaggttgatgtcatgatgtttctccgtgtgcaacacgaacgccatgatagtggagctgtattttcaaaagaagactaccatgcccaacatggcttgactcaagaacgttacgatcgtttgaaagaaacagcaatcctcatgcacccagctccaatcaatcgtgatgtagaaatagcagaccacttggttgaagcaccaaaatcacggattgtccaacaaatgaccaatggtgtctttgttcgaatggcaatcttagaatccgtactagcgagtagaaacgccaac

SEQ ID NO: 2574 - protein, 307 aa, Streptococcus pneumoniae
  aspartate carbamoyltransferase (pyrB); Cellular location: cytoplasm; Similar to strain R6 sequence 15903198 (e-175)
MSENQQALNHVVSMEDLTVDQVMKLIKRGIEFKNGAQLPYEDHPIVSNLFFEDSTRTHKSFEVAEIKLGLERLDFDVKTSSVNKGETLYDTILTLSALGVDVCVIRHPEVDYYRELIASPTITTSIINGGDGSGQHPSQSLLDLMTIYEEFGHFEGLKVAIAGDLDHSRVAKSNMQILKRLGAELFFAGPEEWRSQEFADYGQFVTIDEIIDQVDVMMFLRVQHERHDSGAVFSKEDYHAQHGLTQERYDRLKETAILMHPAPINRDVEIADHLVEAPKSRIVQQMTNGVFVRMAILESVLASRNAN

SEQ ID NO: 2575 - DNA, 519 bp, Streptococcus pneumoniae
atgaaaacaaaagaagttgtagacgaattgaccgtcaaacgagcgattacgcgtattacttatgagattatcgaacgcaacaaagatttgaataagatcgtcttggctggtattaaaactcgtggtgtctttattgcccaccgaatccaagaacgtttgaagcagttagaaaatctttcagttcctgttgtggaattggatactaaacctttccgtgatgatgttaaaagtggagaagatacttctttggtttctgtcgatgtgacagaccgcgaagttatcttggtggatgatgtgctctatacaggtcgtaccatccgtgctgctattgataatattgtcggtcatggtcgtcctgcgcgtgtgagtttagcagttctagtcgatcgtggacatagagaattgccaatccgtccagattacgttggaaaaaatatcccaaccagtcgttctgaagaaatcatcgtagagatgacagaacttgatgaccaagacagagttctgattactgaagaagct

SEQ ID NO: 2576 - protein, 173 aa, Streptococcus pneumoniae
  pyrimidine operon regulatory protein (pyrR); Cellular location: cytoplasm; Similar to strain R6 sequence 15903199 (3.E-93)
MKTKEVVDELTVKRAITRITYEIIERNKDLNKIVLAGIKTRGVFIAHRIQERLKQLENLSVPVVELDTKPFRDDVKSGEDTSLVSVDVTDREVILVDDVLYTGRTIRAAIDNIVGHGRPARVSLAVLVDRGHRELPIRPDYVGKNIPTSRSEEIIVEMTELDDQDRVLITEEA

SEQ ID NO: 2577 - DNA, 627 bp, Streptococcus pneumoniae
atggtcttgtcaaaaaaacgagcacgaaaggtgctagaagaaatcattgccctcttcccagatgccaagcctagtcttgattttaccaatcattttgaactcctggttgcggtcatgttatcagcccagacgacagatgcagcggtaaataaggccacaccaggtctctttgttgcctttccaacaccccaagctatgtctgtagcgacagagagtgagattgcttcacatatttctcgcttgggattgtatcggaataaagctaaattccttaaaaaatgtgcccaacagttactagacgattttgatggtcaagtccctcagacacgtgaagaattggagagtttggcaggtgttggtcgcaagacagccaatgttgtcatgagtgtaggatttggaattccagcctttgcagtggatactcatgtggagcgtatttgcaaacaccacgatattgtcaaaaaatcagcgacgccacttgaggtggaaaagcgggtcatggatatcttgccgcctgagcagtggttagctgcccatcaggccatgatttattttggaagagccatttgccatccaaaaaatccagagtgtgaccagtacccacaattatatgattttagcaatttg

SEQ ID NO: 2578 - protein, 209 aa, Streptococcus pneumoniae
  endonuclease III (nth); Cellular location: cytoplasm; Similar to strain R6 sequence 15903200 (e-119)
MVLSKKRARKVLEEIIALFPDAKPSLDFTNHFELLVAVMLSAQTTDAAVNKATPGLFVAFPTPQAMSVATESEIASHISRLGLYRNKAKFLKKCAQQLLDDFDGQVPQTREELESLAGVGRKTANVVMSVGFGIPAFAVDTHVERICKHHDIVKKSATPLEVEKRVMDILPPEQWLAAHQAMIYFGRAICHPKNPECDQYPQLYDFSNL

SEQ ID NO: 2579 - DNA, 540 bp, Streptococcus pneumoniae
atgaaattaaatattcaagaaattcgtaagcagtctgaaggtttgaactttgaacaaacgttagatttagttgatgacctgcgtgcacgtaatcaagaaattttagatgtaaaagatatccttgcagttgggaaagtacaatatgaagaccgtatgtatttcttagattatcaactatcttataccattgttcttgcttcgagtcgcagtatggagccagttgagttagttgaatcttatccagtcacggaagttttcatggaaggcgcaactaaccagctagatcaagaagttttagatgatgacttggtcttgcccatcgaaaatggggagcttgaccttgctgagagtgtatcagacaatatcctgctaaacattcctatcaaggtcttgacggctgaagaagaagctggtcaaggatttatctcaggaaatgactggcaaatcatgacagaggaagaataccaagctcaaaaagcagtaaagaaagaagaaaacagtccttttgctggcttacaaggactatttgacggagatgaa

SEQ ID NO: 2580 - protein, 180 aa, Streptococcus pneumoniae
  conserved hypothetical protein; Cellular location: cytoplasm; Similar to strain R6 sequence 15903201 (7.E-99)
MKLNIQEIRKQSEGLNFEQTLDLVDDLRARNQEILDVKDILAVGKVQYEDRMYFLDYQLSYTIVLASSRSMEPVELVESYPVTEVFMEGATNQLDQEVLDDDLVLPIENGELDLAESVSDNILLNIPIKVLTAEEEAGQGFISGNDWQIMTEEEYQAQKAVKKEENSPFAGLQGLFDGDE

SEQ ID NO: 2581 - DNA, 363 bp, Streptococcus pneumoniae
gtgctatactatagggaaagagtacatcagatcaaggaggatgctcacatggaagacaagaaactcattcaactcctatccaagttaaataaaagctaccaaaactgtaaacagggtacggcagatgatattcgactacaagagctgctaaacactactatgcaagagctcaaaaaaacggaacagttgaacaacagtatcttaattgatcttgagaaattttaccaacctaccagtcttctgattggactgggtagcctaaaactaaacgatcaagcacgcactgcttggcgaaactatgataaattccattacgatcatgtcaaacacgtactaagtctctatggacctgtttttgaattt

SEQ ID NO: 2582 - protein, 121 aa, Streptococcus pneumoniae
  hypothetical protein; Cellular location: cytoplasm; Similar to strain R6 sequence 15903202 (2.E-29)
MLYYRERVHQIKEDAHMEDKKLIQLLSKLNKSYQNCKQGTADDIRLQELLNTTMQELKKTEQLNNSILIDLEKFYQPTSLLIGLGSLKLNDQARTAWRNYDKFHYDHVKHVLSLYGPVFEF

SEQ ID NO: 2583 - DNA, 1557 bp, Streptococcus pneumoniae
atgcactatgaacattctagaaagggaaatcatatgataaaaatcaatcatctaaccatcacacaaaacaaagatttacgagatcttgtatctgacctaaccatgaccatccaagacggggaaaaggttgctattattggtgaagaaggaaatggcaaatcaaccttacttaaaattttaatgggggaagctttgtctgatttcactatcaagggaaacatccaatctgactatcagtcactggcctacattcctcaaaaagtccctgaggacctaaaaaagaaaactttacacgactacttctttttagattctattgatttagactacagtatcctctatcgtttggcggaggaattgcattttgatagcaatcgtttcgcaagtgaccaagagattggcaatctatcagggggcgaagctttgaaaattcagcttatccatgagttagccaaaccctttgagattctatttttagatgaaccttcaaatgacctagaccttgagacagttgattggctaaaaggccagattcaaaagaccaggcaaaccgttattttcatttcccatgatgaagactttctttctgaaacggcagacactattgttcacttgcgactggtcaaacaccgtaaagaagcggaaacgctagtagagcatttagactatgatagctatagtgagcagagaaaggctaattttgccaaacaaagtcagcaagctgctaacaaccaaagagcctacgataaaaccatggaaaaacatcggagagttaagcaaaatgtagaaactgcgcttcgagctaccaaagatagtactgccggtcgcctattggctaaaaagatgaaaactgtcctctcacaagaaaaacgctacgaaaaggcagctcagtccatgactcaaaagccacttgaagaggaacaaatccaacttttcttttcagacatccaaccattaccagcttctaaagtcttagtccaactggaaaaagaaaatttgtccattgacgaccgagttttggttcaaaaactacaactaactgtccgtggccaagaaaaaatcggtattatcgggccaaatggtgttgggaaatcaactctgttagccaagttacagagacttctgaatgataaaagagagatttcacttggttttatgccacaagattaccacaaaaaactgcaattggatttatccccaatagcctatctcagtaaaactggggaaaaagaggaactacagaaaatccaatctcacctagctagtctcaatttcagttatccagaaatgcagcatcaaattcgctccttatctggcggacaacagggaaaactcctgcttttggatttagtcctgcgcaaaccaaactttctcctgctggatgaacccacacgaaacttttctcccacttctcaaccccaaatcagaaaactctttgctacctatccaggcggtctcatcactgtttcgcatgaccgtcgtttcttaaaagaagtctgctcgatcatctatcgcatgacagaacacggtttgaagctagttaatttagaagattta

SEQ ID NO: 2584 - protein, 519 aa, Streptococcus pneumoniae
  ABC transporter, ATP-binding protein; Cellular location: cytoplasm; Similar to strain R6 sequence 15903204 (0.E+01)
MHYEHSRKGNHMIKINHLTITQNKDLRDLVSDLTMTIQDGEKVAIIGEEGNGKSTLLKILMGEALSDFTIKGNIQSDYQSLAYIPQKVPEDLKKKTLHDYFFLDSIDLDYSILYRLAEELHFDSNRFASDQEIGNLSGGEALKIQLIHELAKPFEILFLDEPSNDLDLETVDWLKGQIQKTRQTVIFISHDEDFLSETADTIVHLRLVKHRKEAETLVEHLDYDSYSEQRKANFAKQSQQAANNQRAYDKTMEKHRRVKQNVETALRATKDSTAGRLLAKKMKTVLSQEKRYEKAAQSMTQKPLEEEQIQLFFSDIQPLPASKVLVQLEKENLSIDDRVLVQKLQLTVRGQEKIGIIGPNGVGKSTLLAKLQRLLNDKREISLGFMPQDYHKKLQLDLSPIAYLSKTGEKEELQKIQSHLASLNFSYPEMQHQIRSLSGGQQGKLLLLDLVLRKPNFLLLDEPTRNFSPTSQPQIRKLFATYPGGLITVSHDRRFLKEVCSIIYRMTEHGLKLVNLEDL

SEQ ID NO: 2585 - DNA, 906 bp, Streptococcus pneumoniae
gtgactaagatgttgtttgatcaaattgcaagcaataaacgaaaaacctggattttgttgctggtatttttcctactcttagctcttgttggttatgcggttggttatctctttataagatctggacttggtggtttggttattgcactgattatcggctttatctacgctttgtctatgatttttcaatcgacagagattgtcatgtccatgaatggagcgcgtgaggtggatgagcaaacggcaccagacctctaccatgtagtggaagatatggctctggtcgctcagattcctatgccccgtgttttcatcattgatgatccagccttaaatgcctttgcgacaggttctaatcctcaaaatgcggctgttgctgcgacttcaggtctactagctatcatgaatcgtgaagaactagaagctgttatgggacatgaagtcagtcatattcgtaattatgatatccgtatttcgactattgcagttgcccttgctagtgctatcaccatgctttctagtatggcaggtcgtatgatgtggtggggtggagcaggtcgcagacgaagtgatgatgaccgagatggaaatggtcttgaaatcattatgctagtggtttccctactagctattgtactggcacctctcgctgcaaccttggttcagctcgctatttctcgtcagagggaatttctggcagatgcatctagtgtcgagctgactcgcaatccccagggaatgattaatgccctagataagttggacaatagcaaacctatgagtcgccacgtcgatgatgctagcagtgccctttatatcaatgatcctaagaaaggtggggggttccaaaaactcttttatacccacccacctatctcagaacggattgaacgtttaaaacagatg

SEQ ID NO: 2586 - protein, 302 aa, Streptococcus pneumoniae
  heat shock protein HtpX (htpX); Cellular location: membrane; Similar to strain R6 sequence 15903205 (e-165)
MTKMLFDQIASNKRKTWILLLVFFLLLALVGYAVGYLFIRSGLGGLVIALIIGFIYALSMIFQSTEIVMSMNGAREVDEQTAPDLYHVVEDMALVAQIPMPRVFIIDDPALNAFATGSNPQNAAVAATSGLLAIMNREELEAVMGHEVSHIRNYDIRISTIAVALASAITMLSSMAGRMMWWGGAGRRRSDDDRDGNGLEIIMLVVSLLAIVLAPLAATLVQLAISRQREFLADASSVELTRNPQGMINALDKLDNSKPMSRHVDDASSALYINDPKKGGGFQKLFYTHPPISERIERLKQM

SEQ ID NO: 2587 - DNA, 558 bp, Streptococcus pneumoniae
atgacttggattattcttggagttatcgctcttattgttatttttgtgattgttagctataacggtttggttaaaaatcgtatgcaaaccaaggaggcttggagtcagattgatgttcagttgaaacgtcgcaatgacctcttgccaaacttgattgagactgtaaaaggttatgccaaatatgaaggttctacccttgaaaaggtggcagaactacgtaaccaagtggcggcagcgacttcaccagcagaagctatgaaagccagtgatgccctcactcgtcaggtttcaggtatttttgcagttgcagaaagctatccagatttgaaagctagtgctaactttgttaaattgcaagaggagttgacaaacacagaaaataaaatttcttactctcgtcaactctataacagtgttgtcagcaactacaatgtaaaattagaaactttcccgagcaatattatcgctggaatgtttggatttaaagcggcagatttccttcaaacacctgaagaggaaaagtcggttcctaaagttgattttagcggtttaggtgac

SEQ ID NO: 2588 - protein, 186 aa, Streptococcus pneumoniae
  lemA protein (lemA); Cellular location: outside; Similar to strain R6 sequence 15903206 (e-101)
MTWIILGVIALIVIFVIVSYNGLVKNRMQTKEAWSQIDVQLKRRNDLLPNLIETVKGYAKYEGSTLEKVAELRNQVAAATSPAEAMKASDALTRQVSGIFAVAESYPDLKASANFVKLQEELTNTENKISYSRQLYNSVVSNYNVKLETFPSNIIAGMFGFKAADFLQTPEEEKSVPKVDFSGLGD

SEQ ID NO: 2589 - DNA, 735 bp, Streptococcus pneumoniae
atgatactaaagaaggaaataactatgaaaccaaaaacattttacaacttgcttgccgagcagaatcttccactttcggaccagcaaaaagaacaatttgaacgttattttgagctcttggtcgagtggaatgagaagattaatttgacggcgattacggacaaggaagaagtttatctcaaacatttttacgattcgattgcacccattcttcaaggtttgattcccaatgaaactatcaaacttcttgatatcggggctggggcaggatttcctagtctaccaatgaaaattctctatccggagttagatgtgaccattattgattcactcaataagcgcatcaacttcctacaactcttggctcaagaactggatttgaacggagttcatttctaccacggacgtgccgaagattttgcccaagacaagaacttccgtgctcaatatgattttgtaacagctcgtgcggttgcccgtatgcaggtcctatctgaattgactattccctaccttaaggttggtggcaaactattagcactcaaggctagcaatgcgcctgaggaattattagaagctaagaatgccctcaatctcctttttagtaaggtcgaagacaatctcagctacgccctaccgaatagagatccgcgctatatcacagtggtagaaaagaaaaaagaaacaccaaataaatatccacgtaaggctggtatgccaaataaacgcccactt

SEQ ID NO: 2590 - protein, 245 aa, Streptococcus pneumoniae
  glucose-inhibited division protein B (gidB); Cellular location: cytoplasm; Similar to strain R6 sequence 15903207 (e-134)
MILKKEITMKPKTFYNLLAEQNLPLSDQQKEQFERYFELLVEWNEKINLTAITDKEEVYLKHFYDSIAPILQGLIPNETIKLLDIGAGAGFPSLPMKILYPELDVTIIDSLNKRINFLQLLAQELDLNGVHFYHGRAEDFAQDKNFRAQYDFVTARAVARMQVLSELTIPYLKVGGKLLALKASNAPEELLEAKNALNLLFSKVEDNLSYALPNRDPRYITVVEKKKETPNKYPRKAGMPNKRPL

SEQ ID NO: 2591 - DNA, 1317 bp, Streptococcus pneumoniae
atgggctcttttttgatgcccaaaagtgaggtttatatgaaacaagaatcaactgttgatttgttactagacgttgaccaacgtccttcggctggaaaaggaattctccttagtttccaacacgttttcgccatgtttggtgcgaccatcttggtaccattgattttgggaatgcctgtatctgttgccctttttgcttcaggtgttggaacactcatctacatgattgctactggttttaaagttccagtttatctaggttcttcatttgcctttatcacagctatgtcactggctatgaaagaaatggggggggatgtatctgctgcccaaacaggggttatcttgactggtttggtctatgtccttgttgctaccagcatccgatttgtaggaacaaaatggattgataaactcttgccaccaatcattatcggtcctatgatcatcgttatcggtcttggacttgcaggttcagctgttaccaatgcaggtcttgtagcagacggaaattggaaaaatgctctggtagccgttgttactttcctaattgctgcctttatcaatacaaaaggaaaaggcttcctacgaatcattccattcctctttgccattatcggtggttaccttttcgcactaactcttggcttggttgactttacaccagttcttaaagccaactggttcgaaattcctggtttctacttgccatttagcacaggtggtgcctttaaagagtacaatctttactttggtccagaagccatcgctatcttgccaatcgctatcgtaacaatttctgaacatatcggagaccatactgttttgggtcaaatctgtggtcgtcaattcttaaaagaaccaggtcttcaccgtactcttcttggtgacggtatcgcaacttctgtttctgccttccttggtggaccagccaatacaacttacggagaaaatacaggggttatcggtatgactcgtatcgcttctgtctcagttatccgtaacgctgccttcatcgcgattgccctcagcttccttggtaaattcactgccttgatttcaactattccaaacgctgtacttggtggtatgtcaatccttctctatggggttatcgccagcaatggtttgaaagtcttgattaaagaacgtgttgatttcgctcaaatgcgaaacctcatcatcgcaagtgctatgttggttcttggacttggaggagctatccttaaacttggtccagttacactttcaggtactgccctttcagccatgacaggaatcatcttgaacttgatcttgccatacgaaaataaagac

SEQ ID NO: 2592 - protein, 439 aa, Streptococcus pneumoniae
  uracil permease (uraA); Cellular location: membrane; Similar to strain R6 sequence 15903208 (0.E+01)
MGSFLMPKSEVYMKQESTVDLLLDVDQRPSAGKGILLSFQHVFAMFGATILVPLILGMPVSVALFASGVGTLIYMIATGFKVPVYLGSSFAFITAMSLAMKEMGGDVSAAQTGVILTGLVYVLVATSIRFVGTKWIDKLLPPIIIGPMIIVIGLGLAGSAVTNAGLVADGNWKNALVAVVTFLIAAFINTKGKGFLRIIPFLFAIIGGYLFALTLGLVDFTPVLKANWFEIPGFYLPFSTGGAFKEYNLYFGPEAIAILPIAIVTISEHIGDHTVLGQICGRQFLKEPGLHRTLLGDGIATSVSAFLGGPANTTYGENTGVIGMTRIASVSVIRNAAFIAIALSFLGKFTALISTIPNAVLGGMSILLYGVIASNGLKVLIKERVDFAQMRNLIIASAMLVLGLGGAILKLGPVTLSGTALSAMTGIILNLILPYENKD

SEQ ID NO: 2593 - DNA, 1569 bp, Streptococcus pneumoniae
atggcatttgaaagtttaacagaacgtttgcagaacgtctttaaaaatctacgtaaaaaaggaaaaatctctgaatctgatgtccaagaggcaaccaaagaaattcgcttggccttgctcgaggccgacgttgccttgcctgttgtaaaggactttatcaagaaagttcgtgagcgtgcagtcgggcatgaggtcattgatacacttaatcctgcgcaacagattattaaaatcgttgatgaggaattgacagccgttttaggttctgatacggcagaaattatcaagtcacctaagattccaaccatcatcatgatggttggtttacaaggggctggtaaaacaacctttgctggtaaattggccaacaaactcaagaaagaagaaaatgctcgtcctttgatgattgcggcggatatttatcgtccagctgccattgaccagcttaagaccttgggacaacagattgatgtgcctgtctttgcacttggaacagaagtaccagctgttgagattgtacgtcaaggtttggagcaagcccaaactaatcataacgactatgtcttgattgatactgcgggtcgtttgcagattgatgagctcctcatgaatgagcttcgtgatgtgaaagcattggctcaaccaaatgaaatcttgcttgtcgttgatgctatgattggtcaggaagcagccaatgttgcgcgtgagtttaatgctcagttggaagtgactggggtcatccttaccaagattgatggcgatactcgtggtggtgctgctctgtctgttcgtcacattactggaaaaccaatcaagttcactggtacaggtgaaaagattacggacattgaaaccttccacccagaccgcatgtctagccgtatccttggtatgggggatatgctcactttgattgagaaagcttctcaggaatacgatgaacaaaaagcccttgaaatggctgagaagatgcgcgaaaacacctttgattttaatgatttcatcgatcaattagatcaggtgcaaaatatggggccgatggaagacttgctcaagatgattccaggtatggccaacaatccagcccttcaaaacatgaaggtggatgaacgccagattgctcgtaaacgtgccattgtgtcttcgatgacacctgaagagcgtgaaaacccagatttgttaaatccaagccgtcgccgtcgtattgctgctggttctggaaatacattcgtcgaagtcaataaattcatcaaggactttaaccaggctaaacagctcatgcagggtgttatgtctggggatatgaataaaatgatgaagcaaatggggattaatccaaataaccttcctaaaaatatgccaaatatgggaggaatggatatgtctgcccttgaaggaatgatgggacaaggcggtatgcctgacttatcagctctcggaggagcaggaatgccagatatgagccagatgtttggtggcggtttgaaaggtaaaattggtgaatttgccatgaaacagtccatgaaacgtatggctaacaaaatgaagaaagcgaagaagaaacgcaag

SEQ ID NO: 2594 - protein, 523 aa, Streptococcus pneumoniae
  signal recognition particle protein (ffh); Cellular location: cytoplasm; Similar to strain R6 sequence 15903209 (0.E+01)
MAFESLTERLQNVFKNLRKKGKISESDVQEATKEIRLALLEADVALPVVKDFIKKVRERAVGHEVIDTLNPAQQIIKIVDEELTAVLGSDTAEIIKSPKIPTIIMMVGLQGAGKTTFAGKLANKLKKEENARPLMIAADIYRPAAIDQLKTLGQQIDVPVFALGTEVPAVEIVRQGLEQAQTNHNDYVLIDTAGRLQIDELLMNELRDVKALAQPNEILLVVDAMIGQEAANVAREFNAQLEVTGVILTKIDGDTRGGAALSVRHITGKPIKFTGTGEKITDIETFHPDRMSSRILGMGDMLTLIEKASQEYDEQKALEMAEKMRENTFDFNDFIDQLDQVQNMGPMEDLLKMIPGMANNPALQNMKVDERQIARKRAIVSSMTPEERENPDLLNPSRRRRIAAGSGNTFVEVNKFIKDFNQAKQLMQGVMSGDMNKMMKQMGINPNNLPKNMPNMGGMDMSALEGMMGQGGMPDLSALGGAGMPDMSQMFGGGLKGKIGEFAMKQSMKRMANKMKKAKKKRK

SEQ ID NO: 2595 - DNA, 330 bp, Streptococcus pneumoniae
atggaaatcgaaaaaaccaatcgtatgaatgcgctctttgaattttatgcggcgcttttgacagataagcaaatgaattatatcgagctctactacgctgatgattacagccttgctgaaattgccgaggagttcggtgtcagtcgtcaggctgtctatgacaatatcaagcgaacagaaaagattctggaagattatgagatgaaattgcacatgtactcggactatattgtccgcagtcagatttttgatcagattttggagcgctatcccaaggatgactttctgcaggagcagatagaaattttaacaagcattgataatagagaa

SEQ ID NO: 2596 - protein, 110 aa, Streptococcus pneumoniae
  conserved hypothetical protein; Cellular location: cytoplasm; Similar to strain R6 sequence 15903210 (6.E-59)
MEIEKTNRMNALFEFYAALLTDKQMNYIELYYADDYSLAEIAEEFGVSRQAVYDNIKRTEKILEDYEMKLHMYSDYIVRSQIFDQILERYPKDDFLQEQIEILTSIDNRE

SEQ ID NO: 2597 - DNA, 375 bp, Streptococcus pneumoniae
gtgaagattcggatgcgaaatacgattcagtttgatgagcagttggaagtgattgaccagctttatgatgtggaagtgcatgaaaaaggagattatagctacctgcttttctataatgaggaaaaggaaaaagtagtgattaaatttcatggtcaagaacttgtgatgagccgattttctaatcccaagaccattatgcgctttctaaaggatagcgatagtttagcctatattcctacacctatgggcatgcaggagtttatcatccaaacgagccattatcaagttgataggcaaaagattgaactagattatcaactacaaaatcaagagggacatccctttgccagctatcaattggaaattacttggggc

SEQ ID NO: 2598 - protein, 125 aa, Streptococcus pneumoniae
  hypothetical protein; Cellular location: cytoplasm; Similar to strain R6 sequence 15903211 (2.E-68)
MKIRMRNTIQFDEQLEVIDQLYDVEVHEKGDYSYLLFYNEEKEKVVIKFHGQELVMSRFSNPKTIMRFLKDSDSLAYIPTPMGMQEFIIQTSHYQVDRQKIELDYQLQNQEGHPFASYQLEITWG

SEQ ID NO: 2599 - DNA, 1302 bp, Streptococcus pneumoniae
atgaacgaaaaagtattccgtgaccctgttcacaactacatccatgtcaataatcaaatcatctatgacttgattaatacaaaagaatttcagcgtttgcgccggatcaaacaactgggaacttccagttataccttccacggtggagaacacagtcgcttctctcactgtctaggagtctatgaaattgcacgacgcatcacagagattttcgaagaaaaatatcctgaggaatggaatcctgccgagtctctcttgaccatgaccgctgctctcctacacgaccttgggcatggtgcctactcccatacttttgaacatctctttgatacagaccatgaagccattactcaggagattattcaaaatcctgagacagagattcaccaagtcctgctacaagtggcacctgatttcccagaaaaggtggccagtgtcattgaccatacctatcctaataagcaggtcgtgcagctcatttctagtcagattgacgcagatcgcatggactatctcttgcgcgactcctattttacaggagcatcctatggggaatttgacctgactcgaatcctccgagtcattcgtcctatcgaaaatggtatcgcctttcagcgcaatggcatgcacgccatcgaagactacgtcctcagtcgctaccagatgtacatgcaggtttatttccaccccgcaacacgcgccatggaagttctcctacagaatcttctcaaacgcgccaaggaactctatcctgaggacaaggatttctttgcccgaacttctccacacctcctgcctttcttcgaaaaaaatgtgaccttgactgactatctggctctggatgatggcgtgatgaatacctacttccagctttggatgaccagtcctgacaagattcttgcagatttatcgcatcgctttgtcaaccgcaaggtctttaaatccattaccttttcacaagaggaccaagatcaacttactagcatgagaaaattggttgaggatatcggctttgatcccgactactacactgccattcataagaactttgacctcccttatgatatctatcgtcccgaatctgaaaacccacggacacagattgagattttacaaaaaaatggagaactggccgaactctctagcctgtctcctatcgtccaatcccttgctggcagtcgccacggagataatcgcttttattttccaaaagaaatgttggaccaaaacagcatctttgcaagcattacccagcaatttttacacttgattgagaacgatcattttaccccaaataaaaac

SEQ ID NO: 2600 - protein, 434 aa, Streptococcus pneumoniae
  conserved hypothetical protein; Cellular location: cytoplasm; Similar to strain R6 sequence 15903212 (0.E+01)
MNEKVFRDPVHNYIHVNNQIIYDLINTKEFQRLRRIKQLGTSSYTFHGGEHSRFSHCLGVYEIARRITEIFEEKYPEEWNPAESLLTMTAALLHDLGHGAYSHTFEHLFDTDHEAITQEIIQNPETEIHQVLLQVAPDFPEKVASVIDHTYPNKQVVQLISSQIDADRMDYLLRDSYFTGASYGEFDLTRILRVIRPIENGIAFQRNGMHAIEDYVLSRYQMYMQVYFHPATRAMEVLLQNLLKRAKELYPEDKDFFARTSPHLLPFFEKNVTLTDYLALDDGVMNTYFQLWMTSPDKILADLSHRFVNRKVFKSITFSQEDQDQLTSMRKLVEDIGFDPDYYTAIHKNFDLPYDIYRPESENPRTQIEILQKNGELAELSSLSPIVQSLAGSRHGDNRFYFPKEMLDQNSIFASITQQFLHLIENDHFTPNKN

SEQ ID NO: 2601 - DNA, 804 bp, Streptococcus pneumoniae
atgagtattaaactaattgccgttgatatcgacggaacccttgtcaacagccaaaaggaaatcactcctgaagttttttctgccatccaagatgccaaagaagctggtgtcaaagtcgtgattgcaactggccgccctatcgcaggcgttgccaaacttctagacgacttgcagttgagagacgagggggactatgtggtaaccttcaacggtgcccttgtccaagaaactgctacaggacatgagattatcagcgaatccttgacttatgaggattatctagatatggaattcctcagtcgcaagctcggtgtccacatgcatgccattaccaaggacggtatctatactgcaaatcgcaatatcggaaaatacactgtacacgaatcaaccctcgtcagcatgcctatcttctaccgtacccctgaagaaatggctggcaaagaaattgttaaatgtatgtttatcgatgaaccagaaattctcgatgctgcgattgaaaaaattccagcagaattttacgagcgctactccatcaacaaatctgctcctttctacctcgaactccttaaaaagaatgtagacaagggttcagccattactcacttggctgaaaaactcggattgaccaaagatgaaaccatggcaatcggtgatgaagaaaatgaccgtgccatgctggaagtcgttggaaaccccgttgtcatggaaaatggaaatccagaaatcaaaaaaatcgccaaatacatcaccaaaacaaatgacgaatccggcgttgcccatgccatccgaacatgggtactg

SEQ ID NO: 2602 - protein, 268 aa, Streptococcus pneumoniae
  Cof family protein; Cellular location: cytoplasm; Similar to strain R6 sequence 15903213 (e-150)
MSIKLIAVDIDGTLVNSQKEITPEVFSAIQDAKEAGVKVVIATGRPIAGVAKLLDDLQLRDEGDYVVTFNGALVQETATGHEIISESLTYEDYLDMEFLSRKLGVHMHAITKDGIYTANRNIGKYTVHESTLVSMPIFYRTPEEMAGKEIVKCMFIDEPEILDAAIEKIPAEFYERYSINKSAPFYLELLKKNVDKGSAITHLAEKLGLTKDETMAIGDEENDRAMLEVVGNPVVMENGNPEIKKIAKYITKTNDESGVAHAIRTWVL

SEQ ID NO: 2603 - DNA, 996 bp, Streptococcus pneumoniae
atgaatttttttagcaaactatttaatttaaaacaaaataatcataatagagacacaaattctgattgtaacaatttttacctaaacgaattagaatgtggccttactcctgggcaactcatactcatagattggactcaaaaaacagggagaaattataatttcccaagatattttaaatactctcttcaaattgaccctgaatctacacacaatcaattatacaaattaggatacttcactaaaaataagactttatcatatcttacagtagtagaattaaaaactatattatctaaacataatttagctacttctggaaaaaaagcagaattaattacaagaataattaataatgttaacattgacaatttagatattccgttcgaatttaaactaacaaaagaagcacaaaatcttattatcgaacatagtgactatatcaaagcatactatgataaagacataactatggaagattattgtaaagaaaaaaacaatatctcttttaaagcaacttttggtgatataaaatggagtctcttaaataaacaagctcataggaatactgtatcaggagattttggatgcttatctaacacacgaaaggctcagggaagacatttggaacaagaaggtaatattaaacatgctttaatatattacatagaatctttgataattactatttcaggattagaaaacaatttttcagccactgattatccagtatattatcccgattcgatacctgactactcactaaaacatattcaaacattaatggaatcattatctgatgacgattatgattttgcttttgatgaagcattatttcgcttctcaattttgaatgcaaatcattttttatctaaggaagatattgactatttaagagttaatttacctcgttccactgctgaagaaataaacaattacttaaagaaatatgaatgttatagtcctttaaataatttagaacttgacgattttgaa

SEQ ID NO: 2604 - protein, 332 aa, Streptococcus pneumoniae
  SAP domain protein; Cellular location: cytoplasm
MNFFSKLFNLKQNNHNRDTNSDCNNFYLNELECGLTPGQLILIDWTQKTGRNYNFPRYFKYSLQIDPESTHNQLYKLGYFTKNKTLSYLTVVELKTILSKHNLATSGKKAELITRIINNVNIDNLDIPFEFKLTKEAQNLIIEHSDYIKAYYDKDITMEDYCKEKNNISFKATFGDIKWSLLNKQAHRNTVSGDFGCLSNTRKAQGRHLEQEGNIKHALIYYIESLIITISGLENNFSATDYPVYYPDSIPDYSLKHIQTLMESLSDDDYDFAFDEALFRFSILNANHFLSKEDIDYLRVNLPRSTAEEINNYLKKYECYSPLNNLELDDFE

SEQ ID NO: 2605 - DNA, 345 bp, Streptococcus pneumoniae
atgaatccattaatccaaagcttgactgaaggtcaacttcgtacagatatcccatcattccgtcctggtgacactgttcgtgtacatgcgaaagttgtcgaaggtaaccgtgaacgtatccagatttttgaaggtgttgttatcgcacgtaaaggtgctggaatctcagaaaactacacagttcgtaaaatctctaacggtgtaggtgttgagcgtatcttcccaatccacactccacgtgttgaaaaaatcgaagttgttcgttacggtaaagtacgtcgtgcgaaattgtactacttgcgtgctcttcaaggtaaagcagctcgtatcaaagaaatccgtcgt

SEQ ID NO: 2606 - protein, 115 aa, Streptococcus pneumoniae
  ribosomal protein L19 (rplS); Cellular location: cytoplasm; Similar to strain R6 sequence 15903214 (3.E-61)
MNPLIQSLTEGQLRTDIPSFRPGDTVRVHAKVVEGNRERIQIFEGVVIARKGAGISENYTVRKISNGVGVERIFPIHTPRVEKIEVVRYGKVRRAKLYYLRALQGKAARIKEIRR

SEQ ID NO: 2607 - DNA, 327 bp, Streptococcus pneumoniae
atggtaatcgtctatcttgcaatcgcctgtggcttgggagcactcgtacggtatttcttttctcgctataatcaagcttctaaattgccactcggaacgctcatagctaatcttttaggttgttttttaattggagtattctacaatcatgtagagtctaaggaagtatatgctattctagcaacaggattttgtggcggtttaacaactttttcgaccttgaatgacgaacttcaaagactgctaagtgataagaaggtcttttattcttacctgactttgacttacataggtggtttggttgcgatttttttaggaattttgcta

SEQ ID NO: 2608 - protein, 109 aa, Streptococcus pneumoniae
  crcB protein (crcB); Cellular location: membrane; Similar to strain R6 sequence 15903215 (4.E-57)
MVIVYLAIACGLGALVRYFFSRYNQASKLPLGTLIANLLGCFLIGVFYNHVESKEVYAILATGFCGGLTTFSTLNDELQRLLSDKKVFYSYLTLTYIGGLVAIFLGILL

SEQ ID NO: 2609 - DNA, 372 bp, Streptococcus pneumoniae
atgaaaaaagaacaattttatccgctaggaatttttctagctgctatgttgggcggacttgtccgatatctagtttccacctggttaccagccagtccagatttcccttggggcactctctttgtcaactatctgggaattttctgcttgatttatcttgtcaagggctatctggtctataaggggactagtaagggcttgattttagcactggggacgggtttttgcggaggtttaacaactttttccagcctaatgcttgatactgtgaagctgcttgatacagggcgttatcttagtttgatactgtatttgcttttgagtatcggtggaggcctgcttttagcttactatttggggaggaagaaatgg

SEQ ID NO: 2610 - protein, 124 aa, Streptococcus pneumoniae
  crcB protein (crcB); Cellular location: membrane; Similar to strain R6 sequence 15903216 (4.E-68)
MKKEQFYPLGIFLAAMLGGLVRYLVSTWLPASPDFPWGTLFVNYLGIFCLIYLVKGYLVYKGTSKGLILALGTGFCGGLTTFSSLMLDTVKLLDTGRYLSLILYLLLSIGGGLLLAYYLGRKKW

SEQ ID NO: 2611 - DNA, 264 bp, Streptococcus pneumoniae
atggatttagatattattcgtcaagaaatcgatcaaatcgacgaccaaattgtcaaactgttagaagaacgaatgcatttagttgagggggtggttgcttataagaaagcttcaggtaaaccgattttagatactaagagagaagaagttatttttgaaaaggttaggagtcgtgtagaggacaagcgctatcaggagactattgtcgcgactttttcggacatactcaaacgttcgcgtgattatcaggatcaaaatatcaaa

SEQ ID NO: 2612 - protein, 88 aa, Streptococcus pneumoniae
  chorismate mutase, putative; Cellular location: cytoplasm; Similar to strain R6 sequence 15903217 (4.E-45)
MDLDIIRQEIDQIDDQIVKLLEERMHLVEGVVAYKKASGKPILDTKREEVIFEKVRSRVEDKRYQETIVATFSDILKRSRDYQDQNIK

SEQ ID NO: 2613 - DNA, 441 bp, Streptococcus pneumoniae
atggcattagcaaaaattgtatttgccagtatgaccggtaataccgaagaaattgcagatattgtagcagacaaattacgtgacttgggcttggatgttgatgttgatgaatgtacaactgttgacgcttcagacttcttggaagcagacatcgctatcgttgcgacctatacttatggtgatggtgaattgccagatgagatgatggacttctacgaagacctagcagatctcaacttgaatggcaaaatctacggagtggtcggctcaggagataccttctacgatgaattctgtaaggctgttgatgactttgaccgtgtctttgtgtcaacaggagcagaaaaaggttcagagtgtgttaaagttgatctttctgccgaggaagaagatattgaacgcttggaacaattcgcagaagaattggctgctaaagtagga

SEQ ID NO: 2614 - protein, 147 aa, Streptococcus pneumoniae
  flavodoxin (fld); Cellular location: cytoplasm; Similar to strain R6 sequence 15903218 (5.E-81)
MALAKIVFASMTGNTEEIADIVADKLRDLGLDVDVDECTTVDASDFLEADIAIVATYTYGDGELPDEMMDFYEDLADLNLNGKIYGVVGSGDTFYDEFCKAVDDFDRVFVSTGAEKGSECVKVDLSAEEEDIERLEQFAEELAAKVG

SEQ ID NO: 2615 - DNA, 933 bp, Streptococcus pneumoniae
atggagatttgccaacaaattttagaaaaaattaaagaatacgacaccattatcattcatcgtcatatgaaaccagaccctgatgccttgggaagtcaggtgggattgaaagccttgctggaacatcatttcccagaaaaaaccatcaaagccgtcggttttgatgaaccaactcttacttggatggctgagatggatcttgttgaagatagagcctaccaaggcgcacttgtcatcgtctgtgatacagctaatactgctcgtatcgatgataagcgctatagtcaaggtgattttctcattaagattgaccaccatccaaatgatgatgtatacggtgacctgtcttgggtcgatactagttcaagtagcgctagcgagatgattaccctatttgcccaaacaacccaactagccttggcagatcgcgatgctgagttgctctttgcaggaattgtcggtgatacaggtcgcttcctctacccttctaccactgcacggactcttcgcctggctgcttatttgagagaacataactttgactttgcggctctcactcgcaaaatggacactatgagctacaaaattgctaaactgcaaggctacatctacgaccatctggaagtggatgaaaatggtgctgctcgcgttatcctgagtcagaaaatcttgaaacaatacaatataaccgatgctgaaactgcggccattgtaggtgcacctggacgcattgacagagtgagtctctggggaatttttgtcgaacaggctgatggccactaccgagttcgcttacgcagtaaagtccatcctatcaatgaaattgccaaggagcatgatggtggaggccaccctctagcaagtggtgctaattcctatagcctagaagaaaacgaaatcatctaccaaaagttaaaaaacttgcttaaaaac

SEQ ID NO: 2616 - protein, 311 aa, Streptococcus pneumoniae
  DHH subfamily 1 protein; Cellular location: cytoplasm; Similar to strain R6 sequence 15903219 (e-179)
MEICQQILEKIKEYDTIIIHRHMKPDPDALGSQVGLKALLEHHFPEKTIKAVGFDEPTLTWMAEMDLVEDRAYQGALVIVCDTANTARIDDKRYSQGDFLIKIDHHPNDDVYGDLSWVDTSSSSASEMITLFAQTTQLALADRDAELLFAGIVGDTGRFLYPSTTARTLRLAAYLREHNFDFAALTRKMDTMSYKIAKLQGYIYDHLEVDENGAARVILSQKILKQYNITDAETAAIVGAPGRIDRVSLWGIFVEQADGHYRVRLRSKVHPINEIAKEHDGGGHPLASGANSYSLEENEIIYQKLKNLLKN

SEQ ID NO: 2617 - DNA, 282 bp, Streptococcus pneumoniae
atggctcgcaaagagaccatggcagaaaggaaatattgcaaaatgaaaaaagatatccatccagaatatcgcccagttgtcttcatggacacaactactggttaccaattccttagcggttcaacaaaacgctctaacgaaacagttgagttcgaaggcgaaacttacccattgatccgtgtggaaatttcatcagactcacacccattctacactggacgtcaaaagttcactcaagcagatggacgcgtggatcgtttcaacaaaaaatacggtctcaaa

SEQ ID NO: 2618 - protein, 94 aa, Streptococcus pneumoniae
  ribosomal protein L31 (rpmE); Cellular location: cytoplasm; Similar to strain R6 sequence 15903220 (5.E-44)
MARKETMAERKYCKMKKDIHPEYRPVVFMDTTTGYQFLSGSTKRSNETVEFEGETYPLIRVEISSDSHPFYTGRQKFTQADGRVDRFNKKYGLK

SEQ ID NO: 2619 - DNA, 216 bp, Streptococcus pneumoniae
atgagtataagtcctcgttttgaaaccttagagcaggccattgcctccaaagatttggaaaaagtccgagaagcttttaagaaaatgaattccacttggaccatcaatgaaagtgtggttcgtgacaatagtatagctcattatggacgtgttgaaacagctatttccttcctgcctagtagcatggaaatcgaacctacagatgagtctggaaca

SEQ ID NO: 2620 - protein, 72 aa, Streptococcus pneumoniae
  hypothetical protein; Cellular location: cytoplasm; Similar to strain R6 sequence 15903221 (3.E-34)
MSISPRFETLEQAIASKDLEKVREAFKKMNSTWTINESVVRDNSIAHYGRVETAISFLPSSMEIEPTDESGT

SEQ ID NO: 2621 - DNA, 159 bp, Streptococcus pneumoniae
gtgtggaaagagattcgtaaacgtggatttaagaataaagcctttcgaactttggaagatgtcatgaatcaacttcaagatgtcatacaaggactggagaaggaggtgataaagtccatcggtaatcggagatggactagaatgctttttgaaagcaga

SEQ ID NO: 2622 - protein, 53 aa, Streptococcus pneumoniae
  transposase family protein, truncation FRAMESHIFT; Cellular location: cytoplasm; Similar to strain R6 sequence 15902761 (3.E-42)
MWKEIRKRGFKNKAFRTLEDVMNQLQDVIQGLEKEVIKSIGNRRWTRMLFESR

SEQ ID NO: 2623 - DNA, 249 bp, Streptococcus pneumoniae
atgggcaaatcttataaagagattatagagcttttagactgtaatcaaacaacgatttggcgaaacgtaaaaaaatatgaggagttcggactcgactctctccttcaagaaacacgtggtggtcgtaaccatgcatatatgacagttgaggaagagaaagcctttcttgcccgtcatttgaaggctacagaggcaggagaatttgttacaattgatgccttatttcaggtttataaaaaggagtgtgga

SEQ ID NO: 2624 - protein, 83 aa, Streptococcus pneumoniae
  conserved hypothetical protein (Degenerate transposase); Cellular location: cytoplasm; Similar to strain R6 sequence 15902688 (1.E-47)
MGKSYKEIIELLDCNQTTIWRNVKKYEEFGLDSLLQETRGGRNHAYMTVEEEKAFLARHLKATEAGEFVTIDALFQVYKKECG

SEQ ID NO: 2625 - DNA, 93 bp, Streptococcus pneumoniae
atgaaatcaactaaagaagaaatccaaaccatcaaaacacttttaaaagactctcgtacagctaaatattataaacgccttcaaatcgttcta

SEQ ID NO: 2626 - protein, 31 aa, Streptococcus pneumoniae
  hypothetical protein; Cellular location: cytoplasm
MKSTKEEIQTIKTLLKDSRTAKYYKRLQIVL

SEQ ID NO: 2627 - DNA, 99 bp, Streptococcus pneumoniae
ttggtttttttgaaaatagataaaaaaacgaacgtttttcttggaaatatctttctcaaagacaaaatcttaaagtatgctataagaaaagaaaatgtt

SEQ ID NO: 2628 - protein, 33 aa, Streptococcus pneumoniae
  hypothetical protein
MVFLKIDKKTNVFLGNIFLKDKILKYAIRKENV

SEQ ID NO: 2629 - DNA, 102 bp, Streptococcus pneumoniae
ttgaaagaatttttagaaaatttctgttttttctttacagtgaaaaaaaattctgctataatgtcttatgtaataaaatatgacaataaaaggagaacgata

SEQ ID NO: 2630 - protein, 34 aa, Streptococcus pneumoniae
  hypothetical protein; Cellular location: cytoplasm
MKEFLENFCFFFTVKKNSAIMSYVIKYDNKRRTI

SEQ ID NO: 2631 - DNA, 1344 bp, Streptococcus pneumoniae
atgacatctgctaaagaatatatccaaagcgtgtttgaaactgtgaaagctcgtaacgggcacgaggctgaattcctccaagctgttgaagaatttttcaacactttagaacctgtatttgaaaaacaccctgagtatatcgaagaaaatatcttggcacgtattactgagcctgagcgcgtggtttctttccgtgttccttgggttgaccgtgatggaaaaattcaagtaaaccgtggttaccgtgttcaattcaactcagctgttggaccatacaaaggtggacttcgtttccacccaactgtaaaccaagggatcttgaaattcctcggatttgaacaaatctttaaaaatgtcttgactggacttcctatcggtggaggtaaaggtggatcagacttcgatcctaaaggtaaaacagatgctgaagtgatgcgcttctgccaaagcttcatgactgaattgcaaaaacacatcggaccatcacttgacgtacctgctggtgatatcggtgttggtggacgtgaaattggttacctttacggtcaatacaaacgtcttaaccaatttgatgctggtgtcttgactggtaaacctcttggatttggtggtagcttgattcgtccagaagcaactggttacggtttggtttactatactgaagaaatgctcaaagctaacggtaacagctttgctggtaagaaagtcgttatttcaggttctggtaacgttgctcaatatgctcttcaaaaagcaactgaactcggtgcaactgttatttctgtttctgactcaaatggttatgtcatcgatgaaaatggtatcgacttcgatcttttggttgatgttaaagaaaaacgtcgtgctcgtttgactgagtatgcagctgaaaaagcaactgcaacctaccacgaaggtactgtatggacttacgctggaaactatgacattgctcttccatgtgccactcaaaacgaaatcaacggtgaagcagctaaacgtttggttgctcaaggcgttatctgtgtatctgaaggtgccaacatgccgagcgaccttgatgccatcaaagtttacaaagaaaatggtatcttctacggacctgcaaaagctgccaacgctggtggtgtagccgtttcagctcttgaaatgagccaaaacagtcttcgcctctcatggactcgtgaagaagttgatggccgtctcaaagacatcatgacaaacatcttcaacacagctaaaacgacttcagaaacatacggtcttgataaagactaccttgcaggagctaacattgctgcctttgaaaatgtagcaaatgccatgattgcacaaggtattgtt

SEQ ID NO: 2632 - protein, 448 aa, Streptococcus pneumoniae
  NADP-specific glutamate dehydrogenase (gdhA); Cellular location: cytoplasm; Similar to strain R6 sequence 15903224 (0.E+01)
MTSAKEYIQSVFETVKARNGHEAEFLQAVEEFFNTLEPVFEKHPEYIEENILARITEPERVVSFRVPWVDRDGKIQVNRGYRVQFNSAVGPYKGGLRFHPTVNQGILKFLGFEQIFKNVLTGLPIGGGKGGSDFDPKGKTDAEVMRFCQSFMTELQKHIGPSLDVPAGDIGVGGREIGYLYGQYKRLNQFDAGVLTGKPLGFGGSLIRPEATGYGLVYYTEEMLKANGNSFAGKKVVISGSGNVAQYALQKATELGATVISVSDSNGYVIDENGIDFDLLVDVKEKRRARLTEYAAEKATATYHEGTVWTYAGNYDIALPCATQNEINGEAAKRLVAQGVICVSEGANMPSDLDAIKVYKENGIFYGPAKAANAGGVAVSALEMSQNSLRLSWTREEVDGRLKDIMTNIFNTAKTTSETYGLDKDYLAGANIAAFENVANAMIAQGIV

SEQ ID NO: 2633 - DNA, 96 bp, Streptococcus pneumoniae
ttgctttaccgtactcaagtacagcctgcggctcgcttcctagtttgctctttgattttcattgagtataaaaagggtcaagtaagtatagtaaat

SEQ ID NO: 2634 - protein, 32 aa, Streptococcus pneumoniae
  conserved hypothetical protein
MLYRTQVQPAARFLVCSLIFIEYKKGQVSIVN

SEQ ID NO: 2635 - DNA, 168 bp, Streptococcus pneumoniae
atgaagaaagaaaatgaatatgtaattttaacaacagcctcactaggggtgatgattggaatagtgtttgcaatttttttagattttccagttgaatatggtatttctttaggcttgttgaatggaatagtattgggttcgctgattgtttacaaaaacaataagaat

SEQ ID NO: 2636 - protein, 56 aa, Streptococcus pneumoniae
  hypothetical protein; Cellular location: membrane; Similar to strain R6 sequence 15903225 (4.E-27)
MKKENEYVILTTASLGVMIGIVFAIFLDFPVEYGISLGLLNGIVLGSLIVYKNNKN

SEQ ID NO: 2637 - DNA, 345 bp, Streptococcus pneumoniae
atggctatgccgatgaaatttaatactatcatctcagagatggggtcaaatatttcaggtgggcaaaggcaacggatagcactggcacgtgcattaataaataatcctagtattgtaattttagatgaagcaactagtgcattagacactattaatgaggaaagaataacaaagtatatacaaagtcagggctgtactcaaataattgtagctcatagattgtcaacgattaaggatgcggatgttatttttgtaatgaaaggtggtaagattgttgagtcaggaaatcataagtacttaatggatcttggtggagagtactacagcttatatacaaaaaggaaa

SEQ ID NO: 2638 - protein, 115 aa, Streptococcus pneumoniae
  toxin secretion ATP-binding protein, truncation; Cellular location: cytoplasm; Similar to strain R6 sequence 15903226 (e-103)
MAMPMKFNTIISEMGSNISGGQRQRIALARALINNPSIVILDEATSALDTINEERITKYIQSQGCTQIIVAHRLSTIKDADVIFVMKGGKIVESGNHKYLMDLGGEYYSLYTKRK

SEQ ID NO: 2639 - DNA, 386 bp, Streptococcus pneumoniae
atgaaggctcaagcgattgtcacaagtcaagggagaattgtttctttggatatcactgtgaactattgtcatgatatgaagttgttcaaaatgagtcgcagaaatatcagacaagctggtaaaatcttggctgacagtggttatcaagggctcatgaagatatatcctcaagcacaaacttcacgtaaatccagcaaactcaaaccgctaacaattgaagataaagtctataaccatgcgctatctaaggagagaagcaaggttgagaacatctttgccaaagtaaaaacgtttaaaatgatttcaacaacctatcgaaatcatctaaacgcttcggattacgaatgaatttgattgctggtattatcaatcatgaactaggattc

SEQ ID NO: 2640 - protein, 115 aa, Streptococcus pneumoniae
  IS1381, transposase OrfB FRAMESHIFT
MKAQAIVTSQGRIVSLDITVNYCHDMKLFKMSRRNIRQAGKILADSGYQGLMKIYPQAQTSRKSSKLKPLTIEDKVYNHALSKERSKVENIFAKVKTFKMISTTYRNHLNASDYE

SEQ ID NO: 2641 - DNA, 396 bp, Streptococcus pneumoniae
atgaatgatgaagcaagtaaacaactaaccgatgcacgatttaagcgtcttgttggtgttcaacgcacgacttttgaagagatgttagctgtattaaaaacagcttatcaacttaaacacgcaaaaggtggacgaaaacctaaattaagtctagaagaccttcttatggccactcttcaatatgtgcgagaatatcgaacttatgaacaaattgcggctgtttttggtattcacgaaagcaacttaatccgtcggagccaatgggttgaagtaactcttgttcaaagtggtgttacgatttcaagaactcctctcagttctgaggacacggtaatgattgatgcgacggaagtaaaaatcaatcgccctaaaaaaagaattagcgaattattctgg

SEQ ID NO: 2642 - protein, 132 aa, Streptococcus pneumoniae
  IS1381, transposase OrfA FRAMESHIFT; Cellular location: cytoplasm; Similar to strain R6 sequence 15903037 (7.E-68)
MNDEASKQLTDARFKRLVGVQRTTFEEMLAVLKTAYQLKHAKGGRKPKLSLEDLLMATLQYVREYRTYEQIAAVFGIHESNLIRRSQWVEVTLVQSGVTISRTPLSSEDTVMIDATEVKINRPKKRISELFW

SEQ ID NO: 2643 - DNA, 105 bp, Streptococcus pneumoniae
atggtaaataagcctctaaaacctctttgtttacgagagtttcctcgtttggaagacattctagaagataggatagatatttctcgctatttaattgatgacgtt

SEQ ID NO: 2644 - protein, 35 aa, Streptococcus pneumoniae
  hypothetical protein
MVNKPLKPLCLREFPRLEDILEDRIDISRYLIDDV

SEQ ID NO: 2645 - DNA, 156 bp, Streptococcus pneumoniae
atgagtttgttggaaacagctaaacgtcatcaattaaatagcgagaaatatctatcctatcttctagaatgtcttccaaacgaggaaactctcgtaaacaaagaggttttagaggcttatttaccatggactaaagttgtacaagaaaagtgcaaa

SEQ ID NO: 2646 - protein, 52 aa, Streptococcus pneumoniae
  hypothetical protein
MSLLETAKRHQLNSEKYLSYLLECLPNEETLVNKEVLEAYLPWTKVVQEKCK

SEQ ID NO: 2647 - DNA, 102 bp, Streptococcus pneumoniae
ttgaaagacggacatctggtcctttccaataatctagctgaacgcgccattaaatcattggttatgggacggagtaaaagagtccagtggactcttttagcc

SEQ ID NO: 2648 - protein, 34 aa, Streptococcus pneumoniae
  hypothetical protein
MKDGHLVLSNNLAERAIKSLVMGRSKRVQWTLLA

SEQ ID NO: 2649 - DNA, 168 bp, Streptococcus pneumoniae
ttgaagcgcccccccaagcaagcggataaatcatccttaggagctaaaggtttagcttattgtgatcagttattttccttggaaagagactgggaggctttgccagctgatgaacgactacagaaacgtcaagaacatctccagcccttaatggaagacttctttgct

SEQ ID NO: 2650 - protein, 56 aa, Streptococcus pneumoniae
  hypothetical protein
MKRPPKQADKSSLGAKGLAYCDQLFSLERDWEALPADERLQKRQEHLQPLMEDFFA

SEQ ID NO: 2651 - DNA, 438 bp, Streptococcus pneumoniae
gtgaaatctcctattcctaaagcccctttagcgcataactttggctcagcttctattatcgctcacaccatccatcagaagtttaatctgaaggtacccaattatcgccaagaagaagattgggctaggatgggtttaccaatcacacgtaaggaaatctctaattggcatatcaaggcgagtcaatactatttggagcccctttataacctcttgcgagagagactattgactcagcccttacttcatgcggatgaaacttcttatagggtgctagagagtgatagtcagctgacttactattggacttttttgtcaggtaaagcagagaaacaagggattacgctttaccaccatgatcagtgtcgaagtggttcagtagtacaagaattcctaggagattattctggctatgtgcattgtgatattttgcggcag

SEQ ID NO: 2652 - protein, 146 aa, Streptococcus pneumoniae
  IS66 family element, Orf3, degenerate
MKSPIPKAPLAHNFGSASIIAHTIHQKFNLKVPNYRQEEDWARMGLPITRKEISNWHIKASQYYLEPLYNLLRERLLTQPLLHADETSYRVLESDSQLTYYWTFLSGKAEKQGITLYHHDQCRSGSVVQEFLGDYSGYVHCDILRQ

SEQ ID NO: 2653 - DNA, 150 bp, Streptococcus pneumoniae
atggacaatgctatatggcataaatcaagtaccttaaagattccgactaatattggctttgcatttattcctccatacacaccagagatgaaccccattgaacaagtgtggaaagagattcgtaaacgtggatttaagaataaagccttt

SEQ ID NO: 2654 - protein, 50 aa, Streptococcus pneumoniae
  transposase family protein, truncation POINT MUTATION; Cellular location: cytoplasm; Similar to strain R6 sequence 15903342 (6.E-38)
MDNAIWHKSSTLKIPTNIGFAFIPPYTPEMNPIEQVWKEIRKRGFKNKAF

SEQ ID NO: 2655 - DNA, 321 bp, Streptococcus pneumoniae
atgacaattcatctatctagcctaggggaggtctatctcgtgtgtgggaaaactgatatgagacaaggaatcgattcactggcttatctggttaaaacccactttgaattggatcctttctccggtcaagtctttctcttttgtggtggacgtaaagaccgctttaaagtcctttactgggatggtcaaggattttggctactatataaacgctttgagaacggcagattgatttggctaagtacagaaaaggatgtcaaagctctcacaccagaacaagtagactggcttatgaagggcttttctatcactccaaaaata

SEQ ID NO: 2656 - protein, 107 aa, Streptococcus pneumoniae
  IS66 family element, Orf2, interruption; Cellular location: cytoplasm; Similar to strain R6 sequence 15904060 (0.E+01)
MTIHLSSLGEVYLVCGKTDMRQGIDSLAYLVKTHFELDPFSGQVFLFCGGRKDRFKVLYWDGQGFWLLYKRFENGRLIWLSTEKDVKALTPEQVDWLMKGFSITPKI

SEQ ID NO: 2657 - DNA, 414 bp, Streptococcus pneumoniae
ttggataaggctttaagcctttctaagctttttttattgacagtatcaggatatctttttcaaaattttggtttgttagataatgaaaatgtttctactaatctagatttaggattagtaaatcgtaaatgtaattatatagaaagtaagcgcgtcataacaaggtatctatcattcatggagctcctcctgtatactattagtaaagtaaaactattggaggatattttaatgccacaacctattgttcctgtagagattccacaatctcgtcgttttgattctaaaaagagaaatgatattctgcttaaaattcgtattggcaagcttgaagtaagtttttttcaatctctcaatctcgaaatggtagaacagcttttggataaggtgttgctctatgacaattcatctatc

SEQ ID NO: 2658 - protein, 138 aa, Streptococcus pneumoniae
  IS66 family element, Orf1; Cellular location: cytoplasm; Similar to strain R6 sequence 15903342 (1.E-38)
MDKALSLSKLFLLTVSGYLFQNFGLLDNENVSTNLDLGLVNRKCNYIESKRVITRYLSFMELLLYTISKVKLLEDILMPQPIVPVEIPQSRRFDSKKRNDILLKIRIGKLEVSFFQSLNLEMVEQLLDKVLLYDNSSI

SEQ ID NO: 2659 - DNA, 609 bp, Streptococcus pneumoniae
atggtacgtttgaatgtaaaaccaactcgtatggaattgaataacttaaaggaacgtttgacaacagctgaacgtggacataagttattaaaggataaaagagatgaattgatgaggcgatttatttctttgattcgtgagaataatcaacttcggaaagaagtggaaagttatctaattgataatctaaaatcctttgcagttgctaaatcattaaagaattctcaaatggtggaggaattattttcaattccatcgaaagaaattgaattatttgttgagaaagaaaatatcatgagtgtaacagttcctagaatgcatatgaatattacttctcaaaatgagaacagtgaatacagctatttatcttctaatagtgaaatggatgatgtatttgctacaatgaatagtttaatttataaattactaagactggcagaagttgaaaaaacgtgtcagttaatggctgatgaaatagaaaaaacacgtagacgtgtaaatggtttagaatactcgattattccaaacttgtcggaaactattcattatatagaattgaaactagaggaggcagaaagagccaatttagttcgtattatgaaagtgaag

SEQ ID NO: 2660 - protein, 203 aa, Streptococcus pneumoniae
  v-type sodium ATP synthase, subunit D (ntpD); Cellular location: cytoplasm
MVRLNVKPTRMELNNLKERLTTAERGHKLLKDKRDELMRRFISLIRENNQLRKEVESYLIDNLKSFAVAKSLKNSQMVEELFSIPSKEIELFVEKENIMSVTVPRMHMNITSQNENSEYSYLSSNSEMDDVFATMNSLIYKLLRLAEVEKTCQLMADEIEKTRRRVNGLEYSIIPNLSETIHYIELKLEEAERANLVRIMKVK

SEQ ID NO: 2661 - DNA, 1383 bp, Streptococcus pneumoniae
atgagtgttataaaagaatacagaactgctagtgaagttgttgggcctcttatgattgttgaacaagtaaataatgtgtcttacaatgagttagttgaaattcaacttcataatggagaaattcgtcgtggacaagttttagagatccacgaagataaagcaatggttcagctttttgaaggatctagtggaataaatttagaaaagtctaaaattcgttttgctggtcatgcattagaattggctgtatctgaggatatggttggtcgtatttttaatgggatgggaaaaccaattgatggtggaccagatttaattccagagaaatatttagatattgatggtcaagctattaatcctgtatctagagattatccagatgaatttattcagacagggatctcctctattgatcatttgaatactcttgtacgtggtcaaaaattaccagtattttcaggttcgggcttacctcataatgaattagctgctcagatagcaagacaagcgactgttttaaattctgatgaaaattttgcggttgtatttgcagcaatgggtattacttttgaagaagctgagttttttatggaagaactcagaaaaacaggagcgatcgatcgttcggttttatttatgaacttggcaaatgatcctgcaattgagcgtattgcaactccccgcattgctttaactgcggcagagtatctagcttttgaaaaagatatgcacgttctagttatcatgacggatatgactaactattgtgaagcgttacgtgaagtctcggcagctcgccgtgaagttccagggagacgaggctatccgggatatttatatacaaatttatcaactctatacgaaagggctggtcgcttagttggtaaaaaaggttcggtgacacagattcctattttaacaatgccagaagatgacataacacatccaattcctgatttaactggatacattactgaagggcaaattattttgtcgcatgagttgtataatcaaggttatcgtccaccaatcaatgttttaccttctctctctcgattaaaagataagggatctggagaaggtaaaactcgtggagatcatgctccaactatgaatcaactgtttgcagcctatgcccaagggaaaaaggttgaagagttagcagtagtattaggagaatcggctttatctgatgtagataaattgtatgtgaggtttacaaagcgttttgaagaagagtacataaaccaaggattttataaaaatcgaaatatagaagatacgttgaatcttgggtgggaattactatcaattcttcctagaacagagttaaaacgtatcaaagatgatttgcttgataaatacttacctttggtagaagtt

SEQ ID NO: 2662 - protein, 461 aa, Streptococcus pneumoniae
  v-type sodium ATP synthase, subunit B (ntpB); Cellular location: cytoplasm; Similar to strain R6 sequence 15903405 (2.E-31)
MSVIKEYRTASEVVGPLMIVEQVNNVSYNELVEIQLHNGEIRRGQVLEIHEDKAMVQLFEGSSGINLEKSKIRFAGHALELAVSEDMVGRIFNGMGKPIDGGPDLIPEKYLDIDGQAINPVSRDYPDEFIQTGISSIDHLNTLVRGQKLPVFSGSGLPHNELAAQIARQATVLNSDENFAVVFAAMGITFEEAEFFMEELRKTGAIDRSVLFMNLANDPAIERIATPRIALTAAEYLAFEKDMHVLVIMTDMTNYCEALREVSAARREVPGRRGYPGYLYTNLSTLYERAGRLVGKKGSVTQIPILTMPEDDITHPIPDLTGYITEGQIILSHELYNQGYRPPINVLPSLSRLKDKGSGEGKTRGDHAPTMNQLFAAYAQGKKVEELAVVLGESALSDVDKLYVRFTKRFEEEYINQGFYKNRNIEDTLNLGWELLSILPRTELKRIKDDLLDKYLPLVEV

SEQ ID NO: 2663 - DNA, 1773 bp, Streptococcus pneumoniae
ttgactcaagggaagattataaaagtatcgggacctctagttattgcatcaggtatgcaggaggctaatattcaagatatttgccgtgtaggtaagctagggttaatcggtgaaattattgaaatgagaagagatcaggcatctatccaagtctatgaagaaacatctggtcttggtccgggagaacctgttgttacaactggagaacctctctcggttgaattagggccaggattgatttctcaaatgtttgatggcatacaacgcccattagatcgatttaaattggctactcataatgattttctagttcgtggggtagaagttccaagtttggatagagatattaagtggcattttgattccactatagcaattggtcaaaaagtgagtacgggtgatattcttggaactgtcaaggaaaccgaggtagttaatcataaaattatggttccttatggagtatctggagaagtcgtttctattgcatctggcgattttacaattgatgaagttgtatatgaaataaaaaaattggacggtagtttctataaaggaacgcttatgcaaaaatggcctgtccgcaaggcgcgtcctgtttctaaacgtttaattccagaagaaccattaatcacaggtcaacgagttattgatgcattctttccagtaaccaaagggggagctgcagcagttcctggaccgtttggagcaggaaagacagttgtacaacaccaagtagctaaatttgccaatgttgatattgttatttatgtcggttgtggagaacgtggaaatgaaatgacggatgtactgaatgagtttcctgagttgattgaccctaataccggacaatcaattatgcaacggacagttctgattgctaatacttcaaatatgcctgttgctgctcgtgaggcttcaatttatacaggaattaccatggctgagtattttcgtgatatgggctactctgtcgccattatggctgattcaacttcacgttgggcagaagcgctacgtgaaatgtcaggacgtctagaagaaatgcctggtgatgagggttatcctgcttatctgggaagtcgtatcgctgaatattatgaaagagcaggacgttctcaggttctagggcttccagaacgtgaaggaacgattactgctattggagctgtatcgccacctggtggagatatttcagaaccagttactcaaaacactttacggattgtgaaagttttttgggggcttgatgctccgttggcacagcgacgtcattttcctgcaattaactggcttacatcttattcactatataaagacagtgtgggcacttatatagatggtaaagagaagacagattggaatagtaaaataactcgtgcgatgaactacttacaacgggaatctagtttagaggaaattgttcgtcttgttggaattgattctctgtctgataatgaacgactaacgatggaaattgctaaacaaattcgagaagattatttgcaacagaacgcttttgattcggtagatacattcacttcgtttgcaaaacaagaagcaatgctaagtaatattctcacttttgctgatcaggcaaatcatgctttagagttgggttcttactttacagagattatggaaggtaccgtggcagttcgagaccgtatggcgagaagtaaatatgtttcagaagatagattagatgaaatcaaaattatatcaaatgagattacacatcaaattcatttgatattagaaacaggaggtcta

SEQ ID NO: 2664 - protein, 591 aa, Streptococcus pneumoniae
  v-type sodium ATP synthase, subunit A (ntpA); Cellular location: outside; Similar to strain R6 sequence 15903403 (3.E-30)
MTQGKIIKVSGPLVIASGMQEANIQDICRVGKLGLIGEIIEMRRDQASIQVYEETSGLGPGEPVVTTGEPLSVELGPGLISQMFDGIQRPLDRFKLATHNDFLVRGVEVPSLDRDIKWHFDSTIAIGQKVSTGDILGTVKETEVVNHKIMVPYGVSGEVVSIASGDFTIDEVVYEIKKLDGSFYKGTLMQKWPVRKARPVSKRLIPEEPLITGQRVIDAFFPVTKGGAAAVPGPFGAGKTVVQHQVAKFANVDIVIYVGCGERGNEMTDVLNEFPELIDPNTGQSIMQRTVLIANTSNMPVAAREASIYTGITMAEYFRDMGYSVAIMADSTSRWAEALREMSGRLEEMPGDEGYPAYLGSRIAEYYERAGRSQVLGLPEREGTITAIGAVSPPGGDISEPVTQNTLRIVKVFWGLDAPLAQRRHFPAINWLTSYSLYKDSVGTYIDGKEKTDWNSKITRAMNYLQRESSLEEIVRLVGIDSLSDNERLTMEIAKQIREDYLQQNAFDSVDTFTSFAKQEAMLSNILTFADQANHALELGSYFTEIMEGTVAVRDRMARSKYVSEDRLDEIKIISNEITHQIHLILETGGL

SEQ ID NO: 2665 - DNA, 318 bp, Streptococcus pneumoniae
atggaagctaataagtataaaattggcataattggtagccgtgatattattttaccatttagcatgattgggtttgatatatttcctgcctaccaagaacaagaagctataaatacactaagaaaattagctcaatctgattatggtgtcatttatatcactgaagacattgcttcaatgatattagatacaattcgccattatgattcccaagttgtgcctgctattattttattaccgactcataaacaaggtttaaatttaggattaaaacgtatagaggataatgtagagaaagcagtaggacacaatatttta

SEQ ID NO: 2666 - protein, 106 aa, Streptococcus pneumoniae
  v-type sodium ATP synthase, subunit G (ntpG); Cellular location: cytoplasm
MEANKYKIGIIGSRDIILPFSMIGFDIFPAYQEQEAINTLRKLAQSDYGVIYITEDIASMILDTIRHYDSQVVPAIILLPTHKQGLNLGLKRIEDNVEKAVGHNIL

SEQ ID NO: 2667 - DNA, 1005 bp, Streptococcus pneumoniae
atggatactaatcttttttcaaaaataaatacgacgatttcggtaaaagaaaacgattttattacagaagaaaaatttcaaaaaattatacaatccaaagatacggagacattggcatttatcttagaatcaactccctatcatttatcgattgacatcttagaagatcctagtcagacagagatttcgctaatgacaaaattagtcaatgattatagatgggcctatgctgaaagtccgtctgatataattgtgactttatttgctttacgatatgtttatcataatatcaaagttttattaaaatctaaggcggcaattaagaaagatttttctaaattattaattccaatagggatttttgatatagaaagtttaaaacatttagtttcttccttacattcagatacacttcctgattttatggttcgtgaagtagaatcaatttggaatgagtatgaaacttttaataatattcgtgtacttgatgtcggagctgatctagcatattttaaacatctgaaacttttatctaatgagttagatgaggtactgtctcaggttattgtcgaaatgattgacttttataatattattactgtaaaacgtggtttatctcaaaataagagtcatggggatattttacaattactttcagatgaaggaagtatttctgctaaagaatttatatacattgtagaaaatcaagaaatatttgtgtggttcaataaaataaatccaagcttagattcaatcttttcaacttatgaattgaagatgcaggacgcaacaatttcatcttctgagttagaatttttatgtgatttactattgtataaaactttagatcaaggaaggtacaatgtagaggggccgttagttcttgctagatatttattgggatgtgagtttgaagtaaagaatctcagaatgatcatatcagctcttcaaaatacaattccctttgaatcaataaaagaaaggatacgcccacattatggaagc

SEQ ID NO: 2668 - protein, 335 aa, Streptococcus pneumoniae
  v-type sodium ATP synthase, subunit C (ntpC); Cellular location: cytoplasm
MDTNLFSKINTTISVKENDFITEEKFQKIIQSKDTETLAFILESTPYHLSIDILEDPSQTEISLMTKLVNDYRWAYAESPSDIIVTLFALRYVYHNIKVLLKSKAAIKKDFSKLLIPIGIFDIESLKHLVSSLHSDTLPDFMVREVESIWNEYETFNNIRVLDVGADLAYFKHLKLLSNELDEVLSQVIVEMIDFYNIITVKRGLSQNKSHGDILQLLSDEGSISAKEFIYIVENQEIFVWFNKINPSLDSIFSTYELKMQDATISSSELEFLCDLLLYKTLDQGRYNVEGPLVLARYLLGCEFEVKNLRMIISALQNTIPFESIKERIRPHYGS

SEQ ID NO: 2669 - DNA, 579 bp, Streptococcus pneumoniae
atgagcaatttagaaaacttacgagagtctgttattgaacaagctcatgaaaaagggcgtatgaaattattggattccaaaaagaagattgatgatgaatttgaaatgcaaaagtcgctcattataaagaaaaaagaagctgaacatgaacgaaagttaaaagaattgcaacagaaatatcaaataatttttcaacaattaaaaaataaggaacgccaatcaacgttagtatcaaaacagaaaatattaaaagaactttttcaatctgctttactagaaatggaatcttggagtgcagataaagaaatggagttcatctatcgaattctggaacgatattcacaacaagaggtcatagtaacctttggggaacggactttagctaaattcaatttggaacaattagagaaattgaaattctcttttccaaattatttatttagtgaacaacctatctcaaatgaatcaggcttacttatttcaataggtaaaattgatgataactatttgtataaaacattaattggatcgatttctaaggaagaaagttcaagtatcgcaaatcaaatttttatcaat

SEQ ID NO: 2670 - protein, 193 aa, Streptococcus pneumoniae
  v-type sodium ATP synthase, subunit E (ntpE); Cellular location: cytoplasm
MSNLENLRESVIEQAHEKGRMKLLDSKKKIDDEFEMQKSLIIKKKEAEHERKLKELQQKYQIIFQQLKNKERQSTLVSKQKILKELFQSALLEMESWSADKEMEFIYRILERYSQQEVIVTFGERTLAKFNLEQLEKLKFSFPNYLFSEQPISNESGLLISIGKIDDNYLYKTLIGSISKEESSSIANQIFIN

SEQ ID NO: 2671 - DNA, 474 bp, Streptococcus pneumoniae
atggaacatttagcaacttatttttcaacctatggaggagctttcttcgctgcattgggaattgtattggcggttggattaagcggtatggggtctgcttatggagttggtaaggctgggcaatctgccgcagctttactgaaagaacagcctgaaaagtttgcctcagctttgatattgcaattattgcccggaacacaaggattatatggttttgttattggaattttaatttggttgcaattaactccagaacttcctttagaaaaaggcgttgcttatttctttgtagctcttccaattgctattgtaggatacttttcagctaagcatcaaggaaatgtagcagtagcgggaatgcaaatcttggctaaaagaccaaaagaattcatgaagggagcaattttagctgccatggtagaaacctatgcaattcttgcttttgtcgtatcattcattttgacccttcgtgta

SEQ ID NO: 2672 - protein, 158 aa, Streptococcus pneumoniae
  v-type sodium ATP synthase, subunit K (ntpK); Cellular location: membrane
MEHLATYFSTYGGAFFAALGIVLAVGLSGMGSAYGVGKAGQSAAALLKEQPEKFASALILQLLPGTQGLYGFVIGILIWLQLTPELPLEKGVAYFFVALPIAIVGYFSAKHQGNVAVAGMQILAKRPKEFMKGAILAAMVETYAILAFVVSFILTLRV

SEQ ID NO: 2673 - DNA, 1989 bp, Streptococcus pneumoniae
atggccattagtcagatgaaaagaatctctctactattttctaaaagtagtcttgatgatgttttaaaaactattcaagaactagagtcagtgcagttccgtgatttaaaggttcaggataactggtcagaagctctagaaaaagatgaagttgtatttccaactattcaaatttttcatacttctaattccaatcatggggttattgagggaaatgatgccttgacttatttgatgaatcaacaacaacatttagaagcaactgtagagaaattacaagaatacctaccgaaagaaaacacgtttaaattattgcagcaacctccgataactacctcttatgaagaattagagaaatttggtaaagctaatgttgctgagggtgttcttaaaaaagtgaatcatcaaattaacagagttcatgaattagaaagacacattcaaagtaataatgaggaaatagagcgattaataaagtgggaaaaattagaaattgttcctgcgaatttagaacaattttctttctgtaaaggaaaagtcggaacaattccaaggactgaagataatcgcttatacaatagtcttttagaaaacaatattgaagttcaagaaatattttctaatgatagagagtacggtgttgttgttttctatcagtctagttactctatagattttgatgaatacttatttgaaccatttgattattctagaaaggaattaccgaagcagcgagtagtagatttagatcaagaaaacatgcagttaataactgaaaaagagaatattatcgcatcgttgcaagattcaaagaaatatttgatagatttacaatggcaaatagactatattttatctatctatgctcgtcaaatctctaagaataactttttgtgcactccgcatctagttgcattagaaggatggatagaagaaactcgtattttatattttataaaagttatggatgagcattttggacattctatttatatttatgaatcggaaacattgacggataatcaagatgaaatacctatcaaattaacgaatcattctttaattgaaccatttgaattattgacagaaatgtatgctctgcccaaatattatgagaaagatcctacacctgtattagcaccattttactttacattttttggaatgatggttgctgatttaggctatggtttactattgtttttaggaacaatgttagcattaaaaatttttcatctaccttcagcaactaagagatttttaaaattctttaatatattaggggtagccgttgcaatttggggtggaatctatggctcattttttggatatgagttgccatttcatctgatatctacaacctctgatgtcatgactatattagtagtgtcagttgtgtttgggtttattacagtatttgcaggtttgttagcttcaggactacaaaaagtaagaatgaataaatatgcagaagcatataattcaggatttgcgtggtgtgttattctgcttggcttgttatttattgctgttggaatgttgatgcctgatatgagaccgttatttgtattagggaaatgggtatctatttttaatgctgtggggattttgattgtttctattattcaaaccaaaagcttgtcaggtattggagcaggattgtttaatctatataacatttcatcttatataggtgatttagttagtttcactcgattgatggcattaggattatctggagcaagtatagcatcagctttcaatttaattgttggtttgtttccgggaatattggctaaactgacaattggattagtattattcattcttttacatgcgatcaatatttttctatcgttactatcaggatatgttcatggagcacgtctgatatttgttgaattttttggtaagttttatgagggtggaggaaaaccatttcaacctttgaaggcttctgagaaatatattaaggttattacaaagaat

SEQ ID NO: 2674 - protein, 663 aa, Streptococcus pneumoniae
  v-type sodium ATP synthase, subunit I (ntpI); Cellular location: membrane
MAISQMKRISLLFSKSSLDDVLKTIQELESVQFRDLKVQDNWSEALEKDEVVFPTIQIFHTSNSNHGVIEGNDALTYLMNQQQHLEATVEKLQEYLPKENTFKLLQQPPITTSYEELEKFGKANVAEGVLKKVNHQINRVHELERHIQSNNEEIERLIKWEKLEIVPANLEQFSFCKGKVGTIPRTEDNRLYNSLLENNIEVQEIFSNDREYGVVVFYQSSYSIDFDEYLFEPFDYSRKELPKQRVVDLDQENMQLITEKENIIASLQDSKKYLIDLQWQIDYILSIYARQISKNNFLCTPHLVALEGWIEETRILYFIKVMDEHFGHSIYIYESETLTDNQDEIPIKLTNHSLIEPFELLTEMYALPKYYEKDPTPVLAPFYFTFFGMMVADLGYGLLLFLGTMLALKIFHLPSATKRFLKFFNILGVAVAIWGGIYGSFFGYELPFHLISTTSDVMTILVVSVVFGFITVFAGLLASGLQKVRMNKYAEAYNSGFAWCVILLGLLFIAVGMLMPDMRPLFVLGKWVSIFNAVGILIVSIIQTKSLSGIGAGLFNLYNISSYIGDLVSFTRLMALGLSGASIASAFNLIVGLFPGILAKLTIGLVLFILLHAINIFLSLLSGYVHGARLIFVEFFGKFYEGGGKPFQPLKASEKYIKVITKN

SEQ ID NO: 2675 - DNA, 321 bp, Streptococcus pneumoniae
atgactaactctgtattttcgacaatgcaagatattgagaatgttgcaaccgatattataaaatcatatgataatgagatttatacttataaagctgtttcccaagaagaattggaaaaactagaaaaaagttatgatgaaaaaagtcacgaagaattagtttcaatagaaagcaatttagaaatgaaacaacagaaccttattgatgaggttaataaaacaatcaaggaaaatgatgcaaatattcagtatatttcatcaagtaggagaggagaatttgtagaaaaaattattggtagggtggtagaaaaatatggccat

SEQ ID NO: 2676 - protein, 107 aa, Streptococcus pneumoniae
  hypothetical protein; Cellular location: cytoplasm
MTNSVFSTMQDIENVATDIIKSYDNEIYTYKAVSQEELEKLEKSYDEKSHEELVSIESNLEMKQQNLIDEVNKTIKENDANIQYISSSRRGEFVEKIIGRVVEKYGH

SEQ ID NO: 2677 - DNA, 888 bp, Streptococcus pneumoniae
atgaagattataggtatcgatattggcggaacaacaattaaggcagatttatacgatgagtttggaacgagtttgaatcatttcaaagagatagaaacaattattgactatgatttgggaacgaatcagatattaaatcaggtctgtgatttaattggtgagtatactttaaatcattcaattgatggtgttgggatttccactgctggagttgttaatgctaatactggagaaatcatctatgcaggctatacaataccagggtatatcggagtaaactttactgccgaaatagaaaaacgttttgggttgtatacttttgttgaaaatgatgttaattgtgctgcattaggtgaattgtggaagggacaagccaaagataagaaaaatgtagtaatggttactattggaacaggtataggaggcagtattattgtcaacggacaaattgttaacggatttaactatactgctggtgaagtaggttatattcctgtaggtaattcggattggcaaagtaaagcctcaacaaccgcattgattcatttatatcaaaaaaagagcttgaaaactaatcaaactggacgtactttcttcactgatttaagatctggagataaagttgctgaagaaacttttgaaatttttgtagaaaatctaacaaaaggtttattaacgatttcttatctacttaatccagaaattctcatattaggaggtgggattctggatagtaaggatattttgttacctgaaattcaaagttctttagctaaaaatgcaatggataataggtttttacctaaaaatcttgtggcagctacattaggaaatgaagctggtcgtataggagctgtaaaaaatttcttagatagaatttctaataaa

SEQ ID NO: 2678 - protein, 296 aa, Streptococcus pneumoniae
  ROK family protein; Cellular location: membrane; Similar to strain R6 sequence 15903562 (2.E-47)
MKIIGIDIGGTTIKADLYDEFGTSLNHFKEIETIIDYDLGTNQILNQVCDLIGEYTLNHSIDGVGISTAGVVNANTGEIIYAGYTIPGYIGVNFTAEIEKRFGLYTFVENDVNCAALGELWKGQAKDKKNVVMVTIGTGIGGSIIVNGQIVNGFNYTAGEVGYIPVGNSDWQSKASTTALIHLYQKKSLKTNQTGRTFFTDLRSGDKVAEETFEIFVENLTKGLLTISYLLNPEILILGGGILDSKDILLPEIQSSLAKNAMDNRFLPKNLVAATLGNEAGRIGAVKNFLDRISNK

SEQ ID NO: 2679 - DNA, 1137 bp, Streptococcus pneumoniae
ttgaaaatatataaaaagaggataaaaattatggtaaattacggtattgttggagctggatattttggagctgatttagctcgctcaatgaacaaaattgaagatgcaaaagtggttgcggtatttgacccaaatcatggagaagaagttgctcaagagttgggatcagatgtttgtgcaagtttagatgaacttgtagcacgtgaagatattgattgtgtgatcgtagcttcacctagctaccttcaccgtgaaccagttgtgaaagctgctcaacatggcaaacacgtattttgtgaaaagccaattgcattgtcttatgaagattgtaaagccatggttgacgcatgtaaagaaaataatgtcatctttatggctggtcacatcatgaacttctttaacggtgtacaccatgctaaagaattgattactcaaggtaaaatcggtaaagttctttattgccatgctgctcgtacaggttgggaagaacaacaaccaactgtatcatggaagaaacttcgttctcaatctggaggacatttgtaccaccatattcatgaattagattgcattcagtttatcatgggaggacttcctgaaaaagcgacaatggtaggaggcaatgtatatcataaaggtgaaaactttggtgatgaagatgatatgctcattgtaaacttagaatactctgatgatcgttatgctgttttggaatatggtaatgctttccgttggggtgaacactacgtcttgattcaaggaactgaaggagctatcaaacttgacttgttcaatactggcggtactcttcgtgttaaaggtgaaggagaatcacacttcttagttcatgaaactcaagaggaagatgatgatcgtacagctatctataccggtcgtggtatggatggagcaattgcgtacggtaaaccaggagtacgttgcccattatggttgcaaacatgtattgataaagaaatggaatatctacatgacatcattaaaggtggagaaattacagaagaatttgaaaaacttctcaatggtgtagctgctttagaatcaatcgctaccgctgatgcatgtactttatcagttaaagaagatcgaaaagtaagtctttcagaaatcacaaatgct

SEQ ID NO: 2680 - protein, 379 aa, Streptococcus pneumoniae
  oxidoreductase, Gfo/Idh/MocA family; Cellular location: outside; Similar to strain R6 sequence 15903573 (e-161)
MKIYKKRIKIMVNYGIVGAGYFGADLARSMNKIEDAKVVAVFDPNHGEEVAQELGSDVCASLDELVAREDIDCVIVASPSYLHREPVVKAAQHGKHVFCEKPIALSYEDCKAMVDACKENNVIFMAGHIMNFFNGVHHAKELITQGKIGKVLYCHAARTGWEEQQPTVSWKKLRSQSGGHLYHHIHELDCIQFIMGGLPEKATMVGGNVYHKGENFGDEDDMLIVNLEYSDDRYAVLEYGNAFRWGEHYVLIQGTEGAIKLDLFNTGGTLRVKGEGESHFLVHETQEEDDDRTAIYTGRGMDGAIAYGKPGVRCPLWLQTCIDKEMEYLHDIIKGGEITEEFEKLLNGVAALESIATADACTLSVKEDRKVSLSEITNA

SEQ ID NO: 2681 - DNA, 2220 bp, Streptococcus pneumoniae
atgaaaaaaaatattaaacaatatgtaaccttaggtactgtagtggtattatcagcatttgttgctaactcagttgcagctcaggagactgaaacttctgaagtatcaacaccaaagttggtgcaacctgttgcaccaacgactccgatttcggaagtacaacctacatcggataactcttcggaagttactgtacaacctcgaacagttgaaactactgttaaggatccatcttctacagcggaagaaactcctgtcttagaaaaaaataatgttactttaacagggggcggagaaaatgttactaaagagttaaaggataaatttactagcggtgactttactgtagtgattaagtacaatcagtcaagtgagaaaggcttacaagctctgtttggaatatctaattccaaacccggtcaacaaaatagttatgtagatgtgttccttagagacaatggtgagttggggatggaagcgcgtgatacttcttccaataaaaataacctagtatccagacctgcttcagtttggggtaagtacaaacaagaggctgtgactaacactgttgcagtagtagcagattcagtcaaaaaaacatattctttatacgcaaatggtacaaaagtagtagaaaagaaagtggataatttcctaaacatcaaggatattaaaggtattgattactatatgcttgggggagtgaaacgtgcaggaaaaacggcgtttggttttaacggaacactagaaaatatcaaattctttaatagtgcattggatgaagaaactgttaaaaagatgacaacaaacgctgttactggacatttaatttatacggctaatgatacaacaggttctaactatttccgtattccagttctgtatacttttagcaatggtcgggtattttcaagcattgacgctcgttacggtggaactcatgatttcttgaataaaattaatattgctacaagttatagtgatgataatggtaagacatggactaaaccaaaattaacattggcattcgatgattttgcgccagtaccattagaatggcctcgtgaagttggtggacgtgacttacaaatcagcggtggtgcaacctatattgactctgttattgttgaaaaaaagaacaaacaagtactcatgtttgctgatgtgatgcctgctggagtaagttttagagaagcaactagaaaagattcaggttataaacaaattgatggtaattattaccttaaattaaggaaacaaggtgatactgattacaattatactattcgtgagaatggtactgtatacgacgatcgtaccaacagaccaactgaattttcagtagataaaaatttcggtattaaacaaaatggtaattatttgacggtagagcaatattcggtttcatttgaaaataataaaaagactgaatatcgtaatgggactaaagtccatatgaatatcttctacaaagatgcattgtttaaagtagtgccaacgaactatattgcatatatttctagcaatgatcatggcgaatcttggtctgcaccaactttattacctcctataatgggacttaatcggaatgcgccatatttaggtcctggacgtggaatcattgaaagctcaactggacgtattcttattccgtcttacactggtaaagagtctgcgttcatttatagtgacgataatggagcatcttggaaagttaaagtagtgccacttccttctagttggtcagcagaagcacaatttgtagaattgagtccaggagtaattcaagcatatatgcgtacaaataatggtaaaattgcatatttaacaagtaaagacgcaggtactacttggagtgcaccggaatatttgaaatttgtttcaaatccaagttatggaacacaattatcaatcatcaattatagccaattgattgatggtaaaaaggctgtcattttaagtactccaaactccacaaatggtcgtaaacacggacaaatttggattggtctaattaatgatgataatacaattgattggcgttatcatcacgacgttgattatagtaactatggatactcatattcaacattgacagagttaccaaatcatgaaattggattgatgtttgaaaaatttgattcatggtctcgtaatgaacttcatatgaaaaatgttgtaccatatataacatttaagattgaagatctgaaaaagaat

SEQ ID NO: 2682 - protein, 740 aa, Streptococcus pneumoniae
  neuraminidase, putative; Cellular location: outside; Similar to strain R6 sequence 15903574 (0.E+01)
MKKNIKQYVTLGTVVVLSAFVANSVAAQETETSEVSTPKLVQPVAPTTPISEVQPTSDNSSEVTVQPRTVETTVKDPSSTAEETPVLEKNNVTLTGGGENVTKELKDKFTSGDFTVVIKYNQSSEKGLQALFGISNSKPGQQNSYVDVFLRDNGELGMEARDTSSNKNNLVSRPASVWGKYKQEAVTNTVAVVADSVKKTYSLYANGTKVVEKKVDNFLNIKDIKGIDYYMLGGVKRAGKTAFGFNGTLENIKFFNSALDEETVKKMTTNAVTGHLIYTANDTTGSNYFRIPVLYTFSNGRVFSSIDARYGGTHDFLNKINIATSYSDDNGKTWTKPKLTLAFDDFAPVPLEWPREVGGRDLQISGGATYIDSVIVEKKNKQVLMFADVMPAGVSFREATRKDSGYKQIDGNYYLKLRKQGDTDYNYTIRENGTVYDDRTNRPTEFSVDKNFGIKQNGNYLTVEQYSVSFENNKKTEYRNGTKVHMNIFYKDALFKVVPTNYIAYISSNDHGESWSAPTLLPPIMGLNRNAPYLGPGRGIIESSTGRILIPSYTGKESAFIYSDDNGASWKVKVVPLPSSWSAEAQFVELSPGVIQAYMRTNNGKIAYLTSKDAGTTWSAPEYLKFVSNPSYGTQLSIINYSQLIDGKKAVILSTPNSTNGRKHGQIWIGLINDDNTIDWRYHHDVDYSNYGYSYSTLTELPNHEIGLMFEKFDSWSRNELHMKNVVPYITFKIEDLKKN

SEQ ID NO: 2683 - DNA, 456 bp, Streptococcus pneumoniae
atgattatttctgaacaatctgattttaaacgatatgcttctgtcaataaatatttttcaaaagtctgtgattttttagaaaatacaaatttgacagatttagttgatggaaaaattgatattgacggggaaaatgtttttgcaaattgtatgacttatctagctgatggagttccaggagatatttttgaaactcataagaaatatttagatattcatattgttgttgaaaatactgaaaaaatggcagtaacttccccagttcgtgcccagtcacgtgtaccttttagcgaagagaaggatattgctttttacgatagcaaagactatcaaattgttgaattgcttccagggaatatgttggtgacttttgaagaagatcttcaccaaccaaagattcattgcaatgatgaaactgttaaaaaacttgttatcaaagttttaaacgaggaaaaa

SEQ ID NO: 2684 - protein, 152 aa, Streptococcus pneumoniae
  conserved hypothetical protein; Cellular location: cytoplasm; Similar to strain R6 sequence 15903578 (3.E-41)
MIISEQSDFKRYASVNKYFSKVCDFLENTNLTDLVDGKIDIDGENVFANCMTYLADGVPGDIFETHKKYLDIHIVVENTEKMAVTSPVRAQSRVPFSEEKDIAFYDSKDYQIVELLPGNMLVTFEEDLHQPKIHCNDETVKKLVIKVLNEEK

SEQ ID NO: 2685 - DNA, 1539 bp, Streptococcus pneumoniae
atgggcacaacaggatttacaataattgacttaattatcttgattgtttatttacttgcggtgttggttgcaggtatctatttctctaaaaaagagatgaaaggaaaagagttctttaaaggagatggttcggttccttggtatgttacttcggtatccatttttgccacaatgctcagtccgatttccttcttgggactcgctggtagctcttatgcaggtagctggattttatggtttgctcaattagggatggtagtagctattccactgacaattcgttttatcttacctatctttgcacggatagacatcgatacggcatatgattacttggataaacgttttaattctaaagcacttcgtattatttcagcactcttgtttattatttatcaattgggacgtatgtctatcattatgtacctcccatcagctggtttatcagtattgacaggaattgacatcaatattttgattattttgatgggtgtagttgcaattgtttattcttatactggtggtctaaaatccgtattatggacagactttattcaaggtgtgattctgattagtggtgtcgttttagctttatttgtactgattgctaatattaaaggtggctttggtgcagtagcagaaacattagcaaacgggaaattccttgctgcaaatgaaaaacttttcgatcctaacttgctttcaaactccatctttttaattgtgatgggttcaggctttacaatcttgtcttcctatgcttcatctcaagatttggttcaacgttttactacaacacaaaatattaagaaacttaataagatgttgttcacaaacggtgttttgtcacttgcaactgcaacagtcttttacttgattggtacaggcttgtacgtattctatcaagtacaaaatgcagatagtgcagctagcaatatccctcaagaccaaatctttatgtactttattgcataccagttaccagtaggtatcacaggtttgatcttggcagcgatttatgcagcatctcaatcaactatttcaacaggtttgaactctgttgcaacttcatggacattggatattcaagatgtcatttctaaaaatatgtcagacaatcgtcgtacgaaaattgcacaattcgtatctctagcagtaggtttattctcaattggtgtttccattgtcatggctcactcagatattaaatctgcatacgaatggttcaatagtttcatgggacttgtacttggtctacttggtggtgtatttattcttggatttgtttctaaaaaagcaaataaacaaggtgcttatgcagcgctgattgtatcaaccatcgtcatggtatttattaaatacttccttcctccaacagctgttagctactgggcatattcattgatttcaatctctgtatcagtagtttcaggttatattgtatctgttcttactggaaataaagtatctgcacctaaatatacaacgattcatgatattacagaaattaaagcggattcaagttgggaagttcgtcac

SEQ ID NO: 2686 - protein, 513 aa, Streptococcus pneumoniae
  sodium:solute symporter family protein; Cellular location: membrane
MGTTGFTIIDLIILIVYLLAVLVAGIYFSKKEMKGKEFFKGDGSVPWYVTSVSIFATMLSPISFLGLAGSSYAGSWILWFAQLGMVVAIPLTIRFILPIFARIDIDTAYDYLDKRFNSKALRIISALLFIIYQLGRMSIIMYLPSAGLSVLTGIDINILIILMGVVAIVYSYTGGLKSVLWTDFIQGVILISGVVLALFVLIANIKGGFGAVAETLANGKFLAANEKLFDPNLLSNSIFLIVMGSGFTILSSYASSQDLVQRFTTTQNIKKLNKMLFTNGVLSLATATVFYLIGTGLYVFYQVQNADSAASNIPQDQIFMYFIAYQLPVGITGLILAAIYAASQSTISTGLNSVATSWTLDIQDVISKNMSDNRRTKIAQFVSLAVGLFSIGVSIVMAHSDIKSAYEWFNSFMGLVLGLLGGVFILGFVSKKANKQGAYAALIVSTIVMVFIKYFLPPTAVSYWAYSLISISVSVVSGYIVSVLTGNKVSAPKYTTIHDITEIKADSSWEVRH

SEQ ID NO: 2687 - DNA, 915 bp, Streptococcus pneumoniae
atgaaagatttaactaaatacaaaggcgttatccctgcattttatgcttgctatgatgaaaatggtgaaattagccaagatcgtgtaaaatctctggtacaatatttcattgacaaaggtgtaaaaggtatctatgtaaatggttcttcaggtgaatgtatttaccaaagtgtagaagatcgtaaacaaattattgaagctgttatggaagttgctaaaggtaaattaacagttatcaaccatattgcatgtaataacacgaaagatagtatcgaattggcaaaacattcagaaagtgttggagtcgatgctattgcagctatcccacctatttatttcaaattgccagagtattcaatcgcagcatattggaatgcaatgagtgaagctgcgtcaaatacagattttattatctataatattccacaattggcaggggttgcgttgactggtagtttgtatgcaacaatgcgtcaaaatcctcgtgtgattggagttaaaaattcttctatgcctgtacaagatattcaaatgtttgtagctgcaggtggagaagattacattgtattcaatggtccagatgaacaatatcttggtggtcgcttgatgggagcagaagctggtattggtggtacttatggcgttatgccagatttgttcttgaaattggaaagtttgattcaagaacgagatttagatacagctaaaaaacttcaatatgctatcaatgaagttatctataagatgatatcaggtaaggcaaatatgtatgctgtagcaaaagaagttttgcgtctaaatgaaaaacttgatttaggttctgttcgtcaacctttagaagcattggcagaaggtgacttggaagttgcaaaacaagcagcagaacttattcaacaagcacgaaaagaattttta

SEQ ID NO: 2688 - protein, 305 aa, Streptococcus pneumoniae
  N-acetylneuraminate lyase; Cellular location: cytoplasm; Similar to strain R6 sequence 15903563 (8.E-97)
MKDLTKYKGVIPAFYACYDENGEISQDRVKSLVQYFIDKGVKGIYVNGSSGECIYQSVEDRKQIIEAVMEVAKGKLTVINHIACNNTKDSIELAKHSESVGVDAIAAIPPIYFKLPEYSIAAYWNAMSEAASNTDFIIYNIPQLAGVALTGSLYATMRQNPRVIGVKNSSMPVQDIQMFVAAGGEDYIVFNGPDEQYLGGRLMGAEAGIGGTYGVMPDLFLKLESLIQERDLDTAKKLQYAINEVIYKMISGKANMYAVAKEVLRLNEKLDLGSVRQPLEALAEGDLEVAKQAAELIQQARKEFL

SEQ ID NO: 2689 - DNA, 699 bp, Streptococcus pneumoniae
atgagccaaatttggactaaagaaaaatttataagccaagttcaaggtggagtcattgtttcttgtcaagctttacctggtgaagccctttataatgaagaatttagcttgatgccttttatggctaaagcagctttagaggcaggagcagtgggcattcgcgcaaattctgtgcgtgatattaaagcaattcagaaagtagtagatttaccaataattggaattatcaaaagggattatccacctcaagaaccatatattactgctacgatgaaagaagtagatgaacttgtagaatgcggaacaacagtcattgcatttgatgcaactttaagaccaagatatgatggcttagttgtcagtgaatttatcaaaaaaataaaagaaaaatatccgaatcaattgctgatggcggatgtaagtaatttagatgaaggtctctatgcatttaaatcaggcgttgattttgttggtacaacattatcaggttacacaagtacaagtgtacaatcagatgagcctgattttgaactaatgaaaaaattggctgattttaatattccggtaattgccgaaggaaaaattcattatccagaacaattaaaaaaagcttatagtttaggtgttaccagtgtagtcattggtggagcgattacacgtccaaaagaaattgctcagcgatttattaatgtcatcaaa

SEQ ID NO: 2690 - protein, 233 aa, Streptococcus pneumoniae
  N-acetylmannosamine-6-P epimerase, putative (nanE); Cellular location: outside; Similar to strain R6 sequence 15903572 (9.E-82)
MSQIWTKEKFISQVQGGVIVSCQALPGEALYNEEFSLMPFMAKAALEAGAVGIRANSVRDIKAIQKVVDLPIIGIIKRDYPPQEPYITATMKEVDELVECGTTVIAFDATLRPRYDGLVVSEFIKKIKEKYPNQLLMADVSNLDEGLYAFKSGVDFVGTTLSGYTSTSVQSDEPDFELMKKLADFNIPVIAEGKIHYPEQLKKAYSLGVTSVVIGGAITRPKEIAQRFINVIK

SEQ ID NO: 2691 - DNA, 807 bp, Streptococcus pneumoniae
atgttactgcaaaaagaactaattccaatgatagaagctaacttaccaaatatggcatatgctgaaaaagacattgctaaattcttcttaaaacagcaacctctgaatgattattcatctaaagcattgtgcgaataccttaatgtatccaaagcaacattgactcgatttgcgaaaaaatgtggttttaaaggttttagacaattcattttcaaataccaagagatgattcatgagaaagaaaagttggcattatatacagaggcaacagaaaaagttttatccgactatgaggaaatgttgagaaaaacttacacggttcttgatgaagttcaacttgagcgtattgctgagatgatagaaactgctgagcgtgtatatctctacggtaaaggaagttctgttcttgctttacaagaaatgaagatgagatttatgcgtctcggagtgattggtgaagtattatcagacgaggatatgattttgtggagtagcttactacttaatgaaaattgccttgtcattggagcatccatttcaggtcaaactgatattgtactagaaggtctacaaaaagctgcagataaaggcgctaaaacagttttaatgactacaagaaaatttgacgaagaagattgtttctttgatgaactattgttattagcttcgaccgatcatctctcgtatggcaatcgcatatcacctcagtttccaatacttttaattacagactgcttattctctaattatctggaaagtccagagagacaatattattacaatcaaactattatccataaggaggaa

SEQ ID NO: 2692 - protein, 269 aa, Streptococcus pneumoniae
  phosphosugar-binding transcriptional regulator, putative; Cellular location: cytoplasm; Similar to strain R6 sequence 15903561 (1.E-54)
MLLQKELIPMIEANLPNMAYAEKDIAKFFLKQQPLNDYSSKALCEYLNVSKATLTRFAKKCGFKGFRQFIFKYQEMIHEKEKLALYTEATEKVLSDYEEMLRKTYTVLDEVQLERIAEMIETAERVYLYGKGSSVLALQEMKMRFMRLGVIGEVLSDEDMILWSSLLLNENCLVIGASISGQTDIVLEGLQKAADKGAKTVLMTTRKFDEEDCFFDELLLLASTDHLSYGNRISPQFPILLITDCLFSNYLESPERQYYYNQTIIHKEE

SEQ ID NO: 2693 - DNA, 585 bp, Streptococcus pneumoniae
atgaaaagaataattccagtttatatattccaacaagtaaatgtcctattggtatctctatacttattgaaatttctttgtatcggtgagttaactatactacaggttctctatggtgcgtctcttttttcttttttatggatgtatggtcaacgaaaacaagtggtcaaggtcaatatgaaaactaggatgaaatgccttggtattggactagctagtctactgattataagtctatgttttagcctgattcatgctcaaggaagcacgaatcaaacaaatttaattggccttcaacatcaagttccttggttttcatttttattgttcttaatcaatgcgagtatggttgaagaatttctgtatcgtgaaattttatggaacttggttagaaaattagatattcgagttgctttgacaagtgttttatttgccttagtacatcatccaggaaccattctagcttggtgtctgtacgtttcacttggaatgtttttaggtatggtgcgctataaatctgacttatggggaagtatggggttacatttggtgtggaactttttagtttatagtttgctgcttttt

SEQ ID NO: 2694 - protein, 195 aa, Streptococcus pneumoniae
  conserved domain protein; Cellular location: membrane; Similar to strain R6 sequence 15903249 (e-100)
MKRIIPVYIFQQVNVLLVSLYLLKFLCIGELTILQVLYGASLFSFLWMYGQRKQVVKVNMKTRMKCLGIGLASLLIISLCFSLIHAQGSTNQTNLIGLQHQVPWFSFLLFLINASMVEEFLYREILWNLVRKLDIRVALTSVLFALVHHPGTILAWCLYVSLGMFLGMVRYKSDLWGSMGLHLVWNFLVYSLLLF

SEQ ID NO: 2695 - DNA, 231 bp, Streptococcus pneumoniae
atggctgaacgattttgggagaacttgtccattattttggctgaaagaaatatcagctggattgagttaaccagaaaaatgtttgcgggagagtttcactatccaagtgaattgaatcgtttatatcaaaagattcgccactacaagatggaacaacgaatgcctcaaagtccatgggtagaaaggattgtgcagatattagatttagattatgaagatttatttcggagg

SEQ ID NO: 2696 - protein, 77 aa, Streptococcus pneumoniae
  hypothetical protein; Cellular location: cytoplasm
MAERFWENLSIILAERNISWIELTRKMFAGEFHYPSELNRLYQKIRHYKMEQRMPQSPWVERIVQILDLDYEDLFRR

SEQ ID NO: 2697 - DNA, 378 bp, Streptococcus pneumoniae
atgattgatctctatctaagtaaaaatagccaaagaaatcaacttcttttagacttcttccaaaactatggcattgaggtatcttgtcattcagtttctgaaatgacaaaggacaaattaattgagatgatgagctattcttcagattgttttgagtttttatctcccaatttattacgatttaagaaccgtgacaatctaagattaacggatttcgttgagataattttaaaaaatcctgaactaaccatcggacttccttttgtggtttcaaataagcgggtttatccaagtctgaatttggaagaggctagagctctattgccaagagatacgaaacaattgatttacatggcacaaacacattatttatctaac

SEQ ID NO: 2698 - protein, 126 aa, Streptococcus pneumoniae
  conserved hypothetical protein; Cellular location: cytoplasm; Similar to strain R6 sequence 15903250 (2.E-66)
MIDLYLSKNSQRNQLLLDFFQNYGIEVSCHSVSEMTKDKLIEMMSYSSDCFEFLSPNLLRFKNRDNLRLTDFVEIILKNPELTIGLPFVVSNKRVYPSLNLEEARALLPRDTKQLIYMAQTHYLSN

SEQ ID NO: 2699 - DNA, 186 bp, Streptococcus pneumoniae
ttgatgcccaattatccatgtgagtttgaggtaacatttttagatgattaccataaaaaacataattacccactattttatgaatcctatcttcaaaacgttatggaattccttgaaagtcaggatataaagaacggagttaatgcctttgtagatgataatcagaatcttgtttttgttttatat

SEQ ID NO: 2700 - protein, 62 aa, Streptococcus pneumoniae
  hypothetical protein; Cellular location: cytoplasm; Similar to strain R6 sequence 15903251 (9.E-26)
MMPNYPCEFEVTFLDDYHKKHNYPLFYESYLQNVMEFLESQDIKNGVNAFVDDNQNLVFVLY

SEQ ID NO: 2701 - DNA, 1221 bp, Streptococcus pneumoniae
atgatttgggttttagatttatttgctgggataggaggctttaggatgggaatggaagctcaagggcatgagtgcttgggattttgtgagattgataaatttgctaggaaatcttataagtccatttttcaaacggaaggagaaatagaatttcatgacatacgagatgtttcagatgacgaatttaaaaaacttagagggaaagtcgatgtcatctgtgggggattcccttgtcaagcattttcaatcgcaggaagacgattgggatttgaagatactagaggaactttgttctttgaaattgctcgggcggccaaacaaatccaaccacgttttctttttcttgaaaatgttaaaggcctactcaatcacgataagggacggacgttcaccacaatacttaccacacttgatgagttggggtttgatgttgagtggcaggtgcttaacagtaaggattttggcgttcccaaaaacagagagagggtgtttattatcggacattctagaaagaaaggtaccagactcttatttcctttcagacgagaaggtcaagcaactaactctgagactttgaaagcactaggaaatttgaatccatcaagaagtggaatgagcggtaaagtctattattcagaaggtcttgcgccaaccttagttcgtggtaaaggagaaggatttaaagttgcgattccttgtatgacaccagatagattagacaagagacaaaatgggagacgctttaaggaaaatcaagagccgatgtttactttaaatactcaggatcgttatggcattgtcgttgttggagatttaccgactagctttaaggagacaggtcgtgtctatggaagtgagggcttatctccaacactgactacgatgcaaggaggagataaaatccccaaaatactaattccagaaccaatccaatttctaaaagtacgggaagcaacgaaaaaaggatatgctcaagcagagattggggattcaatcaatttagaaagaccaagttctcagtatcgtcgtggtagagttggaaaaggtatagctaatacgttaacaactagtggtcaaatgggagtagtagtggctagctatgaaggagaagataaacaagtttaccaagtagctggtgttttaatagatggacaattttaccgtttgagaatacgacgaatcactcctaaagagtgttttcgattgcatggctttcctgat

SEQ ID NO: 2702 - protein, 407 aa, Streptococcus pneumoniae
  type II DNA modification methyltransferase Spn5252IP (spn5252IMP); Cellular location: cytoplasm
MIWVLDLFAGIGGFRMGMEAQGHECLGFCEIDKFARKSYKSIFQTEGEIEFHDIRDVSDDEFKKLRGKVDVICGGFPCQAFSIAGRRLGFEDTRGTLFFEIARAAKQIQPRFLFLENVKGLLNHDKGRTFTTILTTLDELGFDVEWQVLNSKDFGVPKNRERVFIIGHSRKKGTRLLFPFRREGQATNSETLKALGNLNPSRSGMSGKVYYSEGLAPTLVRGKGEGFKVAIPCMTPDRLDKRQNGRRFKENQEPMFTLNTQDRYGIVVVGDLPTSFKETGRVYGSEGLSPTLTTMQGGDKIPKILIPEPIQFLKVREATKKGYAQAEIGDSINLERPSSQYRRGRVGKGIANTLTTSGQMGVVVASYEGEDKQVYQVAGVLIDGQFYRLRIRRITPKECFRLHGFPD

SEQ ID NO: 2703 - DNA, 1344 bp, Streptococcus pneumoniae; identical to SEQ ID NO: 485

SEQ ID NO: 2704 - protein, 448 aa, Streptococcus pneumoniae; identical to SEQ ID NO: 486
  IS1380-Spn1, transposase; Cellular location: cytoplasm; Similar to strain R6 sequence 15903941 (2.E-46)

SEQ ID NO: 2705 - DNA, 177 bp, Streptococcus pneumoniae
gtgagtgggataaaagtttcatttagtttattcagtacaaatttaacgggtcaagatttatatactagtggtgtttttggggctgagagaagtatcttgattttatgtgtggtttttatacttacagttgttctgctccaaagagcttgtagagaagaattagctcataaaggagat

SEQ ID NO: 2706 - protein, 59 aa, Streptococcus pneumoniae
  hypothetical protein; Cellular location: membrane; Similar to strain R6 sequence 15904024 (e-149)
MSGIKVSFSLFSTNLTGQDLYTSGVFGAERSILILCVVFILTVVLLQRACREELAHKGD

SEQ ID NO: 2707 - DNA, 135 bp, Streptococcus pneumoniae
atggcagcagaagtattaaatcttcaattagtatctgttcaagttgacgaaacagatgaagttgatggaatgcgatttagtacattcagtacaaaccgttgcggtaactggagtgcttttagttgggaaaattgt

SEQ ID NO: 2708 - protein, 45 aa, Streptococcus pneumoniae
  hypothetical protein; Cellular location: cytoplasm
MAAEVLNLQLVSVQVDETDEVDGMRFSTFSTNRCGNWSAFSWENC

SEQ ID NO: 2709 - DNA, 1317 bp, Streptococcus pneumoniae
atgctcagattagtttactatcaatttttacataataagaaacaatggttaggcgtttcaccagtaatttttgtttcgagtttagttatgggattggctgttaatggggtaattaatgttgagaataattcgcaagtatttgtcggacttccagatcctaaaccaatttttatgtttccgatagtattcggaggagtaacattattctttgtgctctctaacataataaatatgttggttgaaatttttagagatgattacgaacttctggaggtgttgggagcaagtcgccttcaactatcatttcttgtggggggacagatttttatcatttcctcgattattagttttattgcatatctatgctctatatttgttacgtcaaattattattattttttacaatactttttcggggaaaatatattacctgatatccaatttcaaacgagtgctgttggatgtatcattacagtagtgttgatttcatttttagcctttctaagtggttgcttttatacgttcaagaagattagaaataggaagagttctaaaataaggcatgttctttcaatagtaaaaagaatactgctattggctggttttagtgttatctggttgctttctttgcaacaaattttccaagatagcacaattttagcgaaggcccagataatattcaatattgtaatcttagatattgtgattatttatcaattatctccttttatacagtcatgttttatcaaactactttctataattatatttagaaataattttatgttcattgtttcgaagtggaatttactatattgtaagtcttatataaaatctatcagtgctgcaattacaggagctatattactaatttctagttttcaaatgatttctcagaatatactatctcaatttcaagatgacagtgatttagagctaaaagtagcatttattgtctatgtaggagcaccaattttgatagtacttgcaaatattatttcaattgcatttttgtcatcgcatcaagaaaggattgagattcagcaatttgaaattttaggaacttctaattaccagatggttaagattaaagttggtgaggctatatttttgacatttgttacttcattaattgcatttttacttaacattaaaattatggctttaatatactactctttagaggatattttaatagatgatatgaatcttttggggttaatacttccaaattttatagtatctattattttatttattttaatatttattactaaaagttcctattttatctttaagaatgcaaaaattatttct

SEQ ID NO: 2710 - protein, 439 aa, Streptococcus pneumoniae
  hypothetical protein; Cellular location: membrane; Similar to strain R6 sequence 15903244 (0.E+01)
MLRLVYYQFLHNKKQWLGVSPVIFVSSLVMGLAVNGVINVENNSQVFVGLPDPKPIFMFPIVFGGVTLFFVLSNIINMLVEIFRDDYELLEVLGASRLQLSFLVGGQIFIISSIISFIAYLCSIFVTSNYYYFLQYFFGENILPDIQFQTSAVGCIITVVLISFLAFLSGCFYTFKKIRNRKSSKIRHVLSIVKRILLLAGFSVIWLLSLQQIFQDSTILAKAQIIFNIVILDIVIIYQLSPFIQSCFIKLLSIIIFRNNFMFIVSKWNLLYCKSYIKSISAAITGAILLISSFQMISQNILSQFQDDSDLELKVAFIVYVGAPILIVLANIISIAFLSSHQERIEIQQFEILGTSNYQMVKIKVGEAIFLTFVTSLIAFLLNIKIMALIYYSLEDILIDDMNLLGLILPNFIVSIILFILIFITKSSYFIFKNAKIIS

SEQ ID NO: 2711 - DNA, 756 bp, Streptococcus pneumoniae
gtgattggaggcaagaatatggataaagattatatattaaaagtgaaagggctgtatcatcaatttttactaggaaataataaaacgttgcaagtgctgaaaaatgtttctctttctgcttcgagaggagaatttataagtattctaggaattagtggttctggaaagtcaactttattaaaatgtatttctagtttgcttgaaccaacaagtggggaagtaattttaaatggaatcaacccctataaaatcagaaatgcaaaattgtcaagtataagacgtaacgaagtatcttttatatttcaagcatacaatttaataccttccctgccggtaatagaaaatatagcacttcctttgcgattatcacaaaaaaaattaactattaaaaatgtagaaaacttactcaaaagaatgaagtttaatgctggcttaaacgattttgttggaactctgtctggtggagaacaacagaaggttgctatagctagagcggttattgctgatagtgatataatatttgctgatgagccaactggggctttagacagcgtttctcgtgaagtaatttttgaattattgagagagttagtaggggcgggtaagtgtgtaattatggtaacgcacgatatagaattggcctcgaaaactgatcgtgcattaatattgaaagatggaaaaattttcaaagaacttcatagacctagcggggaagagttgtataaaatcttagaggtacaatcaactacggaggaa

SEQ ID NO: 2712 - protein, 252 aa, Streptococcus pneumoniae
  ABC transporter, ATP-binding protein; Cellular location: cytoplasm; Similar to strain R6 sequence 15903245 (e-134)
MIGGKNMDKDYILKVKGLYHQFLLGNNKTLQVLKNVSLSASRGEFISILGISGSGKSTLLKCISSLLEPTSGEVILNGINPYKIRNAKLSSIRRNEVSFIFQAYNLIPSLPVIENIALPLRLSQKKLTIKNVENLLKRMKFNAGLNDFVGTLSGGEQQKVAIARAVIADSDIIFADEPTGALDSVSREVIFELLRELVGAGKCVIMVTHDIELASKTDRALILKDGKIFKELHRPSGEELYKILEVQSTTEE

SEQ ID NO: 2713 - DNA, 1605 bp, Streptococcus pneumoniae
atgaattatttaaaatttataaaaaagactaaacttatattaatggggattttaatatttctatcttcgtttaatggtgtcttgctctcaggaattattgtatatgcaggtagtttaaatcagacttcctcattttctgacgttctaagatttggtgctataagtattctgggttggtcagcaatctatatatcaaattactatttagaagtaacggaagcatcaataactaaagatataaatgtaaaaattaaacaaggatattttagagaacagtatctttcttctgaaatggttaaagattactcatctattatttcagttttgtcaaatgatttgagattaatcgaagaaaactattttagacaaatttttgaaataatttcttcaatattgttgttcatcgtctctctaagttttatgctttatttaaacttcctagtttcaataatatttattgtattatcagcattgccgattatagtacctgtctttatgaagaagatgttgtctaattcagctaatgagtactctaacagcaatgcagagtatactcacataataaaagaaatttttaatggttttaagacattaaaatcttattctgttactaaagaaataattagtttgtcggataaaaagttggataaactagaagattctacttttaatttgaaacgatcagaggttctttcaaaattggttgcagtactaatttcaggtttttgctttctagttcccttggttgtaggatgttattttgtaatttatcataaaagcctttcttttagtgaactgataggtattttcttagcaaacgataaagttttagggccgatacaatcaattgcctattcattaaataagataaatacaaccaaagatttaaggaaaccgtttttaaaatacttaagtggagagaagaattttatagacgctgaacatgataataacggactgtatacttcatcaatagatgagatacacatgaaagatgttgtatattctattacaccagaaaataaattaagtattgacttctcatttaagtcaccatttagggtattattaacaggaacttctggtagtgggaaaacaacgattttaaatttaattaatggttctttaaagccacaaaaaggttatgtaaatttgttatcacatgggaaaaagagttcagattcaataccaacagttgatcagacaccatatatttttgacactactattcgtgagaacgtaactttatttcaaaatgaatatttttcagatgatcagataattgaggtgttaaaaaaggtaaatctatatgaagaattagaaaagatagatatactaaattatcaatgtggtgaaaatggtagtaatttgtctggaggtcaaaaacaaaaaatagctttagctagagctctgattagaaataataaagtgtacttatttgacgaaatatcagctaatttagataatgataattcaaattccatacatgatattctgttcaatttaggtatttcatttattgaagtttcacatcattatgacttaaatgacaagagatacactgatatatataaattggaaaatggaacacttttcaaaattaag

SEQ ID NO: 2714 - protein, 535 aa, Streptococcus pneumoniae
  toxin secretion ABC transporter, ATP-binding/permease protein; Cellular location: membrane; Similar to strain R6 sequence 15903246 (0.E+01)
MNYLKFIKKTKLILMGILIFLSSFNGVLLSGIIVYAGSLNQTSSFSDVLRFGAISILGWSAIYISNYYLEVTEASITKDINVKIKQGYFREQYLSSEMVKDYSSIISVLSNDLRLIEENYFRQIFEIISSILLFIVSLSFMLYLNFLVSIIFIVLSALPIIVPVFMKKMLSNSANEYSNSNAEYTHIIKEIFNGFKTLKSYSVTKEIISLSDKKLDKLEDSTFNLKRSEVLSKLVAVLISGFCFLVPLVVGCYFVIYHKSLSFSELIGIFLANDKVLGPIQSIAYSLNKINTTKDLRKPFLKYLSGEKNFIDAEHDNNGLYTSSIDEIHMKDVVYSITPENKLSIDFSFKSPFRVLLTGTSGSGKTTILNLINGSLKPQKGYVNLLSHGKKSSDSIPTVDQTPYIFDTTIRENVTLFQNEYFSDDQIIEVLKKVNLYEELEKIDILNYQCGENGSNLSGGQKQKIALARALIRNNKVYLFDEISANLDNDNSNSIHDILFNLGISFIEVSHHYDLNDKRYTDIYKLENGTLFKIK

SEQ ID NO: 2715 - DNA, 1938 bp, Streptococcus pneumoniae
gtgaatcagagtaatgaaatatttttaaatacaatacaggaaaaaacacactataagaggtctatctcttcatcatttcaggaattaaaaaaatggaattctttgatatttaggagagggcgatattggtaccaatttgataattggagtatacccaatactggtgtaataaaggaatggtatgtcgaagataatgactggattcctaaggttagttcttccagtttagacaattcaaattcacttaaaattgtctttgatgtggaaaaatatactttgccagatgatagtatcttacaggatgttaggatttcatctgatgagagttatatagttttggttgtatcctcactgcgtacgactaatttaattggaataaaaaaatatactatggaagagttatttatcattgaagatatttcagtagaaagttcgttctatttgggtaaattcggtgttatgtatactcgctccaaagagtacgggaggccaagtaagttattctataaatcttttgatagctttacagaagaggaactgtttgaagaaaacgaatgctcttttcgattaaaaatagtccacattgatagcaataattgttttgtaaagtcagtagactttcagaaaggcaggatttttctatacagtttcgaccggacgggttttgttagacactcttacacagaaacggtagccccaacacctagagatatcgctctatttagtacagaaaaagcacagtactttcttgggctctcttcaactgaagaaaagaaagatcaactaattctaagggaaacttcttcgggagacagagtttctattactataccatatcaagatagggctagaagagttcactgtataggacgttatatccttttagactgttcaaacgcagcgaattccgtcttttatcttgctacatttaaaaataatagtttgagggagttgagtgttaataagataacatttgatgaaaagacaacactttatgaaaattcattttctgatcgtgttcttctgtttttagagaggagaactttttacgaaaaaatacttagttttgatttaatagaaaatacattaaaaactgaatttgaaagacccatcataaaatcgaataatactaaatatttttctaaggtgatttggactaaaaaagacagttatgatgtaagcataccgatttctttattttggaaaagtgaagatacggatgagctcccaagaagaaaaaaatgtattctaagtgtctatggggcttatggtaagaatgataattctgatttagatgaaattatgttatctataatagatgcaggttttatttatgctatagttcatgtaagaggtggaggctatttgggtggtgaatggtatcgctcaggaaaggcgttaaacaaatggaattctatcagagattttattgagggagtaaattatttaagggaaaatgatgtaattgacagtaagcgattaggtttaataacttctagtgcaggtggaataattgctggtgcggtgttgaacgaggaaaaaaatttattgcaaagcattctcttattttcgccatttataaatccttatgatacacttcagaatccaaatgatcctctttctaagaccgaaatagcagagtggggagatattagagaccctgaagtaaaggcttatataaagtcatattcgcctatgcaaaatattgaaaaggcacgagactcaaatactgttatagttaatattttgggtgagaaagacccatatattaataataacgaagtgatagagtggtcaaagaaattaaattctattggagttaaaagtttgttgtatttaaacaaagcagctggtcatggaggttttactccatcagatgttctcttaatgattgatactttaaattatttctttgaagaagtgggaaggaataactta

SEQ ID NO: 2716 - protein, 646 aa, Streptococcus pneumoniae
  prolyl oligopeptidase family protein; Cellular location: membrane; Similar to strain R6 sequence 15903247 (0.E+01)
MNQSNEIFLNTIQEKTHYKRSISSSFQELKKWNSLIFRRGRYWYQFDNWSIPNTGVIKEWYVEDNDWIPKVSSSSLDNSNSLKIVFDVEKYTLPDDSILQDVRISSDESYIVLVVSSLRTTNLIGIKKYTMEELFIIEDISVESSFYLGKFGVMYTRSKEYGRPSKLFYKSFDSFTEEELFEENECSFRLKIVHIDSNNCFVKSVDFQKGRIFLYSFDRTGFVRHSYTETVAPTPRDIALFSTEKAQYFLGLSSTEEKKDQLILRETSSGDRVSITIPYQDRARRVHCIGRYILLDCSNAANSVFYLATFKNNSLRELSVNKITFDEKTTLYENSFSDRVLLFLERRTFYEKILSFDLIENTLKTEFERPIIKSNNTKYFSKVIWTKKDSYDVSIPISLFWKSEDTDELPRRKKCILSVYGAYGKNDNSDLDEIMLSIIDAGFIYAIVHVRGGGYLGGEWYRSGKALNKWNSIRDFIEGVNYLRENDVIDSKRLGLITSSAGGIIAGAVLNEEKNLLQSILLFSPFINPYDTLQNPNDPLSKTEIAEWGDIRDPEVKAYIKSYSPMQNIEKARDSNTVIVNILGEKDPYINNNEVIEWSKKLNSIGVKSLLYLNKAAGHGGFTPSDVLLMIDTLNYFFEEVGRNNL

SEQ ID NO: 2717 - DNA, 2607 bp, Streptococcus pneumoniae
atggattataatttcaatttggagcatcctttctttttcactaataatgattatagtacagatactagcataaagtaccaagtaagtctgccttttaattggcacgaagtaatgaataatgatgagtgggtttatcaataccctattggaaaatttgttgaaagacaagggtggaaaatacacattagttcagagtataacagttcacatgaattgttacaagatgtagcaaaaatttgccatgaaatgcgaattccatttaaacatcttagtacagaagacaaatttatcatgcgaaacgggaaattggttagtcgaggattttctggtaaatttattacatgttatccaaatcaaaatgaattagagtcggttttgcaaaggttagaaagtgccttaaagcaatataatgggccatatattttaagcgataaacgttgggatgaagcaccaatatatctgaggtatggtgtgtttaggccgtcaagggatgatgaaaagaaggttgctattgatgaattaattgttggcgatgaagttgttaaagatgaacgtttaccagtatttaaaattccaaaaggtatagtgccccctgactttttgaataaatggcttgacaagaaagataaaaaacagggagactttccctttattatagataatgcaattagattttcaaacagtggtgggatatataatgctaggctaaaagaagatgggaaaaaaataattttaaaagaggctagaccgtatacaggtctaggatttgatggtacttattcttcagagaaattagcttcggagtgcaaagcactaaaaattctaaatgaatggagtgagacgcctaaaatatactggcacggtaagatctgggagcacaccttcttaggaattgaacatatgaagggcgttccactaaatagatgggttaccaataattttcctttatatgaagttgttgataagaccaaagattatctattgagagtttcaaagatagtagaaaaactcatcgatttaacgaataagtttcattctgaaaatgtatatcatcaagatttacatttaggaaatatcttggttaaggatgaagatgagattagtataatagactgggaacaggctgtcttttcaaatgatgaaaaagttgtacataaagttgcagcccctggttttagagcatggcgagaaacacttcccagtgagatagattggtatggtattagacaaatagctcattatttatacatgccactagtaactacatcggatttgacatacaactatgtaagtcaaaccaggatagaaggaaaaaaactatttgagtctttgggttatacaagagaacatatagattatgtagaaagtttattgtcatatctagattctaaatgtccacagattgagaatatttccaggaaaaaagttttaaaacccatgcatgagattagaactatcgagagtgagcaagatatacaagattttattataaaattattgagagggtttacgctaacttatggacagtggcgtaaagaatttcaatcaagattcttcccagttcattattatggtctgaattttaatcaaggaattgcgttttcagatttagctatcctttggagttatcaacaactagctaagaaagtaaaaaatttcaagtttgatgactattatgagattcgaacacaggttattaatgaggcagtaaataattttaagaaatcgtccctttctggtctttttgatggtaaaattggtacaatctggctcatttatgaatttggggagatagatcgggcagttgaactttttacaactcattttatagagatatttgagaattcacaaaataaaaatttatatagtgggcaggctggaattttactggttggactgtattttcttagtaaagggggaattgataataaactaggagaagaaatactaattaggcttagagaatatactttaaattatatagaaaatccagaaactttttgtaaagttggcgctagtgatgttcagagtaacgatccttatgagaattttggtggattactatatggtcacgcaggggtagcttggctcttcggtgaagcttataaattaactggtgaaagtatctataaaaatggtctagaattggctgtagataaagaattagttgcttataaagtagatagtaataattcattgcagtacagccaaggtcatagattactaccatatctagcaactggaagtgctggcctgcttttacttattaatagaaataaagaaatcttgtcaagcaaatacttaaaatatttaacttctttagagagggcaactgatgtagttttttgtgtattaccaggtttatttaacggattttgtggtcttgaagttgctaataatatatatagtgatatcgatgataacttttcaggacaaaagaaattaattgaacaactttatagatatttgtgtgtaattgaagaaggatttgttattgcgggagataatggtttaaagataacaacagatattgcttcgggatttgcgggtgttgcaattggattggtatcaataatggataataaattgacgattcttcctcaaata

SEQ ID NO: 2718 - protein, 869 aa, Streptococcus pneumoniae
  conserved hypothetical protein; Cellular location: membrane; Similar to strain R6 sequence 15903248 (0.E+01)
MDYNFNLEHPFFFTNNDYSTDTSIKYQVSLPFNWHEVMNNDEWVYQYPIGKFVERQGWKIHISSEYNSSHELLQDVAKICHEMRIPFKHLSTEDKFIMRNGKLVSRGFSGKFITCYPNQNELESVLQRLESALKQYNGPYILSDKRWDEAPIYLRYGVFRPSRDDEKKVAIDELIVGDEVVKDERLPVFKIPKGIVPPDFLNKWLDKKDKKQGDFPFIIDNAIRFSNSGGIYNARLKEDGKKIILKEARPYTGLGFDGTYSSEKLASECKALKILNEWSETPKIYWHGKIWEHTFLGIEHMKGVPLNRWVTNNFPLYEVVDKTKDYLLRVSKIVEKLIDLTNKFHSENVYHQDLHLGNILVKDEDEISIIDWEQAVFSNDEKVVHKVAAPGFRAWRETLPSEIDWYGIRQIAHYLYMPLVTTSDLTYNYVSQTRIEGKKLFESLGYTREHIDYVESLLSYLDSKCPQIENISRKKVLKPMHEIRTIESEQDIQDFIIKLLRGFTLTYGQWRKEFQSRFFPVHYYGLNFNQGIAFSDLAILWSYQQLAKKVKNFKFDDYYEIRTQVINEAVNNFKKSSLSGLFDGKIGTIWLIYEFGEIDRAVELFTTHFIEIFENSQNKNLYSGQAGILLVGLYFLSKGGIDNKLGEEILIRLREYTLNYIENPETFCKVGASDVQSNDPYENFGGLLYGHAGVAWLFGEAYKLTGESIYKNGLELAVDKELVAYKVDSNNSLQYSQGHRLLPYLATGSAGLLLLINRNKEILSSKYLKYLTSLERATDVVFCVLPGLFNGFCGLEVANNIYSDIDDNFSGQKKLIEQLYRYLCVIEEGFVIAGDNGLKITTDIASGFAGVAIGLVSIMDNKLTILPQI

SEQ ID NO: 2719 - DNA, 108 bp, Streptococcus pneumoniae
ttgacgaaacagatgaagttgatggaatgcgatttagtacattcagtacaaatcgttgcggtaactggagtgcttttagttgggaaaattgttaattcatttaaattg

SEQ ID NO: 2720 - protein, 36 aa, Streptococcus pneumoniae
  hypothetical protein; Cellular location: membrane
MTKQMKLMECDLVHSVQIVAVTGVLLVGKIVNSFKL

SEQ ID NO: 2721 - DNA, 135 bp, Streptococcus pneumoniae
atggcagaagaagtattaaatcttcaattagtatctgttcaagttgacgaaacagatgaagttgatggaatgcgatttagtacattcagtacaaatcgttgcggtaactggagtgcttttagttgggaaaattgt

SEQ ID NO: 2722 - protein, 45 aa, Streptococcus pneumoniae
  hypothetical protein
MAEEVLNLQLVSVQVDETDEVDGMRFSTFSTNRCGNWSAFSWENC

SEQ ID NO: 2723 - DNA, 585 bp, Streptococcus pneumoniae
atgaaaagaataattccagtttatatattccaacaagtaaatgtcctattggtatctctatacttattgaaatttctttgtatcggtgagttaactatactacagattctctatggttcgtcactcatttcttttttatggatgtatggccaacgcaaacaagcgcataaggtcaatatgaaatctaggatgaaatggcttggtgttgaatttgttagcctactgattataagtctatgttttagtctgattcatgctcaaggaagcacgaatcaagcaaacttaattggccttcaacatcaaattccttggttttcatttttattgttcttaatcaatgcgagtatggttgaagaatttctgtatcgagaaattttatggaatttggtcagaaaattagatatcagagttgctttgacaagtgttttatttgccttagcacatcatacaggaaccattctagcttggtgtttgtatgtttcacttgggatgtttttaggtatggtgcgctataaatctgacttatggggcagtatgggactacatttggtgtggaacctactagtttatagtttgctgcttttt

SEQ ID NO: 2724 - protein, 195 aa, Streptococcus pneumoniae
  conserved hypothetical protein; Cellular location: membrane; Similar to strain R6 sequence 15903249 (e-109)
MKRIIPVYIFQQVNVLLVSLYLLKFLCIGELTILQILYGSSLISFLWMYGQRKQAHKVNMKSRMKWLGVEFVSLLIISLCFSLIHAQGSTNQANLIGLQHQIPWFSFLLFLINASMVEEFLYREILWNLVRKLDIRVALTSVLFALAHHTGTILAWCLYVSLGMFLGMVRYKSDLWGSMGLHLVWNLLVYSLLLF

SEQ ID NO: 2725 - DNA, 141 bp, Streptococcus pneumoniae
atggctgaacgattttgggagaacttgtccattattttggctgaaagaaatatcagctggattgagttaaccagaaaaatgtttgcgggagagtttcactatccaagtgaattgaatcgtttgtatcaaaagattcgccac

SEQ ID NO: 2726 - protein, 47 aa, Streptococcus pneumoniae
  hypothetical protein; Cellular location: cytoplasm
MAERFWENLSIILAERNISWIELTRKMFAGEFHYPSELNRLYQKIRH

SEQ ID NO: 2727 - DNA, 378 bp, Streptococcus pneumoniae
atgattgatctctatctaagtaaaaatagacaaagaaatcaacttcttttagatttcttccaaaactatggcatagaggtatcttgtcattcagtttctgaaatgacaaaggacaaattaattgagatgatgagctattcttcagattgttttgagtttttatctcccaatttattacgatttaagaaccgtgacaatctaagattaacggatttcgttgagataattttaaaaaatcctgaactaaccatcagacttcctcttgcggtttcaaataagcgagtttatccaagtctgaatttggaagaggctagagctctattgccaagagatacgaaacaattgatttacatggcgcaaacacattatttatctaac

SEQ ID NO: 2728 - protein, 126 aa, Streptococcus pneumoniae
  conserved hypothetical protein; Cellular location: cytoplasm; Similar to strain R6 sequence 15903250 (7.E-69)
MIDLYLSKNRQRNQLLLDFFQNYGIEVSCHSVSEMTKDKLIEMMSYSSDCFEFLSPNLLRFKNRDNLRLTDFVEIILKNPELTIRLPLAVSNKRVYPSLNLEEARALLPRDTKQLIYMAQTHYLSN

SEQ ID NO: 2729 - DNA, 276 bp, Streptococcus pneumoniae
gtgacatttttagatgattaccataaaaaacataactacccactattttacgaatcctatcttcaaaacgttatggaattccttgaaagtcaagacataaagaatggggttgatgcctttgtagatgatcatcaaaatctcgtttttgttttatatggacaaggctatcgagccgagggaaaagagggaatacttacaacccaagtaactgtaaaagcttatgatgaagacaagaaaccgattaacttcgcaaatttattagattccttaatttat

SEQ ID NO: 2730 - protein, 92 aa, Streptococcus pneumoniae
  hypothetical protein; Cellular location: cytoplasm; Similar to strain R6 sequence 15903251 (4.E-51)
MTFLDDYHKKHNYPLFYESYLQNVMEFLESQDIKNGVDAFVDDHQNLVFVLYGQGYRAEGKEGILTTQVTVKAYDEDKKPINFANLLDSLIY

SEQ ID NO: 2731 - DNA, 252 bp, Streptococcus pneumoniae
atgaagcgtattaccgctaatcaatatcagacatcagagcgttattataagctccccaaacttttatttgagagtgaacggtataagaatatgaaactggaggttaaggtggtttactcagttttaaaagatcggttggagttgtctttgagcaaaggttggattgatgaggatggggctatttatttgatttattccaattcaaatttgatggcacttttaggctgttcaaagtcaaaattactctccatg

SEQ ID NO: 2732 - protein, 84 aa, Streptococcus pneumoniae
  conserved domain protein; Cellular location: cytoplasm; Similar to strain R6 sequence 15903252 (1.E-43)
MKRITANQYQTSERYYKLPKLLFESERYKNMKLEVKVVYSVLKDRLELSLSKGWIDEDGAIYLIYSNSNLMALLGCSKSKLLSM

SEQ ID NO: 2733 - DNA, 105 bp, Streptococcus pneumoniae
atgatttgggtaaaagcaactcagttagttgatgaaatggaacaagtaggtttaatccgatttgatgaatttggaaatgttggaattttagtcttggagggacaa

SEQ ID NO: 2734 - protein, 35 aa, Streptococcus pneumoniae
  hypothetical protein; Cellular location: cytoplasm
MIWVKATQLVDEMEQVGLIRFDEFGNVGILVLEGQ

SEQ ID NO: 2735 - DNA, 1344 bp, Streptococcus pneumoniae; identical to SEQ ID NO: 517

SEQ ID NO: 2736 - protein, 448 aa, Streptococcus pneumoniae; identical to SEQ ID NO: 486
  IS1380-Spn1, transposase; Cellular location: cytoplasm; Similar to strain R6 sequence 15903941 (2.E-46)

SEQ ID NO: 2737 - DNA, 105 bp, Streptococcus pneumoniae
ttgcggaatccctatttaccagtctttgagagcgataagcgattgatagaaactgataaattgatttggtttcctgccaaaaattctttggcaggatttttgttt

SEQ ID NO: 2738 - protein, 35 aa, Streptococcus pneumoniae
  hypothetical protein; Cellular location: cytoplasm; Similar to strain R6 sequence 15904024 (e-149)
MRNPYLPVFESDKRLIETDKLIWFPAKNSLAGFLF

SEQ ID NO: 2739 - DNA, 381 bp, Streptococcus pneumoniae
ttggaggaaataacaatggcattgaacattgaaaacattattgctgaaattaaagaagcttcaatccttgaattgaacgaccttgtaaaagctatcgaagaagaatttggtgtaactgcagctgctcctgtagctgttgctgcagctgatgcagctgatgctggtgctgctaaagattcattcgacgttgaattgacatctgcaggcgacaaaaaagttggcgttatcaaagttgtacgtgaaatcactggtcttggtcttaaagaagctaaagaacttgttgacggtgcaccagcacttgttaaagaaggcgttgcaactgcagaagctgaagaaatcaaagctaaattggaagaagctggagcttcagttactcttaaa

SEQ ID NO: 2740 - protein, 127 aa, Streptococcus pneumoniae
  ribosomal protein L7/L12 (rplL); Cellular location: cytoplasm; Similar to strain R6 sequence 15903254 (7.E-61)
MEEITMALNIENIIAEIKEASILELNDLVKAIEEEFGVTAAAPVAVAAADAADAGAAKDSFDVELTSAGDKKVGVIKVVREITGLGLKEAKELVDGAPALVKEGVATAEAEEIKAKLEEAGASVTLK

SEQ ID NO: 2741 - DNA, 561 bp, Streptococcus pneumoniae
ttgggcgcgtttttctttttgaaaaattccccaagcaaaataattacggaggtgaacacactaatgagtgaagcaattattgctaaaaaagcggaactagttgacgtagtagctgaaaaaatgaaagctgctgcatctatcgtcgttgtagacgctcgtggtttgacagttgagcaagatacagttcttcgtcgtgagcttcgtggaagcgaagttgagtataaagttattaaaaactcaatcttgcgtcgtgcagctgaaaaagctggtcttgaagatcttgcatctgtatttgttggaccatctgcagtagcattttctaatgaagatgttatcgcaccagcgaaaatcttgaacgacttttctaaaaacgctgaagcacttgaaattaaaggtggtgcaatcgaaggcgctgtcgcatctaaagaagagattcttgcacttgcaactcttccaaaccgcgaaggacttctttctatgctcctttctgtacttcaagcgccagtgcgcaacgttgctcttgcagtcaaagcggttgcagaaagcaaagaagacgcggct

SEQ ID NO: 2742 - protein, 187 aa, Streptococcus pneumoniae
  ribosomal protein L10 (rplJ); Cellular location: cytoplasm; Similar to strain R6 sequence 15903255 (4.E-84)
MGAFFFLKNSPSKIITEVNTLMSEAIIAKKAELVDVVAEKMKAAASIVVVDARGLTVEQDTVLRRELRGSEVEYKVIKNSILRRAAEKAGLEDLASVFVGPSAVAFSNEDVIAPAKILNDFSKNAEALEIKGGAIEGAVASKEEILALATLPNREGLLSMLLSVLQAPVRNVALAVKAVAESKEDAA

SEQ ID NO: 2743 - DNA, 321 bp, Streptococcus pneumoniae
atgtttgaggaaggaaggactgcagctcttcttcagaagatgaaaagtggggatgccagccagtttccaatcgaaacagctctcaaggtactgacaatcgaaggggctaaggtccttggaatggaaaatcagataggaagtctggaagtcggcaagcaagcagattttctggtcattcaaccacaagggaaaattcatctccaacctcaggaaaatatgctgtctcacctggtttatgcagttaaatctagtgatgtagatgatgtttatatcgccggagaacaggttgttaagcaaggtcaagtcctgacagtagaactt

SEQ ID NO: 2744 - protein, 107 aa, Streptococcus pneumoniae
  conserved hypothetical protein
MFEEGRTAALLQKMKSGDASQFPIETALKVLTIEGAKVLGMENQIGSLEVGKQADFLVIQPQGKIHLQPQENMLSHLVYAVKSSDVDDVYIAGEQVVKQGQVLTVEL

SEQ ID NO: 2745 - DNA, 1256 bp, Streptococcus pneumoniae
atgaaagtctttcagcatgtaaatatcgtgacttgtgatcaagatttccatgtttatcttgatggaatcttagcagtcaaggattctcaaatcgtctatgtcggtcaagataagccagcgtttttagagcaagctgagcagattatagactatcagggagcttggattatgcctggtttggtcaattgtcacacccattctgcaatgacaggtctgagagggatccgagatgacagcaatctccatgaatggctcaatgactatatttggccagcagaatctgagtttactcccgacatgactaccaatgcggtcaaagaagccctgacagagatgctccagtcaggaacaacaacctttaacgatatgtataatcccaatggtgtggatatccagcaaatttatcaggtggtgaaaacttccaagatgcgttgttatttttctccgactctcttttcttcagagacagaaacaactgctgagactataagtagaactcgatccatcatagacgaaatcttaaaatataaaaatccaaatttcaaggttatggtagcacctcattctccgtatagctgcagtagagacttgctggaagcgagtttggaaatggcaaaagagctaaatattccgctccatgtccatgtggcggagaccaaggaggagtcaggaattatcctcaaacgatacggcaaacgcccccttgcttttcttgaagaactgggttatttagatcatccgtccgtatttgctcacggggtcgaattaaacgagagagaaattgaacgcttggcatcttctcaagtgctatcgcccacaatcctatcagtaacctcaaactggcatcaggaattgctccaattatccagctccaaaaagcgggagtagcagtcggaattgcgactgactcggttgcttccaataacaatctagatatgtttgaggaaggaaggactgcagctcttcttcagaagatgaaaagtggggatgccagccagtttccaatcgaaacagctctcaaggtactgacaatcgaaggggctaaggtccttggaatggaaaatcagataggaagtctggaagtcggcaagcaagcagattttctggtcattcaaccacaagggaaaattcatctccaacctcaggaaaatatgctgtctcacctggtttatgcagttaaatctagtgatgtagatgatgtttatatcgccggagaacaggttgttaagcaaggtcaagtcctgacagtagaactt

SEQ ID NO: 2746 - protein, 394 aa, Streptococcus pneumoniae
  Atz/Trz family protein, FRAMESHIFT
MKIKEQTRKLAVGCSKHSFEVVDKTDEVSSKHCFEVADRTDEVSSKHCFEVADRTDEVSSKHCFEVADRTDEVSNHTYGKVNLKWFEESTTCLLEKEPIMKVFQHVNIVTCDQDFHVYLDGILAVKDSQIVYVGQDKPAFLEQAEQIIDYQGAWIMPGLVNCHTHSAMTGLRGIRDDSNLHEWLNDYIWPAESEFTPDMTTNAVKEALTEMLQSGTTTFNDMYNPNGVDIQQIYQVVKTSKMRCYFSPTLFSSETETTAETISRTRSIIDEILKYKNPNFKVMVAPHSPYSCSRDLLEASLEMAKELNIPLHVHVAETKEESGIILKRYGKRPLAFLEELGYLDHPSVFAHGVELNEREIERLASSQVLSPTILSVTSNWHQELLQLSSSKKRE

SEQ ID NO: 2747 - DNA, 1788 bp, Streptococcus pneumoniae
gtgaaatcaatgcatcccaacatggaaaggaggactagaatgaaacgacaaactgtaaaccagacgctcaaacgtttagccgtagatttagcaagccatcctttcctccttttcctagcctttctaggaactattgcccaagttggcttatcaatttacctacctattctgattgggcaggtcattgaccaagtcctagtggctggttcatcaccagttttttggcagatttttctccagatgctcttggtggtaataggaaatactctggtacaatgggccaatcctctcctctataatcgtctaatcttctcttataccagagatttacgggagcgaatcatccataagctccatcgtttaccgattgcctttgtagataggcaaggtagtggagagatggttagtcgtgtaaccacggacatcgaacagttggcagctggcttgaccatgatttttaaccaatttttcattggtgttttgatgattttggtcagtattctagccatgctccaaattcatctcctcatgactctcttagtcttgctgttgacgccactgtccatggtgatttcacgctttattgccaagaaatcctatcatctcttccagaagcaaacagagacgaggggaattcagactcagttgattgaagaatcgcttagtcagcagactataatccagtccttcaatgctcaaacagaatttatccaaagattgcgtgaggctcatgacaactactcaggctattctcagtcagccatcttttattcttcaacggtcaatccttcgactcgctttgtaaatgcactcatttatgcccttttagctggagtaggagcttatcgtatcatgatgggttcagccttgaccgtcggtcgtttagtgacttttttgaactatgttcagcaatacaccaagccctttaacgatatttcttcagtgctagctgagttgcaaagtgctctggcttgcgtagagcgtatctatggagtcttagatagccctgaagtggctgaaacaggtaaggaagtcttgacgaccagtgaccaagttaagggagctatttcctttaaacatgtctcttttggctaccatcctgaaaaaattttgattaaggacttgtctatcgatattccagctggtagtaaggtagccatcgttggtccgacaggtgctggaaaatcaactcttatcaatctccttatgcgtttttatcccattagctcgggagatatcttgctggatgggcaatccatttatgattatacacgagtatcattgagacagcagtttggtatggtgcttcaagaaacctggctcacacaagggaccattcatgataatattgcctttggcaatcctgaagccagtcgagagcaagtaattgctgctgccaaagcagctaatgcagactttttcatccaacagttgccacagggatacgataccaagttggaaaatgctggagaatctctctctgtcggccaagctcagctcttgaccatagcccgagtctttctggctattccaaagattcttatcttagacgaggcaacttcttccattgatacacggacagaagtgctggtacaggatgcctttgcaaaactcatgaagggccgcacaagtttcatcattgctcaccgtttgtcaaccattcaggatgcggatttaattcttgtcttagtagatggtgatattgttgaatatggtaaccatcaagaactcatggatagaaagggtaagtattaccaaatgcaaaaagctgcggcttttagttctgaa

SEQ ID NO: 2748 - protein, 596 aa, Streptococcus pneumoniae
  ABC transporter, ATP-binding/permease protein; Cellular location: membrane; Similar to strain R6 sequence 15903257 (0.E+01)
MKSMHPNMERRTRMKRQTVNQTLKRLAVDLASHPFLLFLAFLGTIAQVGLSIYLPILIGQVIDQVLVAGSSPVFWQIFLQMLLVVIGNTLVQWANPLLYNRLIFSYTRDLRERIIHKLHRLPIAFVDRQGSGEMVSRVTTDIEQLAAGLTMIFNQFFIGVLMILVSILAMLQIHLLMTLLVLLLTPLSMVISRFIAKKSYHLFQKQTETRGIQTQLIEESLSQQTIIQSFNAQTEFIQRLREAHDNYSGYSQSAIFYSSTVNPSTRFVNALIYALLAGVGAYRIMMGSALTVGRLVTFLNYVQQYTKPFNDISSVLAELQSALACVERIYGVLDSPEVAETGKEVLTTSDQVKGAISFKHVSFGYHPEKILIKDLSIDIPAGSKVAIVGPTGAGKSTLINLLMRFYPISSGDILLDGQSIYDYTRVSLRQQFGMVLQETWLTQGTIHDNIAFGNPEASREQVIAAAKAANADFFIQQLPQGYDTKLENAGESLSVGQAQLLTIARVFLAIPKILILDEATSSIDTRTEVLVQDAFAKLMKGRTSFIIAHRLSTIQDADLILVLVDGDIVEYGNHQELMDRKGKYYQMQKAAAFSSE

SEQ ID NO: 2749 - DNA, 1722 bp, Streptococcus pneumoniae
atgaaacacctattatcttacttcaaaccctacatcaaggaatcaattttagcccccttgttcaagctgttagaagctgtttttgagctcttggttcccatggtgattgctgggattgttgaccaatctttacctcagggagatcaaggtcatctctggatgcagattggcctgctccttatctttgcagtaattggcgttttagtggccttgatagctcaattttactcagcaaaggcagcagtaggttctgctaaggaattgacaaacgatctttatcgtcatattctttccttgcccaaggacagcagagaccgtctgacaacttctagtttggtcactcgcttgacttcggatacctaccagattcagactggtatcaatcaattcctgcgtctctttttacgagcgcccattatcgtttttggtgccatttttatggcttatcgaatctcagctgagttgactttctggttcttagtcttggttgccattttgaccattgtcattgtagggttatctcgattggtcaatcctttctacagtagtctcagaaagaaaacggaccaactggttcaggaaacgcgccagcaattgcaagggatgcgggttattcgtgcttttggtcaagaaaaacgagagttacagatttttcaaacccttaaccaagtttatgctagattacaagaaaagacaggtttctggtctagtttattaacacctctgacctatctgattgtcaatggaactcttctcgttattatctggcaaggctatatttcaattcaaggaggagtgctcagtcaaggtgctctcattgctcttatcaattacctcttacagattttggtggaattggtcaagctagccatgttgatcaattccctcaaccagtcctatatctcagtcaagcgaatcgaggaagtctttgttgaggctccagaggatatccattcagagttagaacaaaagcaagctaccagagataaggttttacaagtccaagaattgacctttacctatcctgatgcggcccagccttctctgagatacatttcctttgatatgactcaaggacaaattctaggtatcatcgggggaactggttctggtaaatcaagcttggtgcaactcttacttggactttatccagtagacaaggggaacattgacctttatcaaaatggacgtagtcctcttaatttggagcagtggcggtcttggattgcctatgtacctcaaaaggtcgaactctttaaaggaaccattcgttccaacttgactctaggtttcaatcaagaagtatctgaccaggaactctggcaggccttggagattgcgcaagctaaggattttgtcagtgaaaaggaaggactcttggatgctctagttgaggcaggggggcgaaatttctcaggtggacaaaaacaaagattgtctatcgcccgagcagtcttgcgccaggctccgtttctcatcctagatgatgcaacctcggcactggataccattacagagtccaagctcttgaaagctattagagaaaattttccaaacacgagcttaattttgatctctcaacgaacctcaactttacagatggcggaccagattctcctcttggaaaaaggtgagttgctagctgttggcaagcacgatgacttgatgaaatccagccaagtctattgtgaaatcaatgcatcccaacatggaaaggaggac

SEQ ID NO: 2750 - protein, 574 aa, Streptococcus pneumoniae
  ABC transporter, ATP-binding/permease protein; Cellular location: membrane; Similar to strain R6 sequence 15903259 (0.E+01)
MKHLLSYFKPYIKESILAPLFKLLEAVFELLVPMVIAGIVDQSLPQGDQGHLWMQIGLLLIFAVIGVLVALIAQFYSAKAAVGSAKELTNDLYRHILSLPKDSRDRLTTSSLVTRLTSDTYQIQTGINQFLRLFLRAPIIVFGAIFMAYRISAELTFWFLVLVAILTIVIVGLSRLVNPFYSSLRKKTDQLVQETRQQLQGMRVIRAFGQEKRELQIFQTLNQVYARLQEKTGFWSSLLTPLTYLIVNGTLLVIIWQGYISIQGGVLSQGALIALINYLLQILVELVKLAMLINSLNQSYISVKRIEEVFVEAPEDIHSELEQKQATRDKVLQVQELTFTYPDAAQPSLRYISFDMTQGQILGIIGGTGSGKSSLVQLLLGLYPVDKGNIDLYQNGRSPLNLEQWRSWIAYVPQKVELFKGTIRSNLTLGFNQEVSDQELWQALEIAQAKDFVSEKEGLLDALVEAGGRNFSGGQKQRLSIARAVLRQAPFLILDDATSALDTITESKLLKAIRENFPNTSLILISQRTSTLQMADQILLLEKGELLAVGKHDDLMKSSQVYCEINASQHGKED

SEQ ID NO: 2751 - DNA, 936 bp, Streptococcus pneumoniae
atggcagaaatttatctagcaggtggttgtttttggggcctagaggaatatttttcacgcatttctggagtgctagaaaccagtgttggctacgctaatggtcaagtcgaaacgaccaattaccagttgctcaaggaaacagaccatgcagaaacggtccaagtgatttacgatgagaaggaagtgtcactcagagagattttactttattatttccgagttatcgatcctctatctatcaatcaacaagggaatgaccgtggtcgccaatatcgaactgggatttattatcaggatgaagcagatttgccagctatctacacagtggtgcaggagcaggaacgcatgctgggtcgaaagattgcagtagaagtggagcaattacgccactacattctggctgaagactaccaccaagactatctcaggaagaatccttcaggttactgtcatatcgatgtgaccgatgctgataagccattgattgatgcagcaaactatgaaaagcctagtcaagaggtgttgaaggccagtctatctgaagagtcttatcgtgtcacacaagaagctgctacagaggctccatttaccaatgcctatgaccaaacctttgaagaggggatttatgtagatattacgacaggtgagccactcttttttgccaaggataagtttgcttcaggttgtggttggccaagttttagccgtccgatttccaaagagttgattcattattacaaggatctgagccatggaatggagcgaattgaagttcgttctcgttcaggcagtgctcacttgggtcatgttttcacagatggaccgcgggagttaggcggcctccgttactgtatcaattctgcttctttacgctttgtggccaaggatgagatggaaaaagcaggatatggctatctattgccttacttaaacaaa

SEQ ID NO: 2752 - protein, 312 aa, Streptococcus pneumoniae
  peptide methionine sulfoxide reductase (msrA); Cellular location: cytoplasm; Similar to strain R6 sequence 15903260 (0.E+01)
MAEIYLAGGCFWGLEEYFSRISGVLETSVGYANGQVETTNYQLLKETDHAETVQVIYDEKEVSLREILLYYFRVIDPLSINQQGNDRGRQYRTGIYYQDEADLPAIYTVVQEQERMLGRKIAVEVEQLRHYILAEDYHQDYLRKNPSGYCHIDVTDADKPLIDAANYEKPSQEVLKASLSEESYRVTQEAATEAPFTNAYDQTFEEGIYVDITTGEPLFFAKDKFASGCGWPSFSRPISKELIHYYKDLSHGMERIEVRSRSGSAHLGHVFTDGPRELGGLRYCINSASLRFVAKDEMEKAGYGYLLPYLNK

SEQ ID NO: 2753 - DNA, 210 bp, Streptococcus pneumoniae
atggggaaactcttgaccagaggggttcatatcctttttgtgaaaagaagtttatactcaatgaaaatcaaagagcaaactaggaagctagccgcaggctgctcaaaacagtgttttgaggttgcagatagaactgacgaagtcagctcaagacactgttttgaggttgcagatagaactgacgaagtcagtaaccatactacggtaagg

SEQ ID NO: 2754 - protein, 70 aa, Streptococcus pneumoniae
  box element
MGKLLTRGVHILFVKRSLYSMKIKEQTRKLAAGCSKQCFEVADRTDEVSSRHCFEVADRTDEVSNHTTVR

SEQ ID NO: 2755 - DNA, 867 bp, Streptococcus pneumoniae
atgaagattattgtacctgcaaccagtgccaatatcgggccaggttttgactcggtcggtgtagctgtaaccaagtatcttcaaattgaggtctgcgaagaacgagatgagtggctgattgaacaccagattggcaaatggattccacatgacgagcgtaatctcttgctcaaaatcgctttgcaaattgtaccagacttgcaaccaagacgcttgaaaatgaccagtgatgtccctttggcgcgcggtttgggttcttccagctcggttatcgttgctgggattgaactagccaaccaactgggtcaactcaacttatcagaccatgaaaaattgcagttagcgaccaagattgaagggcatcctgacaatgtggctccagccatttatggtaatctcgttattgcaagttctgttgaagggcaagtctctgctatcgtagcagactttccagagtgtgattttctagcttacattccaaactatgaattacgtactcgcgacagccgtagtgtcttgcctaaaaaattgtcttataaggaagctgttgctgcaagttctatcgccaatgtagcggttgctgccttgttggcaggagacatggtgaccgctgggcaagcaatcgagggagacctcttccatgagcgctatcgtcaggacttggtaagagaatttgcgatgattaagcaagtgaccaaagaaaatggggcctatgcaacctacctttctggtgctgggccgacagttatggttctggcttctcatgacaagatgccaacaattaaggcagaattggaaaagcaacctttcaaaggaaaactgcatgacttgagagttgatacccaaggtgtccgtgtagaagcaaaa

SEQ ID NO: 2756 - protein, 289 aa, Streptococcus pneumoniae
  homoserine kinase (thrB); Cellular location: membrane; Similar to strain R6 sequence 15903261 (e-162)
MKIIVPATSANIGPGFDSVGVAVTKYLQIEVCEERDEWLIEHQIGKWIPHDERNLLLKIALQIVPDLQPRRLKMTSDVPLARGLGSSSSVIVAGIELANQLGQLNLSDHEKLQLATKIEGHPDNVAPAIYGNLVIASSVEGQVSAIVADFPECDFLAYIPNYELRTRDSRSVLPKKLSYKEAVAASSIANVAVAALLAGDMVTAGQAIEGDLFHERYRQDLVREFAMIKQVTKENGAYATYLSGAGPTVMVLASHDKMPTIKAELEKQPFKGKLHDLRVDTQGVRVEAK

SEQ ID NO: 2757 - DNA, 1317 bp, Streptococcus pneumoniae
atggctatattagaaaatttcgaggagataaagatgacagttaaaattgctttactaggatttggtaccgttgcaagtggtgtgcctttcctcctaaaggaaaatggaggaaaaatcaatcaatcagcacattcagatatcaaagttgctaaggtattggtcaaggatgaagatgaaaaaaatcgcttgcttgcagcagggaatgactttaactttgtaaccaatgtggatgatattttatcagaccaggatattactatcgtagtggaattgatggggcgtattgagcctgctaaaacctttatcactcgtgccttggaagctggaaaacacgttgttactgctaacaaggaccttttagctgtccatggcgcagaattgctagaaatcgctcaagctaacaaggtagcactttactacgaagcagcagttgctggtgggattccaattcttcgtactttagcaaattccttggcttctgataaaattacgcgcgtgcttggagtagtcaacggaacttccaacttcatggtgaccaagatggtggaagaaggctggtcttacgatgatgctcttgcggaagcacaacgtctaggatttgcagaaagcgatccgacgaatgacgtagatgggattgatgcagcctacaagatggttattttgagccaatttgcctttggcatgaagattgcctttgatgatgtagcccacaagggaatccgcaatatcacaccagaagacgtagctgtagctcaagagcttggttacgtagtgaaattggttggttctattgaggaaacttcttcaggtattgctgcagaagtgactccaaccttcctacctaaagcgcacccacttgctagtgtgaatggcgtaatgaacgctgtctttgtagaatctatcggtattggtgagtctatgtactacggaccaggtgcgggtcaaaaaccaactgcaacaagtgttgtagctgatattgtccgtatcgttcgtcgtttgaatgatggtactattggcaaagacttcaacgaatatagccgtgacttggtcttggcaaatcctgaagatgtcaaagcaaactactatttctcaatcttggctctagactcaaaaggtcaggtcttgaagttggctgaaatcttcaatgctcaagatatttcctttaagcaaatccttcaagatggcaaagagggtgacaaggcgcgtgtcgttatcatcacacacaagattaataaagcccagcttgaaaatgtctcagctgaattgaagaaggtttcagaattcgacctcttgaataccttcaaggtgctaggagaa

SEQ ID NO: 2758 - protein, 439 aa, Streptococcus pneumoniae
  homoserine dehydrogenase (hom); Cellular location: outside; Similar to strain R6 sequence 15903262 (0.E+01)
MAILENFEEIKMTVKIALLGFGTVASGVPFLLKENGGKINQSAHSDIKVAKVLVKDEDEKNRLLAAGNDFNFVTNVDDILSDQDITIVVELMGRIEPAKTFITRALEAGKHVVTANKDLLAVHGAELLEIAQANKVALYYEAAVAGGIPILRTLANSLASDKITRVLGVVNGTSNFMVTKMVEEGWSYDDALAEAQRLGFAESDPTNDVDGIDAAYKMVILSQFAFGMKIAFDDVAHKGIRNITPEDVAVAQELGYVVKLVGSIEETSSGIAAEVTPTFLPKAHPLASVNGVMNAVFVESIGIGESMYYGPGAGQKPTATSVVADIVRIVRRLNDGTIGKDFNEYSRDLVLANPEDVKANYYFSILALDSKGQVLKLAEIFNAQDISFKQILQDGKEGDKARVVIITHKINKAQLENVSAELKKVSEFDLLNTFKVLGE

SEQ ID NO: 2759 - DNA, 750 bp, Streptococcus pneumoniae
atgaggttactagcaatgaaaatgaaacaaattagtgatacaactttaaaaatcacgatatctttagaggatttgatggatcgtggaatggagattgctgactttctcgttcctcaagaaaaaacagaagagttcttttatgctatcttggatgagctagagatgcctgatagctttctggatacaggcatgttgagcttccgtgtgactccaaaacctgataaggtagatgtctttgtgaccaagtcaaagattgaccaaaatctagattttgaagacttatcggatttgccagatatggaagaattggctcaaatgtctccagatgaatttatcaaaaccctggaaaaaagcatcgcagacaaaaccaaggatgatatcgaagccattcaatctcttgagcaagttgaagtcaaggaagaagagcaagagcaggctgaacaagaagctgagagtaagaaagaaccttacatctactacatcctttcttttgctaagttggctgacttggtagcttttgccaagacagtgacttttgaaatggaaacttctgaactctacaaaatgaacgagcgctattatttgaccattttagtggatattgaaaatcatccaagcccatatccagcttggctgttggcccgtatgcgcgagtttgcagacgatagtgatatcagtcgctcagtcttacaagagtatggtcaagtcttgatgagtcacgatgcagtgctcaatctgcaaaaaatcggc

SEQ ID NO: 2760 - protein, 250 aa, Streptococcus pneumoniae
  putative transcriptional regulator MecA (mecA); Cellular location: cytoplasm; Similar to strain R6 sequence 15903263 (e-136)
MRLLAMKMKQISDTTLKITISLEDLMDRGMEIADFLVPQEKTEEFFYAILDELEMPDSFLDTGMLSFRVTPKPDKVDVFVTKSKIDQNLDFEDLSDLPDMEELAQMSPDEFIKTLEKSIADKTKDDIEAIQSLEQVEVKEEEQEQAEQEAESKKEPYIYYILSFAKLADLVAFAKTVTFEMETSELYKMNERYYLTILVDIENHPSPYPAWLLARMREFADDSDISRSVLQEYGQVLMSHDAVLNLQKIG

SEQ ID NO: 2761 - DNA, 1032 bp, Streptococcus pneumoniae
atgtttgaacattattcagtagctgatttgtttgcaaatctttataaaaagcgaaaagcaaatattttagctctcatcgctttatttgctctcattgctgtaccatttacaattaaagcagttaggaataaaaacactgtcaaagatacaacaagttattcaacttatcttatctataaaatcactcctccaaaagagtcggacaaaacgattttgaatcatcaaattggtggttatagtgatttttatgggaaattgattgatggtaatttgaatggagcttatcttttcaatgatgtagaacccagtgagttgaaaaaaattgccagtgaattagacacgacagaaacaaccttgaaaaattcaacgaatgactattggtggaaaaaattgaccgtctactatatgattgacgatgcaggggttggtgtgaaaattttgacatcaagtaaagatgccaataacttgttagagaaaaaaattgatgggttgattgagaaatttaaacatgcctatgcaaatgtgaaaattgaaaaactggaaaccatcaactctaaagaattgaacgcaaatggtgaaacagcgcttggcttaaatgtgaaaaatctgattcttcgtttagttgttattggagtggtttgtgtgattttggttgtgatgggaaatgtgttagtttatctctttaatccaacaatcaatagagtaggtgatttttctcagtatcaaattgattttgtaacagagattacaacaattgctaacctagcagatgttttgtcatacaaaaatactggacaggaattgaccatcgttagctcaaataaagctatcttagataaattgaaacagagtcaagaagctttaaaaggaatgcattttgtagatttacaggatgtatcatctcttttggaaagagatacagtccttcttgttgaagagtacggagtgactcgttataagaaatttgagcaaagtcttcaaattctcagaaacttaaatcgttctatcctcggtgtagcaacctttaaatta

SEQ ID NO: 2762 - protein, 344 aa, Streptococcus pneumoniae
  conserved domain protein; Cellular location: membrane; Similar to strain R6 sequence 15903264 (0.E+01)
MFEHYSVADLFANLYKKRKANILALIALFALIAVPFTIKAVRNKNTVKDTTSYSTYLIYKITPPKESDKTILNHQIGGYSDFYGKLIDGNLNGAYLFNDVEPSELKKIASELDTTETTLKNSTNDYWWKKLTVYYMIDDAGVGVKILTSSKDANNLLEKKIDGLIEKFKHAYANVKIEKLETINSKELNANGETALGLNVKNLILRLVVIGVVCVILVVMGNVLVYLFNPTINRVGDFSQYQIDFVTEITTIANLADVLSYKNTGQELTIVSSNKAILDKLKQSQEALKGMHFVDLQDVSSLLERDTVLLVEEYGVTRYKKFEQSLQILRNLNRSILGVATFKL

SEQ ID NO: 2763 - DNA, 1431 bp, Streptococcus pneumoniae
gtgattgatgggaaacgattattatttagtttgaccatagtcagttatgccttgacgctagtaagtggaattgtgtatctgtttaataataataatgttagcttactttctactttattgttcttgttggttagtagcttaattgcttgttggaatgatatcaagtattacttaatccattttattttctatttaaccatttttgtatttctggtatcaagaccgaccattgattattttagggatggtgctttggatacctatcatccaatagcctatcgttttgcctttatagttgtcatgatttcgattctgggcttgaccacaggaggcattctggctcgttacttcatagctaggaagaaaataaaagtagcaaatataggaaattctctaaaagaggtttatatcaagcggttacgctttgtatcactaggagtttttcttctaacttatcctttctatttcattcggttatttgaacggctcttgtatcgtttgcagacttcctactatgcctactatgcaaattttgaaagtaaactgccttattttacctacattttgtctacctttacggtctatgcaatgtgtatgtatctggcaaccaagccaaagaaattgcaggccacagcagtgcttgtctcctttattgcagctaatactattcatttggcaattgggacacgaaatccctttattttaagtattttatttgcttttgtttattactttatgcgggagcaaactgaaaaaggaaaatggattgggtttaaagaaaagttagcgatttttgtaggttctcctattctcatgttagcgatgggagtactcaattatgtacgggataatgtccaagtttcccatacaggtttctgggatatcttacttgactttatctataaacaagggactagttttggtgttctggctcgaggttttctatttaacagtagcctcccttaccgagatttccgtaattttacttttggtcctgttcttgattattttgcaagggggagtttgggagccattttcggaggaaaagcctttgaacatacaaccaatagtgtggaactagctattgatagtaatagttatgcccacaatctatcctatcttgtcttgaacaaggaatacttgaaagggcatggtatcggaagtagttatatcatggagttgtataccgactatggtatgattggagtctttctgcttagtttcttactcggcgtattatttatagccatgctgcaagtagcctatcgctcaaggacaatcctatttgctttatccctactcatcttgaataatctattctttatgccaagaagcagcttttcagaaagtttcttcaatttatttacaatgcaattctggggaattgttcttgtgattatatttgtagcaaaaatgcttacaaaggaaaac

SEQ ID NO: 2764 - protein, 477 aa, Streptococcus pneumoniae
  hypothetical protein; Cellular location: membrane; Similar to strain R6 sequence 15903265 (0.E+01)
MIDGKRLLFSLTIVSYALTLVSGIVYLFNNNNVSLLSTLLFLLVSSLIACWNDIKYYLIHFIFYLTIFVFLVSRPTIDYFRDGALDTYHPIAYRFAFIVVMISILGLTTGGILARYFIARKKIKVANIGNSLKEVYIKRLRFVSLGVFLLTYPFYFIRLFERLLYRLQTSYYAYYANFESKLPYFTYILSTFTVYAMCMYLATKPKKLQATAVLVSFIAANTIHLAIGTRNPFILSILFAFVYYFMREQTEKGKWIGFKEKLAIFVGSPILMLAMGVLNYVRDNVQVSHTGFWDILLDFIYKQGTSFGVLARGFLFNSSLPYRDFRNFTFGPVLDYFARGSLGAIFGGKAFEHTTNSVELAIDSNSYAHNLSYLVLNKEYLKGHGIGSSYIMELYTDYGMIGVFLLSFLLGVLFIAMLQVAYRSRTILFALSLLILNNLFFMPRSSFSESFFNLFTMQFWGIVLVIIFVAKMLTKEN

SEQ ID NO: 2765 - DNA, 984 bp, Streptococcus pneumoniae
atggaaactgcattaattagtgtgattgtgccagtctataatgtggcgcagtacctagaaaaatcgatagcttccattcagaagcagacctatcaaaatctggaaattattcttgttgatgatggtgcaacagatgaaagtggtcgcttgtgtgattcaatcgctgaacaagatgacagggtgtcagtgcttcataaaaagaacgaaggattgtcgcaagcacgaaatgatgggatgaagcaggctcacggggattatctgatttttattgactcagatgattatatccatccagaaatgattcagagcttatatgagcaattagttcaagaagatgcggatgtttcgagctgtggtgtcatgaatgtctatgctaatgatgaaagcccacagtcagccaatcaggatgactattttgtctgtgattctcaaacatttctaaaggaatacctcataggtgaaaaaatacctgggacgatttgcaataagctaatcaagagacagattgcaactgccctatcctttcctaaggggttgatttacgaagatgcctattaccattttgatttaatcaagttggccaagaagtatgtggttaatactaaaccctattattactatttccatagaggggatagtattacgaccaaaccctatgcagagaaggatttagcctatattgatatctaccaaaagttttataatgaagttgtgaaaaactatcctgacttgaaagaggtcgcttttttcagattggcctatgcccacttctttattctggataagatgttgctagatgatcagtataaacagtttgaagcctattctcagattcatcgttttttaaaaggccatgcctttgctatttctaggaatccaattttccgtaaggggagaagaattagtgctttggccctattcataaatatttccttatatcgattcttattactgaaaaatattgaaaaatctaaaaaattacat

SEQ ID NO: 2766 - protein, 328 aa, Streptococcus pneumoniae
  glycosyl transferase, family 2; Cellular location: membrane; Similar to strain R6 sequence 15903266 (0.E+01)
METALISVIVPVYNVAQYLEKSIASIQKQTYQNLEIILVDDGATDESGRLCDSIAEQDDRVSVLHKKNEGLSQARNDGMKQAHGDYLIFIDSDDYIHPEMIQSLYEQLVQEDADVSSCGVMNVYANDESPQSANQDDYFVCDSQTFLKEYLIGEKIPGTICNKLIKRQIATALSFPKGLIYEDAYYHFDLIKLAKKYVVNTKPYYYYFHRGDSITTKPYAEKDLAYIDIYQKFYNEVVKNYPDLKEVAFFRLAYAHFFILDKMLLDDQYKQFEAYSQIHRFLKGHAFAISRNPIFRKGRRISALALFINISLYRFLLLKNIEKSKKLH

SEQ ID NO: 2767 - DNA, 1155 bp, Streptococcus pneumoniae
atgatgctgtcatcgctgatatggataagtcttatacagaatacaagggagaatatggtggctaagaaaaaaatcttattttttatgtggtctttttctcttggaggtggtgcagagaagattctatcaaccattgtttcaaatctggatccagaaaagtatgatattgatattcttgaaatggagcactttgacaagggatatgaatctgttccaaagcatgtacgcattttaaaatcccttcaagattatcgccaaaccagatggttacgagcttttttgtggagaatgagaatttattttccaagactgactcgtcgtttgcttgtaaaagatgattatgatgttgaagtttcttttaccattatgaatccaccactgttgttctctaaaagaagagaagtcaagaagatatcttggattcatggaagtattgaagaacttcttaaggatagctctaaaagagaatcacatagaagccagttggatgctgcgaatacaattgtagggatttcaaaaaagaccagcaattctatcaaggaagtttatccagattatacttctaaattacagacaatctacaatggatatgattttcagactattctagaaaaatctcaagagaagatcgatatcgagattgctcctcaaagtatctgtactatcggacggattgaggaaaataagggttctgaccgtgtagtggaagtgatacgattattacaccaagagggaaaaaactatcatctctattttatcggggctggtgatatggaagaggaactgaaaaaacgagtcaaagagtatgggattgaggactatgtacatttccttggttatcaaaaaaatccttatcagtatctatctcagacgaaagttcttttgtctatgtctaaacaagaaggttttcctggagtgtatgtggaggccttgagtctgggactcccttttatctctacggacgttggaggggctgaggaattatcccaagaaggacgatttggacaaatcattgagagcaatcaagaggcagctcaggcgattactaattacatgacttctgcctcaaactttgatgtcgatgaggctagccaattcattcaacaatttacaattacaaaacaaatcgaacaagtagaaaaactattagaggag

SEQ ID NO: 2768 - protein, 385 aa, Streptococcus pneumoniae
  glycosyl transferase, group 1; Cellular location: outside; Similar to strain R6 sequence 15903267 (0.E+01)
MMLSSLIWISLIQNTRENMVAKKKILFFMWSFSLGGGAEKILSTIVSNLDPEKYDIDILEMEHFDKGYESVPKHVRILKSLQDYRQTRWLRAFLWRMRIYFPRLTRRLLVKDDYDVEVSFTIMNPPLLFSKRREVKKISWIHGSIEELLKDSSKRESHRSQLDAANTIVGISKKTSNSIKEVYPDYTSKLQTIYNGYDFQTILEKSQEKIDIEIAPQSICTIGRIEENKGSDRVVEVIRLLHQEGKNYHLYFIGAGDMEEELKKRVKEYGIEDYVHFLGYQKNPYQYLSQTKVLLSMSKQEGFPGVYVEALSLGLPFISTDVGGAEELSQEGRFGQIIESNQEAAQAITNYMTSASNFDVDEASQFIQQFTITKQIEQVEKLLEE

SEQ ID NO: 2769 - DNA, 843 bp, Streptococcus pneumoniae
atgaacaatatgactgatttaaaagcaattcaggctcgtagtctggagatggctgaatattttgtggccttttgtaaagaacatgatttgctctgttatctctgtggcggaggcgctattggtgcccttcgaaacaagggatttattccttgggacgacgacctagacttttttatgcctcgtaaagattatgagaaattagcagaattatggcctcgttatgcagatgaacgttatttcttgtcaaagagtcacaaggattttgttgatcgtaatctttttattaccattcgtgacaagaaaaccacctgtatcaagccttatcagcaggatttggatttgccacatggtctggccttggatgttttgcctttggattattatccgaaaaatccagctgagcggaaaaaacaggttcgttgggccttgatttattcactcttttgtgcgcaaactattccagaaaagcatggtgatctcatgaaatggggaagtcgcattttactgggtttgactccaaaatctctccgttatcgcatctggaaaaaagctgagaaagaaatgactaagtatgatttggctgattgtgatggcattacagaattatgctcaggtcctggctacatgagaaacaagtacccaatcacatcttttgaagacaatcttttcttgccatttgaaggaacagagatgcctattccaatcggctatgatgtctatctcagaactgcttttggggattatatgacgcctccaccagcagacaagcaggtaccgcatcatgatgctgtcatcgctgatatggataagtcttatacagaatacaagggagaatatggtggc

SEQ ID NO: 2770 - protein, 281 aa, Streptococcus pneumoniae
  licD3 protein (licD3); Cellular location: cytoplasm; Similar to strain R6 sequence 15903268 (e-172)
MNNMTDLKAIQARSLEMAEYFVAFCKEHDLLCYLCGGGAIGALRNKGFIPWDDDLDFFMPRKDYEKLAELWPRYADERYFLSKSHKDFVDRNLFITIRDKKTTCIKPYQQDLDLPHGLALDVLPLDYYPKNPAERKKQVRWALIYSLFCAQTIPEKHGDLMKWGSRILLGLTPKSLRYRIWKKAEKEMTKYDLADCDGITELCSGPGYMRNKYPITSFEDNLFLPFEGTEMPIPIGYDVYLRTAFGDYMTPPPADKQVPHHDAVIADMDKSYTEYKGEYGG

SEQ ID NO: 2771 - DNA, 108 bp, Streptococcus pneumoniae
gtgaagctgacgtggtttgaagagattttcgaagagtataagacagaaaaatcaaagtttgatagctatttggatagcagtcaggctttgattttttacagtctgcaa

SEQ ID NO: 2772 - protein, 36 aa, Streptococcus pneumoniae
  box element
MKLTWFEEIFEEYKTEKSKFDSYLDSSQALIFYSLQ

SEQ ID NO: 2773 - DNA, 1272 bp, Streptococcus pneumoniae
atgagtaaagaaaatcccttaagtcatcatgagcagttgcgttatgattatttgctaaaaaatattcactatctcaatgagagagaaaaaaatgagtttgcctatttgcaagaaaagctaactcttgctaggggaaatagtagctctagcttggaacaagaaagagaagagcaggttgacttaccaagctatgcgaaccggagtcgctcacaatccaaatcacaagcactctctttccctccaaaaaagaaaagacggaagctccgtcttaaacgaatttttatggtgattttttcacttttggtctgtgtggctttggccatggtattcatgtttttgcgtggttaccaagatgctagcgcaaagaaaactgctgatgcccgggcagctcaagtagaagtctttaatggtcaggacactagagatggagttaatattttaatcatgggtactgatggtcgaatcggccagaacagtgttgagacacgaactgactctattatggtattaaatgtcgggggctcagataagaaaatgaagctagtcagtttcatgcgtgataatttggtctatatagatggttatagtcaagtgattaatggtagaaaacagacagataacaagttaaacgtagcctacgagttaggagaacaagaggggcaaaaaggggcagaaatggttcgccaagtcttgaaagataattttgacttggacattaagtactacgccttggttgatttccaggcctttgccacagcgattgacacgcttttccctgatggggtgacgattgatgctcaattttcaacattgaatgggcgtcccctaacagaagctacagtcggagatgatttatacgctaccgagactgagtctccaacccaaaccattaaagtcggaaaacagcagatgaatggctcgaccctgctcaattatgctcgtttccgtgatgatgatgaggcagattacggccgtacaaaaagacagcaacaagttttaacagcaattttagagcaaattaaagatcccactaaacttttcactggttctgaagctcttggaaaggtttttgctatgacctcaaccaacgtaccctatactttcctcctaacaaacggtttatctgttttggatggagcaaaaaatggtattgaaaaattgacgattccagaactgggtgactgggtagatgcctatgatgtttatgggggcttgggcctgctggttgatcaaaacaaatatcaaaccaagctcgctcaaatgggcttaaga

SEQ ID NO: 2774 - protein, 424 aa, Streptococcus pneumoniae
  psr protein; Cellular location: membrane; Similar to strain R6 sequence 15903269 (0.E+01)
MSKENPLSHHEQLRYDYLLKNIHYLNEREKNEFAYLQEKLTLARGNSSSSLEQEREEQVDLPSYANRSRSQSKSQALSFPPKKKRRKLRLKRIFMVIFSLLVCVALAMVFMFLRGYQDASAKKTADARAAQVEVFNGQDTRDGVNILIMGTDGRIGQNSVETRTDSIMVLNVGGSDKKMKLVSFMRDNLVYIDGYSQVINGRKQTDNKLNVAYELGEQEGQKGAEMVRQVLKDNFDLDIKYYALVDFQAFATAIDTLFPDGVTIDAQFSTLNGRPLTEATVGDDLYATETESPTQTIKVGKQQMNGSTLLNYARFRDDDEADYGRTKRQQQVLTAILEQIKDPTKLFTGSEALGKVFAMTSTNVPYTFLLTNGLSVLDGAKNGIEKLTIPELGDWVDAYDVYGGLGLLVDQNKYQTKLAQMGLR

SEQ ID NO: 2775 - DNA, 846 bp, Streptococcus pneumoniae
atgaaaattgcttatctaggtcccaagggatcattttcacaccacgttgtgcagacagcttttcctcatgaggaattgcaggcttttgccaacattacagatgtcatcaaggcttatgagcaaggattagtgaactattctgtggtgccagttgaaaattctattgagggtagtgttcatgaaaccttggactatctttttcatcaggctcacatccaagcagtagcagaaatcgttcagcctattcatcagcagttgatggtggttccaggccatactaagattgaaaagattttttcacatccacaggccttggctcaaggaaagaaattcatcgatgaacaatatccagaggctcaaatcgaggtaacagctagtacagcttatgcggcccgttttatttccgaacatccagaccagccctttgcagcagttgcacctagaagttctgctgaagaatatggattggaactgattgccgaggatattcaggaaatggaagccaatttcacacgtttctgggttctaggagctgaaaagcctagtattcccttgcaagcacaaactgaaaagatgagtttggccttgacattacctgacaaccttccaggtgcactttataaggccctgtcgacctttgcttggcgaggaattgacttgacaaaaattgaaagttgtccactcaagacagcactgggtgaatactttttcattatcgatgtggattataccgataaggacttggtccactttgcccaaaaagaattagaagcgattggaatccagtataaaattctgggtgcctatcctatttatccaatatcagaccatggaaaggagagaaga

SEQ ID NO: 2776 - protein, 282 aa, Streptococcus pneumoniae
  prephenate dehydratase (pheA); Cellular location: cytoplasm; Similar to strain R6 sequence 15903270 (e-161)
MKIAYLGPKGSFSHHVVQTAFPHEELQAFANITDVIKAYEQGLVNYSVVPVENSIEGSVHETLDYLFHQAHIQAVAEIVQPIHQQLMVVPGHTKIEKIFSHPQALAQGKKFIDEQYPEAQIEVTASTAYAARFISEHPDQPFAAVAPRSSAEEYGLELIAEDIQEMEANFTRFWVLGAEKPSIPLQAQTEKMSLALTLPDNLPGALYKALSTFAWRGIDLTKIESCPLKTALGEYFFIIDVDYTDKDLVHFAQKELEAIGIQYKILGAYPIYPISDHGKERR

SEQ ID NO: 2777 - DNA, 474 bp, Streptococcus pneumoniae
atggctaaggtgttattagggtttatgggggctggaaaatcgactattgcaagaggcttggaccctaattaccttgatatggatgctctgattgagaatcgcctaggtatgtccattgcgaattttttcgctgaaaagggagaaacagcctttcgtcaggtagaatcagaagtcctagctgatttactacaaacagaccaagtcgtgtcaactggaggaggagtggttatttctcagagaaatcgtgacttactcaagactaatacagataacatctacctgagagcagattttgaaaccctctaccaacgtatcgcagctgataaggacaatcagcgaccgctttttctaaataatagcaaggaagaactagtagctattttccaagaaagacaggcttggtatgaggaagtggctagtcgggttttggatgtgaccaagctaagcccagaggaaattatagaggaactaaga

SEQ ID NO: 2778 - protein, 158 aa, Streptococcus pneumoniae
  shikimate kinase (aroK); Cellular location: cytoplasm; Similar to strain R6 sequence 15903271 (2.E-82)
MAKVLLGFMGAGKSTIARGLDPNYLDMDALIENRLGMSIANFFAEKGETAFRQVESEVLADLLQTDQVVSTGGGVVISQRNRDLLKTNTDNIYLRADFETLYQRIAADKDNQRPLFLNNSKEELVAIFQERQAWYEEVASRVLDVTKLSPEEIIEELR

SEQ ID NO: 2779 - DNA, 1281 bp, Streptococcus pneumoniae
atgaaactaaaaacaaacattcgccatttacatggtagtatccgcgtcccaggtgacaagtctatcagccaccgttccattatctttggaagtttggctgagggtgagaccaaggtttatgatattctgcgaggtgaagacgttctttcgaccatgcaggtttttcgtgaccttggtgttgaaattgaggataaagatggggttattaccattcaaggtgtaggcatggctggcttaaaagcgccacaaaatgcccttaatatgggaaattctggcacctcgattcgcctgatttcaggtgtccttgctggtgcagatttcgaagtagagatgtttggagatgatagtctttccaaacgtcctatggaccgtgtgacccttccactgaaaaaaatgggcgtcagcatttcagggcaaactgaacgagacttgcctccccttcgcttaaaagggacgaaaaacctaagacctattcattatgagttgccaattgcctctgcccaagtcaagtcagccttgatgtttgcagccttacaagctaagggggagtcagttattatcgaaaaagagtacacccgtaatcatactgaagatatgttgaaacaatttggtggtcatttaagtgtggatggtaagaaaatcacagtccaggggccacaaaaattgacaggacagaaggtggtcgtaccaggagatatttccagtgcagccttttggttagtcgcaggtttgattgctccaaattctcgtctagtgctgcagaatgtggggatcaacgaaactcgcaccggtattattgatgtcattcgtgccatgggtggaaaattggaaataactgaaatcgatccagtcgctaaatctgctaccttgattgttgagtcttctgacttgaaaggaacagagattggtggcgctttgattccacgattgattgatgaattgcccattattgccctgcttgcgacccaagcccaaggtgtaacagttatcaaggatgctgaggagctcaaggtcaaggaaacagaccgtattcaggttgtggcagacgccttaaatagtatgggagcagatattactcctacggcagatgggatgattatcaaaggaaaatcagctcttcacggtgctagagtcaatacgtttggtgaccaccgtatcggcatgatgacagctatcgcagccctcttggttgcagatggagaggtggagcttgaccgtgcagaagccatcaataccagctatcctagtttctttgatgatttggagagcttgattcatggc

SEQ ID NO: 2780 - protein, 427 aa, Streptococcus pneumoniae
  3-phosphoshikimate 1-carboxyvinyltransferase (aroA); Cellular location: membrane; Similar to strain R6 sequence 15903272 (0.E+01)
MKLKTNIRHLHGSIRVPGDKSISHRSIIFGSLAEGETKVYDILRGEDVLSTMQVFRDLGVEIEDKDGVITIQGVGMAGLKAPQNALNMGNSGTSIRLISGVLAGADFEVEMFGDDSLSKRPMDRVTLPLKKMGVSISGQTERDLPPLRLKGTKNLRPIHYELPIASAQVKSALMFAALQAKGESVIIEKEYTRNHTEDMLKQFGGHLSVDGKKITVQGPQKLTGQKVVVPGDISSAAFWLVAGLIAPNSRLVLQNVGINETRTGIIDVIRAMGGKLEITEIDPVAKSATLIVESSDLKGTEIGGALIPRLIDELPIIALLATQAQGVTVIKDAEELKVKETDRIQVVADALNSMGADITPTADGMIIKGKSALHGARVNTFGDHRIGMMTAIAALLVADGEVELDRAEAINTSYPSFFDDLESLIHG

SEQ ID NO: 2781 - DNA, 336 bp, Streptococcus pneumoniae
atgtcaaatatttacgatagtgcaaacgaactcagtcgcggtctacgcggattaccagaatacaaggctgttaaagcagctaaagatgcgattgcagcagatgctgaggcaagcaaaatctttacagattatcttgcctttcaagaggaaattcaaaaactagcacagacaggtcaaatgccagatgcgtccttccaagctaagatggaaggctttggtaaacagattcaaggaaatagcctcttgtcagaattctttaccaagcaacaacaattggccatttacctttctgatattgaaaaaattgtttttgaaccagtttcagaattgctgaaa

SEQ ID NO: 2782 - protein, 112 aa, Streptococcus pneumoniae
  conserved hypothetical protein; Cellular location: cytoplasm; Similar to strain R6 sequence 15903273 (5.E-58)
MSNIYDSANELSRGLRGLPEYKAVKAAKDAIAADAEASKIFTDYLAFQEEIQKLAQTGQMPDASFQAKMEGFGKQIQGNSLLSEFFTKQQQLAIYLSDIEKIVFEPVSELLK

SEQ ID NO: 2783 - DNA, 1101 bp, Streptococcus pneumoniae
atggcaaaaacaatctatatcgcaggtcttgggttgattggagcctctatggcacttggtatcaaacgcgatcatccagattatgaaattttaggttataatcgtagtcaagcttcgagagatatcgccttgaaagaaggtatgattgaccgtgcaacggatgattttgctagttttgctcctttggcagatgtcattatcctcagcttgccaatcaaacaaactattgctttcattaaggagttggccaatttggatttgcgagaaggcgttattatttcagatgctggttcgaccaagtcaaccattgtggatgcggcggagcagtatttggctggcaagtctgttcgctttgtcggggcccatcccatggctggtagtcacaagacaggggctgcttcggcagatgtcaatctttttgaaaatgcctattatatctttacaccttcaagcctgacaagtcaggacacgcttaaggaaatgaaggatctgctttcaggtcttcatgctcgttttatcgagattgatgccaaggagcatgatcgtgtcacttctcagattagccattttcctcatattttggcttctagtctcatggagcagactgcggtctatgctcaagagcatgagatggcaaggcgctttgcggcaggtggttttcgagatatgacccgaattgcggaaagcgagccaggaatgtggacctccattctcttgtccaatagcgagatcattctggatagaattgaggatttcaaggaacgtttggaagcgattggtcaggccattagtaagggagatgaagagcaaatttggaacttttttaaccaagcgcgtgaacaacgccagaccatggaaatccataagcgtggtggtgtggatagctcttacgacctctatgttgacgttcctgatgaagaagatgtcatcctgcggattttggaactgctacgtggaacttccttggttaatatccacatcaacgaggaaaatcgtgaggatattcacggaatcctacaaatttcatttaaaaatgctcaagacttggaaagagctgagcatctcataacagaaaatactgactatacagtcgtcatcaaa

SEQ ID NO: 2784 - protein, 367 aa, Streptococcus pneumoniae
  prephenate dehydrogenase (tyrA); Cellular location: membrane; Similar to strain R6 sequence 15903274 (0.E+01)
MAKTIYIAGLGLIGASMALGIKRDHPDYEILGYNRSQASRDIALKEGMIDRATDDFASFAPLADVIILSLPIKQTIAFIKELANLDLREGVIISDAGSTKSTIVDAAEQYLAGKSVRFVGAHPMAGSHKTGAASADVNLFENAYYIFTPSSLTSQDTLKEMKDLLSGLHARFIEIDAKEHDRVTSQISHFPHILASSLMEQTAVYAQEHEMARRFAAGGFRDMTRIAESEPGMWTSILLSNSEIILDRIEDFKERLEAIGQAISKGDEEQIWNFFNQAREQRQTMEIHKRGGVDSSYDLYVDVPDEEDVILRILELLRGTSLVNIHINEENREDIHGILQISFKNAQDLERAEHLITENTDYTVVIK

SEQ ID NO: 2785 - DNA, 1164 bp, Streptococcus pneumoniae
atgagatatttaactgcaggagaatcacacggcccccgtctaacagctattattgagggaattccagctggacttccattgacagctgaggatatcaatgaggaccttagacgccgtcagggtggctacggtcgtggtggtcgtatgaagattgagaatgaccaggttgtctttacttcgggcgttcgccacgggaagacgacaggggcgcctattactatggatgtcatcaataaggaccaccagaaatggctggacatcatgtctgcggaggacattgaagaccgccttaaaagcaagcggaaaattactcatcctcgcccaggtcatgccgatttggttggggggattaagtaccgttttgatgatttgcgaaattctttggagcgttcatcagctcgtgaaaccaccatgcgggtggcagttggtgcagtagccaaacgcctcttggctgagctggatatggagattgccaaccatgtcgtggtctttggtggcaaggaaatcgatgttcctgaaaatctgacagtcgctgaaattaagcaaagagctgcccagtctgaagtttctattgtcaaccaagaacgagaacaggaaatcaaggactatattgaccaaatcaaacgtgatggtgataccatcggtggggttgtggagacagtcgtcggaggcgttccagttggtcttggttcctatgtccaatgggatagaaaattggatgcaagattggctcaagctgttgtctctatcaatgcctttaaaggggtggaatttggtcttggctttgaggctggttatcgtaaaggcagccaagttatggatgaaattctctggtctaaagaagacggttatactcgccgtaccaataatctaggtggttttgaaggtggtatgactaatgggcaacccatcgttgttcgtggggtcatgaaacccattcctactctttataaacctcttatgagtgtggatatcgaaacccacgaaccttacaaggcaaccgtggagagaagtgatccgactgctcttccagctgcaggaatggtcatggaagcagttgtagcaacggttctggcgcaagaaatcctcgaaaaattctcatcagataatcttgaggaactaaaagaagcggtagccaaacaccgagactatacaaagaactat

SEQ ID NO: 2786 - protein, 388 aa, Streptococcus pneumoniae
  chorismate synthase (aroC); Cellular location: membrane; Similar to strain R6 sequence 15903275 (0.E+01)
MRYLTAGESHGPRLTAIIEGIPAGLPLTAEDINEDLRRRQGGYGRGGRMKIENDQVVFTSGVRHGKTTGAPITMDVINKDHQKWLDIMSAEDIEDRLKSKRKITHPRPGHADLVGGIKYRFDDLRNSLERSSARETTMRVAVGAVAKRLLAELDMEIANHVVVFGGKEIDVPENLTVAEIKQRAAQSEVSIVNQEREQEIKDYIDQIKRDGDTIGGVVETVVGGVPVGLGSYVQWDRKLDARLAQAVVSINAFKGVEFGLGFEAGYRKGSQVMDEILWSKEDGYTRRTNNLGGFEGGMTNGQPIVVRGVMKPIPTLYKPLMSVDIETHEPYKATVERSDPTALPAAGMVMEAVVATVLAQEILEKFSSDNLEELKEAVAKHRDYTKNY

SEQ ID NO: 2787 - DNA, 1065 bp, Streptococcus pneumoniae
atgaaaatcagaatcgatattcctcaccatccttatgatattcagattgaaaaaggttgtatggcccaggctggtcagtggttgcgagaactctggcaaccgcaaaaggtagtcattgtgacagataaccatgtagcctctctctatgcagagaaggtcaagctcagcctagaagatgctggttttcaggtagctgtttttgatttcttagaaggtgaagaaagaaagaatttaactactgttcagaaagtctatgaatttctagtcaagcaaggtctgactcgtagcgatggaatcgttgctcttggtggtggcgttgttggggacctggctggatttgtagcctctacctatatgcggggtattcactttgttcagattccgactagtttgacagctcaggttgattcttctatcggtggaaagacaggcgttaatacaccatttgctaaaaatatggtggggacctttgcccaaccagatggggttctgattgatccacttgttcttgaaaccctcggaaaaagagagttgattgaagggatgggtgaagttatcaagtatggcttgattgaggatccagaactgtgggctctcttgacgggactgaatggttctgttgagagtattttggaacatgcagagaccttgattgaacattcttgtcaggtgaagcgcaagatggtggttgaagatgagttggacaatggtattcgtctttacctcaattttggccacactattggccatgccatcgaagcgactgccggttatggcaaggtcatgcatggagaggctgttgccatgggaatggtacagatttccaaggttgctgaggaaaaaggcctcatgccagctggcattacccaatctatcacagagatgtgtcagaaattcggtttgcctgttgactatgaaaattgggaagttggcaagctttatcaggctcttactcatgacaagaaagcgcgtggtaacaccttgaaattggtcttggtgccagagcttggttcagcgaccattcacccagtttctctggaagagatgaaagactacttggtaaaa

SEQ ID NO: 2788 - protein, 355 aa, Streptococcus pneumoniae
  3-dehydroquinate synthase (aroB); Cellular location: membrane; Similar to strain R6 sequence 15903276 (0.E+01)
MKIRIDIPHHPYDIQIEKGCMAQAGQWLRELWQPQKVVIVTDNHVASLYAEKVKLSLEDAGFQVAVFDFLEGEERKNLTTVQKVYEFLVKQGLTRSDGIVALGGGVVGDLAGFVASTYMRGIHFVQIPTSLTAQVDSSIGGKTGVNTPFAKNMVGTFAQPDGVLIDPLVLETLGKRELIEGMGEVIKYGLIEDPELWALLTGLNGSVESILEHAETLIEHSCQVKRKMVVEDELDNGIRLYLNFGHTIGHAIEATAGYGKVMHGEAVAMGMVQISKVAEEKGLMPAGITQSITEMCQKFGLPVDYENWEVGKLYQALTHDKKARGNTLKLVLVPELGSATIHPVSLEEMKDYLVK

SEQ ID NO: 2789 - DNA, 852 bp, Streptococcus pneumoniae
atgaagcttgatggctatacacgtttagctgcagttgttgccaatcctattaagcattctatttctcccttcatccacaatagagcctttgaggcgacagctaccaacggtgcttatgtggcttgggagattgaagcgagtgacttggtagaaacagtggccaatattcgtcgctaccagatgtttggcatcaatctgtccatgccctataaggagcaggtgattccttatttggataagctgagcgatgaagcgcgcttgattggtgcggttaatacggttgtcaatgagaatggcaatttaattggatataatacagatggcaagggattttttaagtgcttgccttcttttacaatttcaggtaaaaagatgaccctgctgggtgcaggtggtgcggctaaatcaatcttggcacaggctattttggatggcgtcagtcagatttcggtctttgttcgttccgtttctatggaaaaaacaagaccttacctagacaagttacaggagcagacaggttttaaagtggatttgtgtgctttagaatatgtttctgaactgcaagcaaggattgccgagtcggatttgctagttaatgccaccagtgtgggcatggatggccaatcctctcctgttcctgaaaacatagtcttaccagaaactcttttagttgcagatatcatataccaaccctttgaaacaccgtttttgaaatgggctagaagtcagggcaatccagcagtcaatggtctgggaatgttactctatcaagctgcagaagcttttcaactgtggacaggcaaggaaatgccgacagaagagatttggcagtctttaacagaaaaataccaa

SEQ ID NO: 2790 - protein, 284 aa, Streptococcus pneumoniae
  shikimate dehydrogenase (aroE); Cellular location: membrane; Similar to strain R6 sequence 15903277 (e-162)
MKLDGYTRLAAVVANPIKHSISPFIHNRAFEATATNGAYVAWEIEASDLVETVANIRRYQMFGINLSMPYKEQVIPYLDKLSDEARLIGAVNTVVNENGNLIGYNTDGKGFFKCLPSFTISGKKMTLLGAGGAAKSILAQAILDGVSQISVFVRSVSMEKTRPYLDKLQEQTGFKVDLCALEYVSELQARIAESDLLVNATSVGMDGQSSPVPENIVLPETLLVADIIYQPFETPFLKWARSQGNPAVNGLGMLLYQAAEAFQLWTGKEMPTEEIWQSLTEKYQ

SEQ ID NO: 2791 - DNA, 675 bp, Streptococcus pneumoniae
atgaaattaatcgtttcagtaatgccaagaagtttagaggaggctcaggctctggatgccacgaggtacctggatgccgacatcattgaatggcgtgccgactatctgcctaaagaagcgattttgcaggtagctccagccatttttgaaaaattcgcaggccgtgagttggttttcacgctacgaactcgctccgaaggtggagaaatcgacctttctccagaagagtatatccatctaatcaaggaagttgcgcaactctatcaaccagactatattgattttgagtactatagctacaaggatgtttttgaggaaatgctggacttcccaaatcttgttttgagttaccataatttccaagaaacacctgagaacatgatggaaatcttgtcagagttgacgatcctaaatccaaaacttgttaaggttgcggtgatggctcacacggagcaggatgtcttagacttgatgaactatacacgaggctttaaaaccctcaatcctgaacaggaatatgtgaccatttctatgggtaaggtgggcaaggtctctcgtatcactgcggatgtgactggttcgagttggtcttttgccagtctggatgaggttagtgcccctgggcagatttctctagctagcatgaaaaaaatcagggagattttggatgaagct

SEQ ID NO: 2792 - protein, 225 aa, Streptococcus pneumoniae
  3-dehydroquinate dehydratase (aroD); Cellular location: cytoplasm; Similar to strain R6 sequence 15903278 (e-126)
MKLIVSVMPRSLEEAQALDATRYLDADIIEWRADYLPKEAILQVAPAIFEKFAGRELVFTLRTRSEGGEIDLSPEEYIHLIKEVAQLYQPDYIDFEYYSYKDVFEEMLDFPNLVLSYHNFQETPENMMEILSELTILNPKLVKVAVMAHTEQDVLDLMNYTRGFKTLNPEQEYVTISMGKVGKVSRITADVTGSSWSFASLDEVSAPGQISLASMKKIREILDEA

SEQ ID NO: 2793 - DNA, 1170 bp, Streptococcus pneumoniae
atggtagttatgaatagaataagagtcagcaaaagggttgaaaagaagcttgctaaggggctagttttactagaagccagtgatcttgagaatgtcaatcttaaggatcaggaagtagaggtgcagggtcaggaaggaaactttcttgggactgcctacctttctcagcaaaacaagggcttgggctggtttatcagcaaagacaaggtggccttcaatcaagctttctttgaaacgttgtttagaaaagccaaagaaaagagaaacgcctactatcaagatgatttgacaactgcctttcgtctctttaatcaagagggagatggctttgggggtctgacagtggacctttatggcgactacgccgtcttttcttggtataactcttatgtttatcagattcgtcagactatatcagaagcctttagacaggttttccctgaggttttaggagcttatgagaaaatccgctttaagggtttggactatgaatctgcccatgtttatggtcaagaagcacctgactttttcaatgttttagaaaatggtgtcctgtatcaagtctttatgaatgatggcttgatgacaggaattttcctagaccagcatgaggttcgcggtagtttagttgacggcttggctatgggtaaatccttactcaatatgttttcctacacagcggctttttcagtagctgcggccatgggaggagctagccatacaacttctgttgatctagccaaacgttcacgagaattgtctcaagcgcattttcaggcaaatgggctcagcacagacgagcatcgttttatagtcatggatgtctttgagtatttcaaatatgccaaacgcaaagacttgacctacgatgtgattgtcctagatccgcctagctttgctcggaataaaaaacaaactttctctgtggccaaggattatcacaagttgatttcccagagtcttgagattttaaatccgggagggattatcattgccagtaccaatgctgccaatgtttcccgtcagaaatttacagaacaaattgataaaggttttgcaggaagaagttaccagattttaaacaaatatggtcttccagcagattttgcctataataaaaaagatgaaagtagtaattacctcaaggtgattagtatgaaggttagtaaa

SEQ ID NO: 2794 - protein, 390 aa, Streptococcus pneumoniae
  conserved hypothetical protein; Cellular location: cytoplasm; Similar to strain R6 sequence 15903279 (0.E+01)
MVVMNRIRVSKRVEKKLAKGLVLLEASDLENVNLKDQEVEVQGQEGNFLGTAYLSQQNKGLGWFISKDKVAFNQAFFETLFRKAKEKRNAYYQDDLTTAFRLFNQEGDGFGGLTVDLYGDYAVFSWYNSYVYQIRQTISEAFRQVFPEVLGAYEKIRFKGLDYESAHVYGQEAPDFFNVLENGVLYQVFMNDGLMTGIFLDQHEVRGSLVDGLAMGKSLLNMFSYTAAFSVAAAMGGASHTTSVDLAKRSRELSQAHFQANGLSTDEHRFIVMDVFEYFKYAKRKDLTYDVIVLDPPSFARNKKQTFSVAKDYHKLISQSLEILNPGGIIIASTNAANVSRQKFTEQIDKGFAGRSYQILNKYGLPADFAYNKKDESSNYLKVISMKVSK

SEQ ID NO: 2795 - DNA, 144 bp, Streptococcus pneumoniae
ttgcttttttactcttcttttaaaaaatggtatactagacttcctgcaaaactaggaagtaaatgtgtaagaatcacagtaaaaaatgctcttccgtcttggaggagcatttctttttatcaacgaaaatcaaatagcaaacta

SEQ ID NO: 2796 - protein, 48 aa, Streptococcus pneumoniae
  hypothetical protein; Cellular location: cytoplasm
MLFYSSFKKWYTRLPAKLGSKCVRITVKNALPSWRSISFYQRKSNSKL

SEQ ID NO: 2797 - DNA, 1659 bp, Streptococcus pneumoniae
ttgctggtagaaaagaggaggttgcggatgcgtctcaaggtcattaaaaaattagttgatatcaatatcctttattcatctcaagaagctaatctggctaatctacgaaagaagcaggctaagaatcctgggaaaaaagtaaatgtttccgctagagtcttaagttcttacattttttccagtctcttgatgatcatctgttttagtaatatagccattcattttccttttgaggaaatacctatttattttagctcgatgattgctattttactagtgattgccttttcaacttctttaacggccttttacaatgtcttttatgagagtaaggatttggtatcgtataggccctatgcctttaaagaatcagagattataattgctaaaggactgtctgtccttttgccagctctaactggaattgtaccaatcctagcttattttctggtcctctacattaggctagctccttctctatggctgggtttgcctttgatgctactgtccttgaccttattatttgtctctgtggctctagtgatggtagtggcagtgcatttcttggctcaaactagggtcttcagaaagtatcagtctattttttcgaatgtgatgattgggataggagttctcatacctttaatatttatcttctttcttcagtcgacttttggaagtattgttgacaaagttagagacattccatttctcctttatcctcttcatatcttttacaaaatagcagtggagcctttttcgacagaagccttagtgggtctgctcgcttggataggactaactctcttcctgctttatctgaccaaaaagaaggtccttcctcgtttttatgacgtgatcctgcttaatagtgaggagaaggtcaaaaaagaacgtcgcagcaaggagagaatttcaaccactaaaaagggattttttcgcatggttttacgctaccacctcaccctcttgggacaggggactggcgtgattacagtgctttttacaagtgctttccttccttatctcatgatgatcggtctgatttccaaaatccgagattctcagatagttccagacattcatcctccatactggttacccttgttttttatagctctctttatagcagttgtcaataacaatatcaccagcctgcattcaattgccttgtccttggagagggaaaatgttgattttcttaagagtttaccctttgactttgctcgttatgtgaaagtgaaattttggattatatatgctgtccagtcctttttaccagttctgactttgcttggtctttctctatatctaggcttgcccatcatttcgatgatttaccttcttgtagtctggatcattgccagtgtcatcctttcttgccaccattactttaaggacgttaaaaatctgtcaaccaattggagtagcattacggacctggtgaatcgttcaaatggcatagtcgccatagttttattgtttatttatagtgcaatcctgatggcccttgtaattgggagcatattcttggttcagtctctctcccctatccttgccatcagcttgggagtaggagctcttatcgtcttgcttgctcttgctatttttggctatcattattacctgtcacgcatattggcagaaatagaaaaaaga

SEQ ID NO: 2798 - protein, 553 aa, Streptococcus pneumoniae
  hypothetical protein; Cellular location: membrane; Similar to strain R6 sequence 15903280 (0.E+01)
MLVEKRRLRMRLKVIKKLVDINILYSSQEANLANLRKKQAKNPGKKVNVSARVLSSYIFSSLLMIICFSNIAIHFPFEEIPIYFSSMIAILLVIAFSTSLTAFYNVFYESKDLVSYRPYAFKESEIIIAKGLSVLLPALTGIVPILAYFLVLYIRLAPSLWLGLPLMLLSLTLLFVSVALVMVVAVHFLAQTRVFRKYQSIFSNVMIGIGVLIPLIFIFFLQSTFGSIVDKVRDIPFLLYPLHIFYKIAVEPFSTEALVGLLAWIGLTLFLLYLTKKKVLPRFYDVILLNSEEKVKKERRSKERISTTKKGFFRMVLRYHLTLLGQGTGVITVLFTSAFLPYLMMIGLISKIRDSQIVPDIHPPYWLPLFFIALFIAVVNNNITSLHSIALSLERENVDFLKSLPFDFARYVKVKFWIIYAVQSFLPVLTLLGLSLYLGLPIISMIYLLVVWIIASVILSCHHYFKDVKNLSTNWSSITDLVNRSNGIVAIVLLFIYSAILMALVIGSIFLVQSLSPILAISLGVGALIVLLALAIFGYHYYLSRILAEIEKR

SEQ ID NO: 2799 - DNA, 747 bp, Streptococcus pneumoniae
atgattgaatttcaaaatgttagtaagttgtatggtgataaagaggccttgagtaatctcaatttgcagattgaaaatggagagattatgggcttgattggtcataatggggctggaaaatcgaccactataaaatccctagtcagtatcatttcacccagcagtggtcgtattttggtagacggtcaggagttatcggaaaatcgcttggctattaaacgaaagattggctacgtagcagactcgcctgacttatttttacgcttaacggccaatgaattttgggaattgatcgcctcatcctatgatctgagtagatctgacttggaggctagtctagctaggctattgaacgtttttgattttgctgaaaatcgctatcaggttattgaaactctttctcacggaatgcgtcagaaagtctttgtcatcggagcactcttgtctgatcccgatatttgggtcttggatgaacccttgactggtttggatccccaggctgcctttgatttgaaacagatgatgaaggaacatgcacaaaaagggaagacagtcttgttttcaactcatgtcctagaggtggcagagcaagtctgtgatcggattgccattttgaaaaaggggcatttgatttattgtggtagtgtagaggacttgagaaaagattacccagaccagtctttggaaagtatctaccttagtcttgctggtagaaaagaggaggttgcggatgcgtctcaaggtcat

SEQ ID NO: 2800 - protein, 249 aa, Streptococcus pneumoniae
  ABC transporter, ATP-binding protein; Cellular location: cytoplasm; Similar to strain R6 sequence 15903281 (e-137)
MIEFQNVSKLYGDKEALSNLNLQIENGEIMGLIGHNGAGKSTTIKSLVSIISPSSGRILVDGQELSENRLAIKRKIGYVADSPDLFLRLTANEFWELIASSYDLSRSDLEASLARLLNVFDFAENRYQVIETLSHGMRQKVFVIGALLSDPDIWVLDEPLTGLDPQAAFDLKQMMKEHAQKGKTVLFSTHVLEVAEQVCDRIAILKKGHLIYCGSVEDLRKDYPDQSLESIYLSLAGRKEEVADASQGH

SEQ ID NO: 2801 - DNA, 1452 bp, Streptococcus pneumoniae
atgcaaaatcaaacactcatgcaatactttgaatggtatctgccccacgacggtcaacactggacgcgtctggctgaaaatgctccacacctagctcatctggggatcagtcacgtctggatgccaccagccttcaaggcaaccaacgaaaaagatgtcggctatggggtctatgacttatttgacttaggagagttcaaccaaaaagggactgtccgcaccaagtatggtttcaaagaagactatcttcaagccattcaagcccttaaagcacagggaattcaacctatggccgatgtagttctcaaccacaaggctgctgccgatcacagggaagcctttcaggttatcgaagttgatcctgtagaccgtacagttgaacttggagaacccttcaccatcaatggctggactagttttaccttcgatggtcgccaagatacctataatggcttccactggcattggtaccacttcaccggtacagactacgatgccaaacgcagtaaatctgggatttatctgatccaaggggacaacaagggctgggccaacgaggaattggtcgataacgaaaacggaaactacgactacctcatgtatgccgacctagactttaaacatcctgaagtcatccaaaacatctatgactgggctgattggttcatggaaacgactggtgtagctggtttccgtttggatgccgttaagcatattgactctttctttatgcgcaacttcatccgcgatatgaaggaaaaatacggtgacgatttctatgtttttggtgaattttggaacccagacaaggaagccaatctggactatctcgaaaaaacggaagaacactttgaccttgtcgatgttcgtctccaccagaatctctttgaagccagtcaagctggcgcaaactatgaccttcgtggcattttcacagatagcctggttgaactcaagcctgacaaggctgtgacttttgtcgacaaccacgatacccaacgaggacaagcccttgagtctaccgttgaagaatggttcaagccagcagcctatgccctcattttgttacgccaagacggccttccatgtgtcttttacggagactactatgggatttcagggcagtatgctcaagaagatttcaaagaaatccttgaccgcctcctagccatccgaaaagatttggcctatggagaacaaaatgactactttgaccatgctaactgtatcggttgggtacgttcaggtgctgaaaatcaatccccaatcgcagtccttatctcaaatgaccaagaaaacagcaagtcaatgtttgtcggtcaagaatggactaatcaaacctttgtagatttacttggtaaccaccaaggtcaagttacaattgatgaggaaggttatggacaattccctgtctcagctagatccgtaagtgtctgggcagtcaataccatc

SEQ ID NO: 2802 - protein, 484 aa, Streptococcus pneumoniae
  alpha-amylase (amy); Cellular location: cytoplasm; Similar to strain R6 sequence 15903282 (0.E+01)
MQNQTLMQYFEWYLPHDGQHWTRLAENAPHLAHLGISHVWMPPAFKATNEKDVGYGVYDLFDLGEFNQKGTVRTKYGFKEDYLQAIQALKAQGIQPMADVVLNHKAAADHREAFQVIEVDPVDRTVELGEPFTINGWTSFTFDGRQDTYNGFHWHWYHFTGTDYDAKRSKSGIYLIQGDNKGWANEELVDNENGNYDYLMYADLDFKHPEVIQNIYDWADWFMETTGVAGFRLDAVKHIDSFFMRNFIRDMKEKYGDDFYVFGEFWNPDKEANLDYLEKTEEHFDLVDVRLHQNLFEASQAGANYDLRGIFTDSLVELKPDKAVTFVDNHDTQRGQALESTVEEWFKPAAYALILLRQDGLPCVFYGDYYGISGQYAQEDFKEILDRLLAIRKDLAYGEQNDYFDHANCIGWVRSGAENQSPIAVLISNDQENSKSMFVGQEWTNQTFVDLLGNHQGQVTIDEEGYGQFPVSARSVSVWAVNTI

SEQ ID NO: 2803 - DNA, 2616 bp, Streptococcus pneumoniae
atgaaacaactatctagtgcacaagtacgccaaatgtggcttgatttctgggcgaccaaaggtcactcagtagaaccatcagtaagtttggttcctgtaaatgacccaactcttttgtggatcaactctggggtagcaacccttaagaaatactttgacgggaccattatccctgaaaatccacgtattaccaatgcccaaaaggctatccgtaccaacgacatcgaaaacgtagggaagaccgcgcgtcaccataccatgtttgaaatgctggggaacttctctatcggggattacttccgtgacgaagctatcacttgggcttatgagcttttgacaagccctgaatggtttgatttccctgctgaaaaactttacatgacctactatccagacgataaagattcttacaaccgctggattgaagtgggagtggatccaagtcacttgattccaattgaggacaacttctgggaaatcggtgcgggaccttctggaccagatacagaaatcttctttgaccgtggggaagcctttgacccagaaaatatcggtcttcgcctgcttgcagaagatattgaaaacgaccgttatattgaaatctggaacatcgttttgtcacaatttaacgcagaccctgctgttcctcgtagcgaatacaaggaattgccacataagaacattgatacgggcgctggtttggagcgtttggtggccgttatccaaggggctaagaccaactttgaaacggacctcttcatgccgattatccgtgaagtcgagaaattgtctggtaaggtttatgaccaagatggcgacaacatgagcttcaaggttatcgcagaccacattcgttctctttcatttgctatcggtgatggtgcccttccaggaaatgaaggtcgtggttatgttcttcgtcgtcttctccgtcgtgcttctatgcatggtcaaaaattgggtatcaacgagcctttcctttacaaattggttccaactgttggaaaaatcatggaaagctactacccagaagtgcttgagaaacgtgactttattgagaaaatcgttaagagcgaagaagaatcatttgcccgtacccttcactcaggtcaacactttgcccaaggcattgtagcagacttgaaagaaaaaggtcaatctgttatcgctggttcagatgtcttcaaactctatgatacttatgggttcccagttgaattgactgaagaaatcgctgaagaagctggtatgactgtagaccgtgaaggttttgaagcagccatgaaagaacagcaagaacgcgcgcgtgcgtcagctgtcaagggtggctcaatgggtatgcaaaatgaaactcttcaaaacatcactgtagaaagtgtcttcaactacaatgctagccaattgtcttctaaattggtagctatcgttgctgacaatgcagaagtaggagctgtttcagaaggaactgcctctcttatctttgcggaaacgtcattttatgctgaaatgggtggacaggtagctgactacggacaaatcttggatgagtcaggtaaggttgtggctactgtgaccaatgttcagaaagccccaaatggtcaagcccttcatacagttgaagtccttgcaccgcttgccttgaaccaagaatataccttggcaattgatagcaatcgccgtcaccgtgtcatgaaaaaccacactgcgactcatttgcttcacgctgcccttcacaatatccttggaaaccacgcaacacaggcaggatctcttaacgaagttgaattccttcgctttgactttacccacttccaagcagtaactgctgaggaacttcgtgcgattgaacagcaagttaacgagaaaatttgggaagcacttgaagtgaagacagttgaaacggatattgacactgctaaagaaatgggagctatggccctctttggtgagaaatacggcaaggaagttcgtgtcgtgactatcggtgactactctattgaactttgtggtggtactcatgttgacaacacttctgagattggtctcttcaaaattgtcaaagaagaaggaatcggttcaggaactcgccgtatcttggcagtgactggtaaggaagcctttgaagcctatcgtgaacaagaggatgctcttaaagctatcgcagcaaccttgaaagcacctcaagtcaaggaagtacctcacaaggtagaaggacttcaagaacaacttcgtcaacttcaaaaagaaaatgctgagttgaaagaaaaagccgcagctgcagccgcaggcgatatcttcaaagatgttaaggaagtcaacggtcatcgttacattgctagtcaagtgtctgtatccgatgccggtgcccttcgtacttttgcagataactggaaacaaaaagactactctgatcttcttgtcctagttgccgctatcggtgacaaagtcaatgtccttgtagcaagcaagacaaaagaccttcatgcaggaaaccttgtcaaagaattagcaccaatcatcgatggacgtggtggtggtaaaccagatatggccatggcaggaggaagcaaccaacctaagatccaagaattgttggatgcagtagcaggtaaattg

SEQ ID NO: 2804 - protein, 872 aa, Streptococcus pneumoniae
  alanyl-tRNA synthetase (alaS); Cellular location: membrane; Similar to strain R6 sequence 15903283 (0.E+01)
MKQLSSAQVRQMWLDFWATKGHSVEPSVSLVPVNDPTLLWINSGVATLKKYFDGTIIPENPRITNAQKAIRTNDIENVGKTARHHTMFEMLGNFSIGDYFRDEAITWAYELLTSPEWFDFPAEKLYMTYYPDDKDSYNRWIEVGVDPSHLIPIEDNFWEIGAGPSGPDTEIFFDRGEAFDPENIGLRLLAEDIENDRYIEIWNIVLSQFNADPAVPRSEYKELPHKNIDTGAGLERLVAVIQGAKTNFETDLFMPIIREVEKLSGKVYDQDGDNMSFKVIADHIRSLSFAIGDGALPGNEGRGYVLRRLLRRASMHGQKLGINEPFLYKLVPTVGKIMESYYPEVLEKRDFIEKIVKSEEESFARTLHSGQHFAQGIVADLKEKGQSVIAGSDVFKLYDTYGFPVELTEEIAEEAGMTVDREGFEAAMKEQQERARASAVKGGSMGMQNETLQNITVESVFNYNASQLSSKLVAIVADNAEVGAVSEGTASLIFAETSFYAEMGGQVADYGQILDESGKVVATVTNVQKAPNGQALHTVEVLAPLALNQEYTLAIDSNRRHRVMKNHTATHLLHAALHNILGNHATQAGSLNEVEFLRFDFTHFQAVTAEELRAIEQQVNEKIWEALEVKTVETDIDTAKEMGAMALFGEKYGKEVRVVTIGDYSIELCGGTHVDNTSEIGLFKIVKEEGIGSGTRRILAVTGKEAFEAYREQEDALKAIAATLKAPQVKEVPHKVEGLQEQLRQLQKENAELKEKAAAAAAGDIFKDVKEVNGHRYIASQVSVSDAGALRTFADNWKQKDYSDLLVLVAAIGDKVNVLVASKTKDLHAGNLVKELAPIIDGRGGGKPDMAMAGGSNQPKIQELLDAVAGKL

SEQ ID NO: 2805 - DNA, 495 bp, Streptococcus pneumoniae
ttggaggtgttgatgaaaacatttcttgtcaaacaaaagtttcgtcttggaggcgaacgcttcgctatcaaggatgacaggggagaaattgcctatcaggtggagggatcattttttaagattcctaaaacctttaccatctatgatgcggctggtgaacaagtcagtgagattagtaaagaaatcttgaccttgcttcctcgttttgaaattcagcttcgggatggctcgagttttgtcattcgtaagaagttgaccttctggcgagataagtatgagtttgataatctaggtcttcgtatcgagggcaatatctgggatttgaatttcaaattgctggatgatcgcgatcagttgattgcggaaattaagaaggaactcttccatctgacttctacctataccgtaacggttcttgaagacgcttatgcagacctagtcatttccctctgtgtcgcgattgactatgtggaaatgctggaaagccaatcacat

SEQ ID NO: 2806 - protein, 165 aa, Streptococcus pneumoniae
  conserved hypothetical protein; Cellular location: membrane; Similar to strain R6 sequence 15903284 (4.E-91)
MEVLMKTFLVKQKFRLGGERFAIKDDRGEIAYQVEGSFFKIPKTFTIYDAAGEQVSEISKEILTLLPRFEIQLRDGSSFVIRKKLTFWRDKYEFDNLGLRIEGNIWDLNFKLLDDRDQLIAEIKKELFHLTSTYTVTVLEDAYADLVISLCVAIDYVEMLESQSH

SEQ ID NO: 2807 - DNA, 237 bp, Streptococcus pneumoniae
atgaaaatgtctacttttttcaaaaaaagtttctggccaacctttatgattgttaaccaaactgctatactattccatttaaaggatggcttggatcgacaatacctaacaactgagtccatatattgggtgataggcacctttatatttggaaatattctagtagctgtgtttagtaatatgaaaatttgggataaaaagaaaaatggcagtaagaaaaaatatatcctgaaaaag

SEQ ID NO: 2808 - protein, 79 aa, Streptococcus pneumoniae
  hypothetical protein; Cellular location: membrane; Similar to strain R6 sequence 15903285 (3.E-43)
MKMSTFFKKSFWPTFMIVNQTAILFHLKDGLDRQYLTTESIYWVIGTFIFGNILVAVFSNMKIWDKKKNGSKKKYILKK

SEQ ID NO: 2809 - DNA, 1068 bp, Streptococcus pneumoniae
atgaaaaaaatctattcatttttagcaggaattgcagcgattatccttgtcttgtggggaattgcgactcatttagatagtaaaatcaatagtcgagatagtcaaaaattggttatctataactggggagactatatcgatcctgaactcttgactcagtttacagaagaaacaggaattcaagttcagtacgagacttttgactccaacgaagccatgtacactaagataaagcagggtggaacgacctacgatattgccattccaagtgaatacatgattaacaagatgaaggacgaagacctcttggttccgcttgattattcaaaaattgaaggaatcgaaaatatcggaccagagtttctcaaccagtcctttgacccaggtaataaattctccatcccttacttctggggaaccttaggaattgtctacaacgaaaccatggtagatgaagcgcctgagcattgggatgacctttggaagccggagtataagaattctatcatgctctttgatggggcgcgtgaggtgctgggactaggactcaattccctcggctacagcctcaactccaaggatctgcagcagttggaagagacagtggataagctctacaaactgactccaaatatcaaggctatcgttgcggacgagatgaagggctatatgattcagaataatgttgcaatcggcgtgaccttctctggtgaagccagccaaatgttagaaaaaaatgaaaatctacgttatgtggtaccgacagaggccagcaatctttggtttgacaatatggtcattcccaaaacagttaaaaaccaaaactcagcctatgcctttatcaactttatgttgaaacctgaaaatgctctccaaaatgcggagtatgtcggctattcaacaccaaacctaccagcgaaggaattgctcccagaggaaacaaaggaagataaggccttctatcccgatgttgaaaccatgaaacacctagaagtttatgagaaatttgaccataaatggacagggaaatatagcgacctcttcctacagtttaaaatgtatcggaag

SEQ ID NO: 2810 - protein, 356 aa, Streptococcus pneumoniae
  spermidine/putrescine ABC transporter, spermidine/putrescine-binding pr; Cellular location: outside; Similar to strain R6 sequence 15903286 (0.E+01)
MKKIYSFLAGIAAIILVLWGIATHLDSKINSRDSQKLVIYNWGDYIDPELLTQFTEETGIQVQYETFDSNEAMYTKIKQGGTTYDIAIPSEYMINKMKDEDLLVPLDYSKIEGIENIGPEFLNQSFDPGNKFSIPYFWGTLGIVYNETMVDEAPEHWDDLWKPEYKNSIMLFDGAREVLGLGLNSLGYSLNSKDLQQLEETVDKLYKLTPNIKAIVADEMKGYMIQNNVAIGVTFSGEASQMLEKNENLRYVVPTEASNLWFDNMVIPKTVKNQNSAYAFINFMLKPENALQNAEYVGYSTPNLPAKELLPEETKEDKAFYPDVETMKHLEVYEKFDHKWTGKYSDLFLQFKMYRK

SEQ ID NO: 2811 - DNA, 771 bp, Streptococcus pneumoniae
atgaaaaaatttgccaacctttatctgggactggtctttctggtcctctacctgcctatcttttacttgattggctatgcctttaatgctggtgatgatatgaatagctttacaggttttagctggactcactttgaaaccatgtttggagatgggagactcatgctgattttggctcagacatttttcttggccttcctatcagccttgatagcgaccattatcgggacttttggtgccatttacatctaccagtctcgtaagaaataccaagaagcctttctatcactcaataatatcctcatggttgcgcctgacgttatgattggtgctagcttcttgattctctttacccaactcaagttttcacttggctttttgaccgttctatctagtcacgtggccttctccattcctatcgtggtcttgatggtcttgcctcgactcaaggaaatgaatggcgacatgattcatgcggcctatgacttgggagctagtcaatttcagatgttcaaggaaatcatgcttccttacctgactccgtctatcattactggttatttcatggccttcacctattcgttagatgactttgccgtgaccttctttgtaacaggaaatggcttttcaaccctatcagtcgagatttactctcgtgctcgcaaggggatttccttagaaatcaatgccctgtctgctctagtctttctctttagtattatcctagttgtaggttattactttatctctcgtgagaaggaggagcaagca

SEQ ID NO: 2812 - protein, 257 aa, Streptococcus pneumoniae
  spermidine/putrescine ABC transporter, permease protein (potC); Cellular location: membrane; Similar to strain R6 sequence 15903287 (e-143)
MKKFANLYLGLVFLVLYLPIFYLIGYAFNAGDDMNSFTGFSWTHFETMFGDGRLMLILAQTFFLAFLSALIATIIGTFGAIYIYQSRKKYQEAFLSLNNILMVAPDVMIGASFLILFTQLKFSLGFLTVLSSHVAFSIPIVVLMVLPRLKEMNGDMIHAAYDLGASQFQMFKEIMLPYLTPSIITGYFMAFTYSLDDFAVTFFVTGNGFSTLSVEIYSRARKGISLEINALSALVFLFSIILVVGYYFISREKEEQA

SEQ ID NO: 2813 - DNA, 825 bp, Streptococcus pneumoniae
atgcaatcgaggaggaaagagatgaagaaaacaagctctaaactctttgtagtaccctacatgctttggattgcgctctttgtattggcacccttggtcttgattttcggtcaatcctttttcaacatcgaaggccagttcagtttagaaaattacaaatcttactttgcgtcacaaaacttgacctatcttaaaatgagtttcaactcagtgctttatgcaggcattgtgacctttgtggcactgcttatcagttatccgacggccctctttttgacccgtctcaaacaccgtcaactctggctcatgctgattatccttcctacctggatcaatttgctccttaaagcctatgcttttatcgggatttttggtcaaaatggctctattaaccaattcttggaatttatcggaattggttcacaacagttgctttttaccgatttttcctttatctttgtcgcaagctacatcgagctcccctttatgattttgccgattttcaatgtcttagacgatatggataataatctcatcaatgctagttatgaccttggtgcaactaagtgggagaccttccgtcatgtcatcttccctctatctatgaacggtgtgcgaagtggggttcagtcggtctttatcccaagtttgagtctcttcatgctgacccgtttgattggtgggaaccgcgttatcaccttggggacggctattgagcagaattttctaaccaatgacaactatggtatgggttcaaccatcggtgtgattctcatcctgaccatgttcatcaccatgtgggtgactaaggaaaggagagaacga

SEQ ID NO: 2814 - protein, 275 aa, Streptococcus pneumoniae
  spermidine/putrescine ABC transporter, permease protein (potH); Cellular location: membrane; Similar to strain R6 sequence 15903288 (e-155)
MQSRRKEMKKTSSKLFVVPYMLWIALFVLAPLVLIFGQSFFNIEGQFSLENYKSYFASQNLTYLKMSFNSVLYAGIVTFVALLISYPTALFLTRLKHRQLWLMLIILPTWINLLLKAYAFIGIFGQNGSINQFLEFIGIGSQQLLFTDFSFIFVASYIELPFMILPIFNVLDDMDNNLINASYDLGATKWETFRHVIFPLSMNGVRSGVQSVFIPSLSLFMLTRLIGGNRVITLGTAIEQNFLTNDNYGMGSTIGVILILTMFITMWVTKERRER

SEQ ID NO: 2815 - DNA, 1155 bp, Streptococcus pneumoniae
ttgaaaaagccaattatcgaattcaaaaacgtctctaaagtttttgaagacagcaacaccaaggttctcaaagacatcaactttgagttggaagaagggaaattctacacccttctaggtgcatctggttcggggaaatcaactatcctaaacattattgcaggtttactggatgcgacgacaggagatatcatgctagacggtgttcgtatcaatgatattccaaccaacaagcgcgacgtacataccgtcttccaatcctatgccttgttcccacatatgaatgtgtttgaaaatgttgcctttccacttcgcttgcgtaaaattgataagaaagaaatcgagcagcgtgtagcggaagttctcaagatggttcagttggaaggttatgaaaaacgttccatccgcaaactttctggaggacaacgtcagcgtgtggccatcgcccgtgctatcatcaaccaaccccgtgtggtcttgttggacgagcctttatcagcgctggacttgaaattgagaacagacatgcagtacgaattgcgtgaattacaacaacgattgggcattacctttgtctttgtcactcacgatcaggaagaagctcttgccatgagtgactggattttcgttatgaatgatggcgagattgtccagtctggaacccctgtggacatctacgatgagccaatcaaccactttgttgccacctttatcggggagtcaaacatcttgccaggtaccatgattgaggactacttggtcgaatttaacggcaaacgctttgaagcggttgatggtgggatgaagccaaatgaacctgttgaggtcgttattcgtccagaggacttgcgcattacccttcctgaagaaggcaagctccaagttaaggtcgatacccagcttttccgtggagttcattatgaaattatcgcctatgacgaacttggaaatgaatggatgatccactcaacccgtaaggctatcgtgggtgaggaaatcggtctggactttgaaccagaagacatccacatcatgcgtctcaatgaaaccgaagaagagttcgatgctcgtattgaggagtacgtagaaatcgaagagcaagaagcaggtttgatcaatgcaatcgaggaggaaagagatgaagaaaacaagctc

SEQ ID NO: 2816 - protein, 385 aa, Streptococcus pneumoniae
  spermidine/putrescine ABC transporter, ATP-binding protein (potA); Cellular location: cytoplasm; Similar to strain R6 sequence 15903289 (0.E+01)
MKKPIIEFKNVSKVFEDSNTKVLKDINFELEEGKFYTLLGASGSGKSTILNIIAGLLDATTGDIMLDGVRINDIPTNKRDVHTVFQSYALFPHMNVFENVAFPLRLRKIDKKEIEQRVAEVLKMVQLEGYEKRSIRKLSGGQRQRVAIARAIINQPRVVLLDEPLSALDLKLRTDMQYELRELQQRLGITFVFVTHDQEEALAMSDWIFVMNDGEIVQSGTPVDIYDEPINHFVATFIGESNILPGTMIEDYLVEFNGKRFEAVDGGMKPNEPVEVVIRPEDLRITLPEEGKLQVKVDTQLFRGVHYEIIAYDELGNEWMIHSTRKAIVGEEIGLDFEPEDIHIMRLNETEEEFDARIEEYVEIEEQEAGLINAIEEERDEENKL

SEQ ID NO: 2817 - DNA, 948 bp, Streptococcus pneumoniae
atgtctgtaagagaaaaaatgcttgaaatcttagaaggaattgatatccgttttaaggaacccttgcatagctatagttatacaaaagtaggtggagaggctgattatttggtctttccacgaaatcgttttgagttggctcgcgttgtgaaatttgccaaccaagaaaatatcccttggatggttcttggcaatgcaagcaatatcatcgttcgtgatggtgggattcgtggatttgtcatcttgtgtgacaagctcaataacgtttctgttgatggctataccattgaagcagaagctggggctaacttgattgaaacaactcgcattgccctccgtcatagtttaactggctttgagtttgcttgtggtattccaggaagcgttggcggtgctgtctttatgaatgcgggtgcctatggtggcgagattgctcacatcttgcagtcttgtaaggtcttgaccaaggatggagaaatcgaaaccctgtctgctaaagacttggcttttggttaccgtcattcagctattcaggagtctggtgcagttgtcttgtcagttaaatttgccctagctccaggaacccatcaggttatcaagcaggaaatggaccgcttgacgcacctacgtgaactcaagcaacctttggaatacccatcttgtggctcggtctttaagcgtccagtcgggcattttgcaggtcagttaatttcagaagctggcttgaaaggctatcgtatcggtggcgtagaagtgtcagaaaagcatgcaggatttatgatcaatgtcgcagatggaacggccaaagactacgaggacttgatccaatcggttatcgaaaaagtcaaggaacactcaggtattacgcttgaaagagaagtccggatcttgggtgaaagcctatcggtagcgaagatgtatgcaggtggttttactccctgcaagagg

SEQ ID NO: 2818 - protein, 316 aa, Streptococcus pneumoniae
  UDP-N-acetylenolpyruvoylglucosamine reductase (murB); Cellular location: cytoplasm; Similar to strain R6 sequence 15903290 (0.E+01)
MSVREKMLEILEGIDIRFKEPLHSYSYTKVGGEADYLVFPRNRFELARVVKFANQENIPWMVLGNASNIIVRDGGIRGFVILCDKLNNVSVDGYTIEAEAGANLIETTRIALRHSLTGFEFACGIPGSVGGAVFMNAGAYGGEIAHILQSCKVLTKDGEIETLSAKDLAFGYRHSAIQESGAVVLSVKFALAPGTHQVIKQEMDRLTHLRELKQPLEYPSCGSVFKRPVGHFAGQLISEAGLKGYRIGGVEVSEKHAGFMINVADGTAKDYEDLIQSVIEKVKEHSGITLEREVRILGESLSVAKMYAGGFTPCKR

SEQ ID NO: 2819 - DNA, 750 bp, Streptococcus pneumoniae
atgaccattcatatcattattaccatgttgctgttgctagcttttctgataggaagcatttggtttgccaaaaagaaataccagattaatctagctgtcttgggcttgggtgcagtcgctttctttgtctcttcgcagattttggaaaaactggtgcatatcttgattttgcaccctcaaaaagacggtagtattgccctcttgcaagatcatccgcttatctatattatctatggcctagccatggcagcattttttgaggaaacggctcgtcttgttttcttcaaatggttggagaaaaagagaagtttggaaaaggcagacgccttggcctatggactggggcatggtggcttggagttgatttttctaggccttactagtttactcaatctttacattgttctttcggcagttcaaactcagaatccacaggttatgcaattactgtctgaaaatatgttaaaaaccattcagtcactttcggtctggcagatttatttgcttggttttgagcgaatcttggcgcttggtttccaattacttttgacagtttgggtttaccaagctgttcgccagaagaaatggatttatctcctagcagcctatggcttgcatgccttctttgatctggcaccatctcttttccaagtaggctggttgacaaatccagtcttggttgaagtgattctagcactggagctcgttctggtcgcctatggaaccaaggaaatcttttgtaaaaaatca

SEQ ID NO: 2820 - protein, 250 aa, Streptococcus pneumoniae
  conserved hypothetical protein; Cellular location: membrane; Similar to strain R6 sequence 15903291 (e-138)
MTIHIIITMLLLLAFLIGSIWFAKKKYQINLAVLGLGAVAFFVSSQILEKLVHILILHPQKDGSIALLQDHPLIYIIYGLAMAAFFEETARLVFFKWLEKKRSLEKADALAYGLGHGGLELIFLGLTSLLNLYIVLSAVQTQNPQVMQLLSENMLKTIQSLSVWQIYLLGFERILALGFQLLLTVWVYQAVRQKKWIYLLAAYGLHAFFDLAPSLFQVGWLTNPVLVEVILALELVLVAYGTKEIFCKKS

SEQ ID NO: 2821 - DNA, 729 bp, Streptococcus pneumoniae
atggataagaacgtgcaggaaccagtgaaattatttcaatacaatactcttggagccttgatggctggcctttatggtggtactatgacagtaggagaattgctagaacatggtgaccttggtttgggaaccttggattccattgatggggaattgattgtcttggatggcaaggcttatcaggccaaagggtcaggagaccagccagaaattgtggaagtgtcaccagatgcccttattccttacgctgcagtggtaccgcatcgggcagaggtcattttccgccagcgctttgagatgacagacaaggaattgaaagaacgaattgagtcttattatgatggggaaaatcttttccgctctatcaagattcggggggaatttttacatatgcatgtgcgtatgattcctaagtcaacacccgataccaagtttgctgatgtcgcaacccatcaaccggaatatagtcgtgacaatgttgcggggactattgttggtttctggacgcctgagattttccatggggtcagtgtggcaggctaccatctgcacttcatatcagatgatttgaccttcggtggacatgtcatggattttgtcatcaaggaaggcattatcgaggtgggagcagttgaccagttggaccaacgtttcccagtccaagaccgtcaatacttgtttgctaagttcaatgttgacgagatgaaaaaagatattgaaaaggcagaa

SEQ ID NO: 2822 - protein, 243 aa, Streptococcus pneumoniae
  alpha-acetolactate decarboxylase (aldB); Similar to strain R6 sequence 15903292 (e-140)
MDKNVQEPVKLFQYNTLGALMAGLYGGTMTVGELLEHGDLGLGTLDSIDGELIVLDGKAYQAKGSGDQPEIVEVSPDALIPYAAVVPHRAEVIFRQRFEMTDKELKERIESYYDGENLFRSIKIRGEFLHMHVRMIPKSTPDTKFADVATHQPEYSRDNVAGTIVGFWTPEIFHGVSVAGYHLHFISDDLTFGGHVMDFVIKEGIIEVGAVDQLDQRFPVQDRQYLFAKFNVDEMKKDIEKAE

SEQ ID NO: 2823 - DNA, 168 bp, Streptococcus pneumoniae
ttgcccctagatgtgaacgagagaaacgctctagacattgccaagaaggaaaaaaaagggtacaatgtaacaaaatcaagggaggtctggaatgaagaaacaaagcaagtacaaagaggtcgtttcctatctgaaaaatggtatcgagtctggacgatttccgacggg

SEQ ID NO: 2824 - protein, 56 aa, Streptococcus pneumoniae
  conserved domain protein
MPLDVNERNALDIAKKEKKGYNVTKSREVWNEETKQVQRGRFLSEKWYRVWTISDG

SEQ ID NO: 2825 - DNA, 1269 bp, Streptococcus pneumoniae
atgaagaaacaaagcaagtacaaagaggtcgtttcctatctgaaaaatggtatcgagtctggacgatttccgacgggtagtcgcctgccttctatccgtcaactgagccttgactttcactgcagcaaggacaccattcaacgagccctgctggaattacggcacgaacaatacctctatgccaagcctcagagtggctactatgtattagaacaagggcaacatcaagacctagaaatcgaggttaccgacgaacatgccagtgcctatgacgatttccgactctgtgtcaatgaaaccttgattggccgagaaaactacctcttcaactactatgacaatcaagaaggattagaagacctaagacagtccattcacaaactcctctttgagcaagctctctactgcaaggctaaccaactagtactgacttctggaacccaacaagccttgtttatcctctctcaaatatcctttcctagacaagccaaggaaatcttggtggaacagccaacctaccatcggatgaatcgcctcttgattgcacaggggctggactatcaaacgattgaacgaggcattgatgggattgacttggaggagctggaaggccacttcaaaacaggaaaaattaagtttttctacaccattccccgatttcactatcccctgggacattcctattctgagcaagacaaacgatctattcttaacttagctgccaagtatgatgtctatatcgtagaggacgattatctgggtgatttggactccaagaagggccaaaccttccactatcttgatacagaggagcgtgtcatttatatcaagtccttctcgaccagcctttttcctgcccttcgtattacagcactcattcttccaaatgctatcaaagaagcatttgtggcctacaaaaatatcctagactacgacagcaacctcattatgcaaaaggccctgtcactctatattgacagtcaattgtttgaaaaaaatcgtttggctcgcttgaccaatcatgaatcttaccaaaaacaaatcgaggaaaggataactaaaacaccttgtccccttcctcattattccctacacgatggtttattgctagacctgagacagtatcctaaaatcgccagtctcaaacacagtcaactgggcttggacttctttgaagaggcctatttaagcacctgtccttatcaatttgccaaggtgtccctagacaatctggaaaatgttttaaactatttaaaagcagaattggaa

SEQ ID NO: 2826 - protein, 423 aa, Streptococcus pneumoniae
  conserved hypothetical protein; Cellular location: cytoplasm; Similar to strain R6 sequence 15903293 (0.E+01)
MKKQSKYKEVVSYLKNGIESGRFPTGSRLPSIRQLSLDFHCSKDTIQRALLELRHEQYLYAKPQSGYYVLEQGQHQDLEIEVTDEHASAYDDFRLCVNETLIGRENYLFNYYDNQEGLEDLRQSIHKLLFEQALYCKANQLVLTSGTQQALFILSQISFPRQAKEILVEQPTYHRMNRLLIAQGLDYQTIERGIDGIDLEELEGHFKTGKIKFFYTIPRFHYPLGHSYSEQDKRSILNLAAKYDVYIVEDDYLGDLDSKKGQTFHYLDTEERVIYIKSFSTSLFPALRITALILPNAIKEAFVAYKNILDYDSNLIMQKALSLYIDSQLFEKNRLARLTNHESYQKQIEERITKTPCPLPHYSLHDGLLLDLRQYPKIASLKHSQLGLDFFEEAYLSTCPYQFAKVSLDNLENVLNYLKAELE

SEQ ID NO: 2827 - DNA, 813 bp, Streptococcus pneumoniae
atgaaatcaaaaaaatggatatttgttttatgtaattttcttgcaagtttcttcttagtagcttgtcagtcaggttctaatggttctcagtctgctgtggatgctatcaaacaaaaagggaaattagttgtggcaaccagtcctgactatgcaccctttgaatttcaatcattggttgatggaaagaaccaggtagtcggtgcagacatcgacatggctcaggctatcgctgatgaacttggggttaagttggaaatctcaagcatgagttttgacaatgttttgaccagtcttcaaactggtaaggctgacctagcagttgcaggaattagtgctactgacgagagaaaagaagtctttgatttttcaatcccatactatgaaaacaagattagtttcttggttcgtaaggctgatgtggaaaaatacaaggatttaactagcctagaaagtgctaatattgcagcccaaaaagggactgttccagaatcaatggtcaaggaacaattgccaaaagttcaattaacttccctaactaatatgggtgaagcagtcaatgaattgcaggctggaaaaatagatgctgttcatatggatgagcctgttgcacttagttatgctgctaaaaacgctggcttagctgtcgcaactgtcagcttgaagatgaaggacggcgacgccaatgccgttgctcttagaaaaaatagtgatgatttgaaagaagtggtagacaaggtcgtccaaaaacttaaggatgaaggaacttaccaaagctatcttgaaaaagcagcaagtctaactgaagttgaagaa

SEQ ID NO: 2828 - protein, 271 aa, Streptococcus pneumoniae
  amino acid ABC transporter, amino acid-binding protein; Cellular location: lipoprotein; Similar to strain R6 sequence 15903294 (e-147)
MKSKKWIFVLCNFLASFFLVACQSGSNGSQSAVDAIKQKGKLVVATSPDYAPFEFQSLVDGKNQVVGADIDMAQAIADELGVKLEISSMSFDNVLTSLQTGKADLAVAGISATDERKEVFDFSIPYYENKISFLVRKADVEKYKDLTSLESANIAAQKGTVPESMVKEQLPKVQLTSLTNMGEAVNELQAGKIDAVHMDEPVALSYAAKNAGLAVATVSLKMKDGDANAVALRKNSDDLKEVVDKVVQKLKDEGTYQSYLEKAASLTEVEE

SEQ ID NO: 2829 - DNA, 651 bp, Streptococcus pneumoniae
atgttacgatctcaatttgaagaagatttagagaaattacataaccagttctacgctatgggacaagaagtgctctcacaaatcaatcgtacggtacgtgcttttgtcacgcatgaccgtgacctggcaaaagaggtcatcgaagatgatgcagaagtaaatgaatacgaagtgaaactggaaaagaaatcatttgaaatgatcgcactccaacaaccagtctctcaagatttgcgtacagtcttgactgtccttaaggctgtatcagatgtggagcgtatgggggatcacgctgtagccattgcccaggcaaccatccgtatgaagggggaagagcgcattccagctgtagaggaagaaattaaaaaaatgggacgtgaagttaaaagcgttgtggaagcagcacttgatctttatcttaatggttctgttgacgacgcataccgggtggcctccatggatgagcaaattaaccactattttgaaactatccgtgaccttgcgactgaagagattaagaaaaatccagaagccattgttacgggtcgtgattatttccaagttatttcctacttggagcgtatcggtgactatgctaaaaatatctgtgaatgggttgtctactttgaaacaggtaagattgtcgaacta

SEQ ID NO: 2830 - protein, 217 aa, Streptococcus pneumoniae
  phosphate transport system regulatory protein PhoU, putative; Cellular location: cytoplasm; Similar to strain R6 sequence 15903295 (e-120)
MLRSQFEEDLEKLHNQFYAMGQEVLSQINRTVRAFVTHDRDLAKEVIEDDAEVNEYEVKLEKKSFEMIALQQPVSQDLRTVLTVLKAVSDVERMGDHAVAIAQATIRMKGEERIPAVEEEIKKMGREVKSVVEAALDLYLNGSVDDAYRVASMDEQINHYFETIRDLATEEIKKNPEAIVTGRDYFQVISYLERIGDYAKNICEWVVYFETGKIVEL

SEQ ID NO: 2831 - DNA, 756 bp, Streptococcus pneumoniae
atgacagatgcgattttacaggtatcagacctgtccgtttattataataaaaagaaggctttgaatagtgtttccctatctttccaacctaaggaaattacagccttgattggtccatctggatcagggaagtcaaccctcctcaagtctctcaaccgcatgggagatctcaatccagaggtgaccacaactggatccgtggtgtacaatggtcacaacatctacagtccgcgtacagatacggttgaattacgtaaggaaatcggaatggttttccaacaacctaatcctttccctatgactatctatgagaatgttgtctacgggcttcgtatcaatggaattaaggataagcaggttctggatgaagccgtagaaaaagccttgcaaggtgcctctatctgggatgaggtcaaggatcgtctatatgattcagctattggattgtcaggtggtcaacagcagcgtgtctgcgtggcccgtgtcttggcaactagtcctaaaatcatcctcttggatgagccaacttcggctttggatccgatttcagctggtaaaattgaggaaaccttgtatggtctaaaagacaagtacaccatgcttctggtaacccgttccatgcagcaagcttcacgtatctctgataagacaggatttttcctagatggagatttgattgaatttaatgataccaagcagatgttccttgatccccaacacaaggaaacggaagactatattacaggaaaatttgga

SEQ ID NO: 2832 - protein, 252 aa, Streptococcus pneumoniae
  phosphate ABC transporter, ATP-binding protein, putative; Cellular location: cytoplasm; Similar to strain R6 sequence 15903296 (e-142)
MTDAILQVSDLSVYYNKKKALNSVSLSFQPKEITALIGPSGSGKSTLLKSLNRMGDLNPEVTTTGSVVYNGHNIYSPRTDTVELRKEIGMVFQQPNPFPMTIYENVVYGLRINGIKDKQVLDEAVEKALQGASIWDEVKDRLYDSAIGLSGGQQQRVCVARVLATSPKIILLDEPTSALDPISAGKIEETLYGLKDKYTMLLVTRSMQQASRISDKTGFFLDGDLIEFNDTKQMFLDPQHKETEDYITGKFG

SEQ ID NO: 2833 - DNA, 801 bp, Streptococcus pneumoniae
atgtcaacatataactgggatgagaagcatatccttacctttcctgaagaaaaagtagccctttctactaaggatgtccatgtttactatggtaaaaatgaatccattaaggggattgatatgcaatttgaaagaaataaaattacagctttgattggcccgtcgggatcggggaaatctacctacttacgcagtctcaatcgcatgaatgatactattgatattgctaaagtaactgggcagattctctatcgtggaattgatgtcaaccgtccagaaatcaacgtttatgaaatgcgtaaacacattggaatggtttttcaacgtcccaatccatttgctaagtcaatttaccgtaatattacctttgcgcatgaacgtgctggagttaaggataagcaagtcctagatgaaatcgtagaaacctcccttcgtcaggctgccctctgggatcaggttaaagacgatctccacaagtcagccttgaccttatcaggtggtcagcaacaacgtctctgtatcgctcgtgccatctctgttaagccagatatcctcttaatggatgagccagcctcagccttggatccgattgcgaccatgcaactagaagagaccatgtttgagctcaagaaaaactttaccatcatcattgtaacgcataatatgcagcaggctgctcgtgcaagtgactatacaggcttcttttacttgggtgatttgattgagtatgacaagactgcaactattttccaaaatgccaagctacagtccaccaatgactatgtatctggtcactttggt

SEQ ID NO: 2834 - protein, 267 aa, Streptococcus pneumoniae
  phosphate ABC transporter, ATP-binding protein, putative; Cellular location: cytoplasm; Similar to strain R6 sequence 15903297 (e-153)
MSTYNWDEKHILTFPEEKVALSTKDVHVYYGKNESIKGIDMQFERNKITALIGPSGSGKSTYLRSLNRMNDTIDIAKVTGQILYRGIDVNRPEINVYEMRKHIGMVFQRPNPFAKSIYRNITFAHERAGVKDKQVLDEIVETSLRQAALWDQVKDDLHKSALTLSGGQQQRLCIARAISVKPDILLMDEPASALDPIATMQLEETMFELKKNFTIIIVTHNMQQAARASDYTGFFYLGDLIEYDKTATIFQNAKLQSTNDYVSGHFG

SEQ ID NO: 2835 - DNA, 882 bp, Streptococcus pneumoniae
atgcgcgctaagaaattagataaacttgcaacagctgtcctctatacgattgctagcatcattgtgacaatcttggcttccttgattctctatatcttggttcggggcttgccccatatctcttggtctttcttgactggaaggtcttctgcttttcaagcaggtggtgggattggcattcagctttacaattcctttttcctattggtcattaccttgattatttctgtacctctttctatgggagctgggatttacttggctgaatatgctaaaaaaggtcctgttaccaactttgtgcggacttgtattgaaattttgtcctctttaccatcagtggtggtgggtctctttggttacttgatctttgtagtccagtttgagtatggattttcaatcatttcaggtgccttggccttgacagtctttaacttgcctcagatgacgcgtaatgtagaggatagtttgaaacacgttcaccatacccaacgtgaggctggtctggctcttgggatttctcgctgggagacagtggttcatgttgttattccggaagcgcttccaggtattgtaacgggtgtcgtcttggcatctggtcgtatctttggcgaagctgcagctctgatctatacagcagggcaatcggcgccagctcttgactggtctaactggaatatcctcagtgtgactagccccatctctatcttccgtcaagcagaaaccttggctgtccatatctggaaagtcaatagtgaaggcactattccagatggaaccattgtatcagcaggttctgccgctgtgctcctgatctttatcctgatttttaactttggagctcgtaagttcggaagctatctacacaagaaattaaccgctgcc

SEQ ID NO: 2836 - protein, 294 aa, Streptococcus pneumoniae
  phosphate ABC transporter, permease protein, putative; Cellular location: membrane; Similar to strain R6 sequence 15903298 (e-164)
MRAKKLDKLATAVLYTIASIIVTILASLILYILVRGLPHISWSFLTGRSSAFQAGGGIGIQLYNSFFLLVITLIISVPLSMGAGIYLAEYAKKGPVTNFVRTCIEILSSLPSVVVGLFGYLIFVVQFEYGFSIISGALALTVFNLPQMTRNVEDSLKHVHHTQREAGLALGISRWETVVHVVIPEALPGIVTGVVLASGRIFGEAAALIYTAGQSAPALDWSNWNILSVTSPISIFRQAETLAVHIWKVNSEGTIPDGTIVSAGSAAVLLIFILIFNFGARKFGSYLHKKLTAA

SEQ ID NO: 2837 - DNA, 915 bp, Streptococcus pneumoniae
atgaatcaagaagaattagctaagaaaatgttgcttccatcaaagaattctcgtctggagaaattaggaaaaggtttgacctttgcctgtctttctttgatagtcatccttgtggccatgattttggttttcgtagcgcaaaaaggcttgtcgaccttctttgtcaatggtgtgaatatctttgactttcttttgggaggaacttggaatccttctagtaaagaatttggtgcccttcctatgattttgggttcctttatcgttaccattctctcagcccttatcgcaacaccctttgctattggtgcagcagtttttatgaccgaagtatcaccaaaaggggcgaagattttgcaaccagctattgaactcctggttgggattccttcagtagtgtacggatttattggcttgcaagtcgtcgttccctttgttcgcagtgtctttggtgggactggttttgggattttgtcagggatttccgtcctctttgtcatgattttgccgaccgtaacctttatgacaacggatagcttgcgtgcggttcctcgttattatcgtgaagccagtttcgctatgggagccactcgctggcagactatctggcgtgtgatcttgaaggcggcccgttctggtattttcactgcagtggtctttgggatggcgcgtgcctttggtgaggctctagctatccagatggttgtcggaaactcagctgttatcccaacttccttgaccacaccagctgcaactttaacttctatattaactatgggaattgggaacactgtcatgggaactgtaaataataatgttctctggtcactggccttggtactgctcttgatgagcttagtttttaacagtgtgattaaattgattacgaaagaaagaggaaagaaaaattatgcgcgc

SEQ ID NO: 2838 - protein, 305 aa, Streptococcus pneumoniae
  phosphate ABC transporter, permease protein, putative; Cellular location: membrane; Similar to strain R6 sequence 15903299 (e-168)
MNQEELAKKMLLPSKNSRLEKLGKGLTFACLSLIVILVAMILVFVAQKGLSTFFVNGVNIFDFLLGGTWNPSSKEFGALPMILGSFIVTILSALIATPFAIGAAVFMTEVSPKGAKILQPAIELLVGIPSVVYGFIGLQVVVPFVRSVFGGTGFGILSGISVLFVMILPTVTFMTTDSLRAVPRYYREASFAMGATRWQTIWRVILKAARSGIFTAVVFGMARAFGEALAIQMVVGNSAVIPTSLTTPAATLTSILTMGIGNTVMGTVNNNVLWSLALVLLLMSLVFNSVIKLITKERGKKNYAR

SEQ ID NO: 2839 - DNA, 876 bp, Streptococcus pneumoniae
gtgaaaaaaagaaaaaagcttgctctgtctcttatcgctttttggctgacggcttgtttagtaggctgtgctagctggattgatcgtggagaatccataacggctgttggctcaactgccttgcaacccttggttgaagtagcggcagatgaatttggcacgatccatgttggaaaaacggtcaatgtccaagggggaggttctggtacaggcttgtcccaggttcagtctggggcagttgatataggaaactcagatgtatttgctgaggaaaaagacggaattgatgcttctgctcttgttgaccacaaggtcgcggtagctggcttggctctgattgtcaataaggaggttgatgttgataacctaacgacagagcaacttcgtcaaatcttcataggtgaggtaaccaattggaaagaggttggtggtaaggacttacccatctctgttatcaatcgggcagccggctctggctctcgtgctacctttgatactgtcattatggaaggtcagtctgccatgcaaagtcaggagcaggattcaaatggagcggtaaaatcaatcgtatcaaaaagtccaggagctatctcttatttatctcttacctatatagatgattcggtcaaaagcatgaagttgaatggctatgacttaagtccagaaaatataagtagcaataattggcccttgtggtcttatgagcatatgtatacattggggcagcccaatgagttggctgcagaatttctcaattttgttctctcggatgagacccaagaagggattgtcaaaggattgaagtatattccgattaaggaaatgaaggttgaaaaagatgctgccggaactgtgacagtgttggaagggagacaa

SEQ ID NO: 2840 - protein, 292 aa, Streptococcus pneumoniae [sequence omitted]

SEQ ID NO: 2841 - DNA, 189 bp, Streptococcus pneumoniae
gtggataaaatctcttgtctatcccttcccccattgtcacccattatagtcatttcgtgtctctttttcccctttttaatgcaagggaaattactctccttagatgataatccaaaagctagaaaggtatctcaaacctctctactctcccagactagtttacaactaaaaggaaaagattctatttta

SEQ ID NO: 2842 - protein, 63 aa, Streptococcus pneumoniae
  hypothetical protein; Cellular location: membrane
MDKISCLSLPPLSPIIVISCLFFPFLMQGKLLSLDDNPKARKVSQTSLLSQTSLQLKGKDSIL

SEQ ID NO: 2843 - DNA, 93 bp, Streptococcus pneumoniae
atgaaaatcaaagagcaaactaggaagctagccatagatagctcaaaacactggtttgaagagattttcaaagagtacaagaagtttagttat

SEQ ID NO: 2844 - protein, 31 aa, Streptococcus pneumoniae
  box element
MKIKEQTRKLAIDSSKHWFEEIFKEYKKFSY

SEQ ID NO: 2845 - DNA, 1302 bp, Streptococcus pneumoniae
atgcaatttccagaaggatttgttgaaaaatataaagagatactaggagatgaggcaagagattttcttgcctcttttgaggaggaagcggtttcggcctttcgggtcaatcccttaaaagaagagcaactttccttttctgatgccattactcaaaccccttggggccactatgggaaggtttcagggaaatcgcctgagcatgctacaggtttagtttattcgcaagaacctgctgctcaaatggtggctcaagtagcccaacccagtcctggtatgaaggtcttggacttggctgctgcaccggggggcaaatcaactcaactggcagcctatctagcaggggaggggctacttgtttccaatgaaatttcaagcaaacgggctaagattttggttgaaaacatggagcgttttggagcgacaaatgtcgtggtgaccaatgaatctgccgaccgcttggtcaaggtctttaaaggctattttgacttaatcgttcttgatgccccttgctctggtgaaggaatgtttcgtaagcaacctgatgctatggactattggagcttagattatccgagtcaatgtgctagcttgcaaagagaaattctggaggatgcagtgaccatgttagctgaaggtggtcatctggtttattcgacctgtacctgggcacccgaggaaaacgaagagattgtcaattggttgctggaagagtatgattttgacttgttgccagtagagcatatcaatggaatggtagctggtattgacctgccagaaacggctcggatgtatcctcatcagtttaagggagagggtcagtttgttgcccatctacagtttaagggtaacaatccagctcctaaatttaaggcaagtaagagtaacctcagccgtgaacaagttgccttgtggcaggaatttgcccaaaaccatttgaaggtcaatctaccgggtatcttgcagatttttggagaccagctttatctcttgccagaacttttgccagatttatggaagctcaagattgctcgcaatggactgcatctgggtacttttaagaagaaacgctttgagcccagtttcgctcttggtttagccttgaaaccgagtcaggtcgaacagtcggttgaaattggccaagaagcgtttgtcaagtatgcggctggagaaaccgttcagctggcagaaagtctgccaaatggttggtaccaagttttggttaaaggcaatggcttgggctttgcaaaggttactggaaatgttttgaaaaattattttccaaaaggcctcagattcaaa

SEQ ID NO: 2846 - protein, 434 aa, Streptococcus pneumoniae
  NOL1/NOP2/sun family protein; Cellular location: cytoplasm; Similar to strain R6 sequence 15903302 (e-153)
MQFPEGFVEKYKEILGDEARDFLASFEEEAVSAFRVNPLKEEQLSFSDAITQTPWGHYGKVSGKSPEHATGLVYSQEPAAQMVAQVAQPSPGMKVLDLAAAPGGKSTQLAAYLAGEGLLVSNEISSKRAKILVENMERFGATNVVVTNESADRLVKVFKGYFDLIVLDAPCSGEGMFRKQPDAMDYWSLDYPSQCASLQREILEDAVTMLAEGGHLVYSTCTWAPEENEEIVNWLLEEYDFDLLPVEHINGMVAGIDLPETARMYPHQFKGEGQFVAHLQFKGNNPAPKFKASKSNLSREQVALWQEFAQNHLKVNLPGILQIFGDQLYLLPELLPDLWKLKIARNGLHLGTFKKKRFEPSFALGLALKPSQVEQSVEIGQEAFVKYAAGETVQLAESLPNGWYQVLVKGNGLGFAKVTGNVLKNYFPKGLRFK

SEQ ID NO: 2847 - DNA, 771 bp, Streptococcus pneumoniae
ttggaaagtaaatttgaatttgctaaagagcttgttaagaaagcaggtcagtacattcttgaccatatgcaggaagacttgcgtgttgaaaccaagtcctctccaacagatttggtgaccagactggacaaagaagttcaggaactcttggttggtgagattttgtcccgttatcctgaggataagatttgtgctgaagaaggttgtctgcgagcctcggttcaagagggcaaggtttgggtcattgatcccattgatggtaccaataattttgtagcccagcaggaagattttgctgttatgatggcttattttgaaaatggtcagggacagtttggtctgatttatgatgtggtcaaaggggattgttaccacggtggtggggaatttccagtttgtctaaatgataggtccctagctccttttaaaactaaaccacttggagattttctcattgcagggaatagtggtatgctggaaaccaatgaatgggggctggctgatttgagccgagcggttcttggtgttcgtgtctatggaagtgcggccattagttttgccaagattttgtcagggcgtttgttgacctatctcacttatctgcaaccatgggattatgccgcagctagtattttaggggaaagtctgggctatcgggttgtgaccctttttggtgaagctcctgattttcaaaccagacagccggtcatgatggtgcctcttgagatgcaggaggaaattcagtcctatatttacgaaaggaaaagaact

SEQ ID NO: 2848 - protein, 257 aa, Streptococcus pneumoniae
  inositol monophosphatase family protein; Cellular location: cytoplasm; Similar to strain R6 sequence 15903303 (e-146)
MESKFEFAKELVKKAGQYILDHMQEDLRVETKSSPTDLVTRLDKEVQELLVGEILSRYPEDKICAEEGCLRASVQEGKVWVIDPIDGTNNFVAQQEDFAVMMAYFENGQGQFGLIYDVVKGDCYHGGGEFPVCLNDRSLAPFKTKPLGDFLIAGNSGMLETNEWGLADLSRAVLGVRVYGSAAISFAKILSGRLLTYLTYLQPWDYAAASILGESLGYRVVTLFGEAPDFQTRQPVMMVPLEMQEEIQSYIYERKRT

SEQ ID NO: 2849 - DNA, 276 bp, Streptococcus pneumoniae
atgaacaaacagtatagttacccactagatttgtcgtggagcactgaagaacttgcttcagtgctttctttttttaatgatgttgaagctgcctatgaaggcaaagtagaggctaaaaagttactggactcctataagggattcaaagcggtcgtgccaagcaagagcgaagagaaacgtttgggacgagaatttgaaacggttagtggctattcactttaccgagcagttcaggctgccaaagaaaaaggggaaggaaagatttctcttggaaag

SEQ ID NO: 2850 - protein, 92 aa, Streptococcus pneumoniae
  conserved hypothetical protein; Cellular location: cytoplasm; Similar to strain R6 sequence 15903304 (3.E-48)
MNKQYSYPLDLSWSTEELASVLSFFNDVEAAYEGKVEAKKLLDSYKGFKAVVPSKSEEKRLGREFETVSGYSLYRAVQAAKEKGEGKISLGK

SEQ ID NO: 2851 - DNA, 399 bp, Streptococcus pneumoniae
atgattacactatttctatcaccgagctgtacatcatgtcgtaaggctaaggcctggttagaaaaacataaggttccctttgtggaacacaatattatgaccagtcctttaacaagaaaagaattgcaacacatcctttccttgaccgaaaatggtactgatgacatcatttcaactcgttcaaaaatttttcaaaaattgaatattgatgtagagagtatttcggtatcggaattgcttcatttgattgagcagtatcctagtcttttgcgtcgtccaattattattgatgccaagcgtatgcaaatcggttttaatgaagatgagattcgtgcttttctccctcgtagttatcgtaagcaagaactaaaagaagcaagaatgagagctggtattagt

SEQ ID NO: 2852 - protein, 133 aa, Streptococcus pneumoniae
  conserved hypothetical protein; Cellular location: cytoplasm; Similar to strain R6 sequence 15903305 (3.E-72)
MITLFLSPSCTSCRKAKAWLEKHKVPFVEHNIMTSPLTRKELQHILSLTENGTDDIISTRSKIFQKLNIDVESISVSELLHLIEQYPSLLRRPIIIDAKRMQIGFNEDEIRAFLPRSYRKQELKEARMRAGIS

SEQ ID NO: 2853 - DNA, 615 bp, Streptococcus pneumoniae
atgaaaactaaattgatcttttggggctctatgctctttctcctctccctctccatccttctgaccatttatctggcttggattttctatcctatggagattcagtggctaaacttaacgaatcgagtctatctaaaaccagaaaccattcaatacaattttcatatcttgatgaattatctgaccaatccttttagtcaggtcttacagatgcctgattttcgttcgtcagcagctggtctgcaccatttcgcagtggtcaagaatctctttcatttggttcagctagtagctctagtgacactgccaagtttctatgtctttgtcaataggattgtgaaaaaggactttttgtctctttatcgaaaaagtctcctggctctagtagtcttacctgtgatgattggacttgggggagttttgattggttttgaccaattctttactcttttccatcaaattctctttgtgggagatgatacctggctttttgatccagccaaggatcctgttattatgattttgccagagaccttctttcttcatgccttcctcctcttttttgccctctatgaaaacttctttggctatctgtatctgaaaagtcgtaggaag

SEQ ID NO: 2854 - protein, 205 aa, Streptococcus pneumoniae
  hypothetical protein; Cellular location: membrane; Similar to strain R6 sequence 15903306 (e-115)
MKTKLIFWGSMLFLLSLSILLTIYLAWIFYPMEIQWLNLTNRVYLKPETIQYNFHILMNYLTNPFSQVLQMPDFRSSAAGLHHFAVVKNLFHLVQLVALVTLPSFYVFVNRIVKKDFLSLYRKSLLALVVLPVMIGLGGVLIGFDQFFTLFHQILFVGDDTWLFDPAKDPVIMILPETFFLHAFLLFFALYENFFGYLYLKSRRK

SEQ ID NO: 2855 - DNA, 771 bp, Streptococcus pneumoniae
atgaaatataaaggctatttaattgatttagacggaaccatttataaggggaaagaccgaatccctgctggagagacttttgttcatgaattgcaaaagcgggacattccctatctctttgtaaccaacaatacaacccgcactccagagagtgttaaggagatgttggctcagaattttaatatcgatacgcccctatcgactgtctacacagcgactttggcaaccatcgactatatgaatgatttggggcttgaaaagaccgtctatgtcgtcggagaagcaggactcaaggaagccatcaaggcggctggttatgtggaagacaaggaaaaacctgcctacgtggtagttggtctggattggcaagtcgactatgaaaaatttgccacagcaactcttgctattcaaaagggtgcccattttatcggaaccaatcctgacctcaacatcccgacggaacgcggtcttttgccaggtgctggctcactgattacgctgcttgaagtagcgacacgagtgaagccggtttatatcggaaaaccaaatgccatcattatggacaaggcggttgagcacttaggtttggaacgtgaagagttaatcatggttggggacaattatttgactgatattcgggctgggattgacaatggcattccaacgctcttggtgacgacaggttttactaaggcagaagaagtagctggcctgccaatcgcaccgacacatgtggtttctagccttgcggagtgggattttgatgaaaac

SEQ ID NO: 2856 - protein, 257 aa, Streptococcus pneumoniae
  hydrolase, haloacid dehalogenase-like family; Cellular location: cytoplasm; Similar to strain R6 sequence 15903307 (e-147)
MKYKGYLIDLDGTIYKGKDRIPAGETFVHELQKRDIPYLFVTNNTTRTPESVKEMLAQNFNIDTPLSTVYTATLATIDYMNDLGLEKTVYVVGEAGLKEAIKAAGYVEDKEKPAYVVVGLDWQVDYEKFATATLAIQKGAHFIGTNPDLNIPTERGLLPGAGSLITLLEVATRVKPVYIGKPNAIIMDKAVEHLGLEREELIMVGDNYLTDIRAGIDNGIPTLLVTTGFTKAEEVAGLPIAPTHVVSSLAEWDFDEN

SEQ ID NO: 2857 - DNA, 735 bp, Streptococcus pneumoniae
atgggcttaacttatcaaatgaaaatgaaaattccttttgatatggctgatatgaacggtcatatcaaacttccagatgtgattttgctgtcactgcaagtttcagggatgcagtcgattgaactgggagttagtgataaggccattttggaagaatataatctggtctggattatcgtagaatatgatattgaggtggttcgtttgcctcgttttgcggaagaaattaccatcgaaacggaagccttgagctacaatcgacttttttgctaccgtcgctttactatttataatgaagcggagcaggagctcatccacatgatggcgacctttgttctcatggaccgcgacagtcgaaaagtccatgttgttgaacctgagattgtggctccttaccagtctgattttgataaaaaacttatccgtggaccgaagtatgagtccttggaagaaccgatcagcaaggattaccatgttcgtttttacgacttggatatgaatggtcatgtcaataacagtaaatacttggactggatttttgaggtcatgggagcggattttttgacccactatattcccaagaaaatcaacctcaagtatgtcaaggaagttcgaccaggtggggtgattacatcggctgttgaacggactggactggaaagcaagcatgaaattacaagtgatggggttatcaatgcccaagcaatcattacttggcaagaaataaaaaaggct

SEQ ID NO: 2858 - protein, 245 aa, Streptococcus pneumoniae
  acyl-ACP thioesterase, putative; Cellular location: cytoplasm; Similar to strain R6 sequence 15903308 (e-138)
MGLTYQMKMKIPFDMADMNGHIKLPDVILLSLQVSGMQSIELGVSDKAILEEYNLVWIIVEYDIEVVRLPRFAEEITIETEALSYNRLFCYRRFTIYNEAEQELIHMMATFVLMDRDSRKVHVVEPEIVAPYQSDFDKKLIRGPKYESLEEPISKDYHVRFYDLDMNGHVNNSKYLDWIFEVMGADFLTHYIPKKINLKYVKEVRPGGVITSAVERTGLESKHEITSDGVINAQAIITWQEIKKA

SEQ ID NO: 2859 - DNA, 1128 bp, Streptococcus pneumoniae
atgcagaaaaaaccaacgtcagcctatgtgcacatcccattttgtacccagatttgttattattgtgatttttcaaaggtcttcatcaaaaatcagccagtcgacagctatttagagcatctgctggaagagtttcgttcttatgatattgaaaagttgtcaaccctttatatcggtggtggaacaccgacagccctgtcggctccgcaactggaggtgttactgaatggcttgactaaaaacttggatttgtctgtcttggaagagttgaccattgaagccaatccaggcgatttggatgcggataagatagctgttttgaaaaattcggctgtcaatcgtgtttcgctaggtgtccagacctttgatgataagatgttgaaaaagattgggcgcagtcatttggagaaggatatttatgaaaatatcgatcgcctgaaactggctggttttgacaatatctccattgatttgatttatgctctgcctggtcagaccatggagcaagtaaaggaaaatgtggctaaagccattggattggatattccccacatgagtttgtatagtttgattttagaaaaccatacggtctttatgaaccggatgcgacgtgggaaattgcctctgcctaaggaggaactagaagcggagatgtttgagtacatcattgcagagctggagcgagcgggttttgagcattatgagatttctaatttctccaaacccggttttgaaagtcgtcataatctcatgtactgggacaatgctgaatactatggtattggtgcaggggcatctggttatgtcaatggagtacgctataaaaatcatggtcccattcgtcattatctcagtgcggttgaggaaggcaatgcttgtattacagaagatcacctgagtcaaaaggagcaaatggaagaagaaatgttcttgggactccgcaagaaatccggggtttccatggcgcgatttgaggaaaaatttggacagtcttttgctggactttatggagaaattgtcagagatttggttcaacaaggcctcatgcagattgagggtgaccacgttcgcatgacaaagagaggtctctttttgggagatactgtagcagaacgatttattttggag

SEQ ID NO: 2860 - protein, 376 aa, Streptococcus pneumoniae
  oxygen-independent coproporphyrinogen III oxidase, putative; Cellular location: cytoplasm; Similar to strain R6 sequence 15903309 (0.E+01)
MQKKPTSAYVHIPFCTQICYYCDFSKVFIKNQPVDSYLEHLLEEFRSYDIEKLSTLYIGGGTPTALSAPQLEVLLNGLTKNLDLSVLEELTIEANPGDLDADKIAVLKNSAVNRVSLGVQTFDDKMLKKIGRSHLEKDIYENIDRLKLAGFDNISIDLIYALPGQTMEQVKENVAKAIGLDIPHMSLYSLILENHTVFMNRMRRGKLPLPKEELEAEMFEYIIAELERAGFEHYEISNFSKPGFESRHNLMYWDNAEYYGIGAGASGYVNGVRYKNHGPIRHYLSAVEEGNACITEDHLSQKEQMEEEMFLGLRKKSGVSMARFEEKFGQSFAGLYGEIVRDLVQQGLMQIEGDHVRMTKRGLFLGDTVAERFILE

SEQ ID NO: 2861 - DNA, 387 bp, Streptococcus pneumoniae
atgggtaaattatcctcaatccttttaggaaccgtttcaggtgcagctcttgccttgtttttaacaagtgataagggcaaacaagtttgcagtcaggctcaagattttctagatgatttgagagaagatccggagtatgccaaggagcaagtctgtgaaaaactgacagaagttaaggagcaggctacagattttgttctgaaaacaaaagaacaggttgagtcaggtgaaatcactgtggacagtatacttgctcaaactaaatcctatgcttttcaagcgacagaagcatcaaaaaatcaattaaataatctcaaggagcaatggcaagaaaaagccgaagctcttgatgactcagaagagattgtgattgatataacagaagaa

SEQ ID NO: 2862 - protein, 129 aa, Streptococcus pneumoniae
  conserved hypothetical protein; Cellular location: outside; Similar to strain R6 sequence 15903310 (6.E-67)
MGKLSSILLGTVSGAALALFLTSDKGKQVCSQAQDFLDDLREDPEYAKEQVCEKLTEVKEQATDFVLKTKEQVESGEITVDSILAQTKSYAFQATEASKNQLNNLKEQWQEKAEALDDSEEIVIDITEE

SEQ ID NO: 2863 - DNA, 381 bp, Streptococcus pneumoniae
atgttagaagttgcatatattcttgttgccctagctttgattgtctttttggtctatctgatcattactgtacaaaagcttggtcgtgtcatcgatgaaacagaaaagacgattaaaaccttgacttcagatgtggatgtgaccttgcatcacaccaatgagttgttggctaaggtcaatgtcttggcagatgatatcaatgtcaaggtggctacgattgatccactcttcagtgctgttgcagatttatctctatctgtttcagacctcaatgaccatgcgcgtgtcttgagcaagaaagcttcatcagctggttcaaaaacactcaagactggtgcaagtctgtcagctcttcgtcttgcaagtaaatttttcaaaaaa

SEQ ID NO: 2864 - protein, 127 aa, Streptococcus pneumoniae
  conserved hypothetical protein; Cellular location: membrane; Similar to strain R6 sequence 15903311 (5.E-64)
MLEVAYILVALALIVFLVYLIITVQKLGRVIDETEKTIKTLTSDVDVTLHHTNELLAKVNVLADDINVKVATIDPLFSAVADLSLSVSDLNDHARVLSKKASSAGSKTLKTGASLSALRLASKFFKK

SEQ ID NO: 2865 - DNA, 798 bp, Streptococcus pneumoniae
atgaggtgcaaaatgcttgatccaattgctattcaactaggacccctagccattcgttggtatgccttatgtattgtgacaggcttgattcttgcggtttatttgaccatgaaagaagcacctagaaagaagatcataccagacgatattttagattttatcttagtagcctttcccttggctattttaggagctcgtctctactatgttattttccgatttgattactatagtcagaatttaggagagatttttgccatttggaatggtggtttggccatttacggtggtttgataactggggctcttgtgctctatatctttgctgaccgtaaactcatcaatacttgggattttctagatattgcggcgcctagcgttatgattgctcaaagtttggggcgttggggtaatttctttaaccaagaagcttatggtgcaacagtggataatctggattatctacctggctttatccgtgaccagatgtatattgaggggagctaccgtcaaccgactttcctttatgagtctctatggaatctgcttggctttgccttgattctgatttttagacggaaatggaagagtctcagacgaggtcatatcacggccttttacttgatttggtatggtttcggtcgtatggttatcgaaggtatgcgaacagatagtctcatgttcttcggctttcgagtgtcccaatggctgtcagttgtccttatcggtctcggtataatgatcgttatttatcaaaatcgaaagaaggccccttactatattacagaggaggaaaac

SEQ ID NO: 2866 - protein, 266 aa, Streptococcus pneumoniae
  prolipoprotein diacylglyceryl transferase (lgt); Cellular location: membrane; Similar to strain R6 sequence 15903312 (e-152)
MRCKMLDPIAIQLGPLAIRWYALCIVTGLILAVYLTMKEAPRKKIIPDDILDFILVAFPLAILGARLYYVIFRFDYYSQNLGEIFAIWNGGLAIYGGLITGALVLYIFADRKLINTWDFLDIAAPSVMIAQSLGRWGNFFNQEAYGATVDNLDYLPGFIRDQMYIEGSYRQPTFLYESLWNLLGFALILIFRRKWKSLRRGHITAFYLIWYGFGRMVIEGMRTDSLMFFGFRVSQWLSVVLIGLGIMIVIYQNRKKAPYYITEEEN

SEQ ID NO: 2867 - DNA, 807 bp, Streptococcus pneumoniae
ttgaaggaggaaatgatgtcggttttagtaaaagaagtgattgaaaagcttagactagacattgtctatggtgaaccagaattgcttgaaaaggaaatcaatacagcggatattacgcgacctggtcttgaaatgacaggctattttgactactatacaccagagcggattcaacttttggggatgaaggagtggtcttatctgatcagcatgccttccaacagccgttatgaagttttgaaaaaaatgtttctacctgagacaccagcagtcattgttgcccgtggtttggtggttccagaggagatgttaaaggctgctagagaatgtaagattgctattttaaccagccgtgcagctaccagtcgtttatctggagagttatctagctatctggattctcgtttggcagaacgtaccagtgtgcacggtgtcttgatggatatttatgggatgggcgtcttgattcagggagatagtggaattggtaagagcgagacaggtcttgagcttgtcaaacgtggtcaccgtttggtagccgatgaccgtgtcgatatctttgccaaggatgagattactctctggggtgaaccagctgaaattttgaaacacttgattgaaattcgtggggttggtattatcgatgttatgagtctctacggtgcgagtgctgtcaaggattcttcacaggttcagcttgctgtctatttggaaaattacgatacgcataagacctttgatcgtcttggaaataatgcagaggaacttgaagtttctggcgtacattcctcgtattcgtattccagt

SEQ ID NO: 2868 - protein, 269 aa, Streptococcus pneumoniae
  Hpr(Ser) kinase/phosphatase FRAMESHIFT (hprK); Cellular location: cytoplasm; Similar to strain R6 sequence 15903313 (e-173)
MKEEMMSVLVKEVIEKLRLDIVYGEPELLEKEINTADITRPGLEMTGYFDYYTPERIQLLGMKEWSYLISMPSNSRYEVLKKMFLPETPAVIVARGLVVPEEMLKAARECKIAILTSRAATSRLSGELSSYLDSRLAERTSVHGVLMDIYGMGVLIQGDSGIGKSETGLELVKRGHRLVADDRVDIFAKDEITLWGEPAEILKHLIEIRGVGIIDVMSLYGASAVKDSSQVQLAVYLENYDTHKTFDRLGNNAEELEVSGVHSSYSYSS

SEQ ID NO: 2869 - DNA, 198 bp, Streptococcus pneumoniae
ttgaacttgaagggagtgaaaaaaatgtctaaaacagtagtacgtaagaatgaatctcttgacgacgcacttcgccgtttcaaacgtgcggttactaaagctggtactcttcaagaaacacgcaaacgtgaattctatgaaaaaccttctgtaaaacgtaaacgtaaatcagaagtagctcgtaaacgtaaaaaattc

SEQ ID NO: 2870 - protein, 66 aa, Streptococcus pneumoniae
  ribosomal protein S21 (rpsU); Cellular location: cytoplasm; Similar to strain R6 sequence 15903314 (5.E-28)
MNLKGVKKMSKTVVRKNESLDDALRRFKRAVTKAGTLQETRKREFYEKPSVKRKRKSEVARKRKKF

SEQ ID NO: 2871 - DNA, 714 bp, Streptococcus pneumoniae
atggaggatgaaaagatgaaagttattaaagttgaaaaccaagttcaaggtggaaaagttgcttttgagattttgaaggaaaaattggctaatggagctcaaactctaggacttgcgacaggaagtagcccacttgaattttacaaggaaattgttgagagtgaccttgatttttcaaatctaaccagtgtcaaccttgatgagtatgtgggccttgatggggacaatccacagtcttatcgttacttcatgcaagaaaacttgttcaaccaaaaaccatttaaagaaagtttcttgcctcgtggtgttaaggacaatgctgaagctgaagttgaacgctacaaccaaattttggctgaccatccagttgacctccaaatcttgggaatcggtcgcaatgggcatatcggctttaatgagcctggcactccatttgacagtcaaacgcatctagtagaacttgaccagtctactatcgaagccaatgcacgcttctttgccaagattgaagacgtcccaacccaagctatttcaatggggattaaaaacattttggatgccaagtctattattctttttgcttacggtgagtcgaaagcagaagccattgccggaacagtatctggcccagtgactgagaacctacctgcaagtagcctccaaaatcaccctgatgtaaccatcatcgcagatgctgaagcgcttagcttactc

SEQ ID NO: 2872 - protein, 238 aa, Streptococcus pneumoniae
  glucosamine-6-phosphate isomerase (nagB); Cellular location: cytoplasm; Similar to strain R6 sequence 15903315 (e-130)
MEDEKMKVIKVENQVQGGKVAFEILKEKLANGAQTLGLATGSSPLEFYKEIVESDLDFSNLTSVNLDEYVGLDGDNPQSYRYFMQENLFNQKPFKESFLPRGVKDNAEAEVERYNQILADHPVDLQILGIGRNGHIGFNEPGTPFDSQTHLVELDQSTIEANARFFAKIEDVPTQAISMGIKNILDAKSIILFAYGESKAEAIAGTVSGPVTENLPASSLQNHPDVTIIADAEALSLL

SEQ ID NO: 2873 - DNA, 1038 bp, Streptococcus pneumoniae
atgaacaaatatatgaatacagctgattttgatttccacttgccagaggaattgattgcccaaacgccccttgaaaaacgtgatgcctccaaactcctcatcgtcaaccgtgagacaggagaaatgcaagataaacatttccactctattattgatatgctggaacctggtgatgcccttgtcatgaacgacacccgagttctccctgcccgcctctatggtcaaaaagtggagacaggaggtcatgtggaacttctcctccttaagaacactagtggagacgagtgggaagttctggctaaacctgccaaacgcctcaaggtcggtactcgtatcagctttggtgatggccgcctcagcgctgtcgttacagaagaattgacccacgggggacgcattgtccgctttgaataccaaggaattttcctagaagtcttggaaagtctgggagaaatgcctctgccaccttatatccacgaaaaattagatgaccgtgaacgttatcaaaccgtctacgccaaggaaagtggctctgctgcagcaccgactgctggtcttcacttcaccaaagaactgctggcagaaatccaagctaagggtgttcatctagtctatctgactctccatgtcggactcggaacctttagacctgtttctgtggataatctggacgaacacgaaatgcactcagagttctatcaactttctgaggaagctgctgccacccttcgctctgtcaaaaaaaatggtggtcgtgtcatcgctgtcggaaccacttctatccgcaccttggaaactattggttccaagtttgatgggcaaatccaagcagattctggttggaccaatatctttatcaaacctgggtatgagtggaaggtcgtggatgccttctcaaccaacttccacctgccaaaatcaactctggtcatgttggtttctgcctttgcaggccgtgaattagtcttagatgcctaccaccattccatccaagaacactaccgcttcttcagttttggtgacgccatgtttatttat

SEQ ID NO: 2874 - protein, 346 aa, Streptococcus pneumoniae
  S-adenosylmethionine tRNA ribosyltransferase-isomerase (queA); Cellular location: cytoplasm; Similar to strain R6 sequence 15903316 (0.E+01)
MNKYMNTADFDFHLPEELIAQTPLEKRDASKLLIVNRETGEMQDKHFHSIIDMLEPGDALVMNDTRVLPARLYGQKVETGGHVELLLLKNTSGDEWEVLAKPAKRLKVGTRISFGDGRLSAVVTEELTHGGRIVRFEYQGIFLEVLESLGEMPLPPYIHEKLDDRERYQTVYAKESGSAAAPTAGLHFTKELLAEIQAKGVHLVYLTLHVGLGTFRPVSVDNLDEHEMHSEFYQLSEEAAATLRSVKKNGGRVIAVGTTSIRTLETIGSKFDGQIQADSGWTNIFIKPGYEWKVVDAFSTNFHLPKSTLVMLVSAFAGRELVLDAYHHSIQEHYRFFSFGDAMFIY

SEQ ID NO: 2875 - DNA, 105 bp, Streptococcus pneumoniae
atgaaaatcaaagagcaaactagaaaactagtcgcaggttgctcaaagtactgctttgaggttgtagatagaactgacgaagtcagtcacatatataatccaagg

SEQ ID NO: 2876 - protein, 35 aa, Streptococcus pneumoniae
  box element
MKIKEQTRKLVAGCSKYCFEVVDRTDEVSHIYNPR

SEQ ID NO: 2877 - DNA, 387 bp, Streptococcus pneumoniae
atggtaaaaagacgtataaggagagggacgagagaacctgaaaaagttgttgttcctgagcaatcatctattccttcgtatcctgtatctgttacatctaaccaaggaacagatgtagcagtagaaccagctaaagcagttgctccaacaacagactggaaacaagaaaatggtatgtggtatttttataatactgatggttccatggcaacaggttgggtacaagttaatagttcatggtactacctcaacagcaacggttctatgaaagtcaatcaatggttccaagttggtggtaaatggtattatgtaaatacatcgggtgagttagcggtcaatacaagtatagatggctatagagtcaatgataatggtgaatgggtgcgt

SEQ ID NO: 2878 - protein, 129 aa, Streptococcus pneumoniae
  pspC-related protein
MVKRRIRRGTREPEKVVVPEQSSIPSYPVSVTSNQGTDVAVEPAKAVAPTTDWKQENGMWYFYNTDGSMATGWVQVNSSWYYLNSNGSMKVNQWFQVGGKWYYVNTSGELAVNTSIDGYRVNDNGEWVR

SEQ ID NO: 2879 - DNA, 99 bp, Streptococcus pneumoniae
atggcaaaatctaatactaataagcgctatgcaatacgtaaactcggaaagatttttggttctgcggtaatcgggctaactttatttttaggaggaatc

SEQ ID NO: 2880 - protein, 33 aa, Streptococcus pneumoniae
  conserved domain protein
MAKSNTNKRYAIRKLGKIFGSAVIGLTLFLGGI

SEQ ID NO: 2881 - DNA, 1344 bp, Streptococcus pneumoniae; identical to SEQ ID NO: 517

SEQ ID NO: 2882 - protein, 448 aa, Streptococcus pneumoniae; identical to SEQ ID NO: 486
  IS1380-Spn1, transposase; Cellular location: cytoplasm; Similar to strain R6 sequence 15903941 (2.E-46)

SEQ ID NO: 2883 - DNA, 549 bp, Streptococcus pneumoniae
atgaaatctatcggtacgcaaatattacagacagaacgtttgattttaagaagatttgtggagagtgatgcagaagccatgtttcaaaattgggcttcatccgctgagaatctgacctatgttacctgggatccccatcctgatgtcgaaatcactcgaaactcgatttgcaattgggttgcttcctatactaatctcaactattataaatgggccatttgtctaaaagaaaacccagagcaagtaataggagatatcagcattgttaagatagacgaggctgatttaagctgtgaaattggctatgtgttaggcaaggcttactggggaaatggtatgatgacagagactttgaaagctatcttggacttttgttttactcaagcaggttttcaaaaggtcagagcacgttatgccagtctcaacccagcttcaggtcgtgtcatggaaaaggctggaatgtcctatctacaaaccattgttaatggtgtagagagaaaaggctatcttgcggatcttatttattatggtataagtagggaagaatgt

SEQ ID NO: 2884 - protein, 183 aa, Streptococcus pneumoniae
  acetyltransferase, GNAT family; Cellular location: cytoplasm; Similar to strain R6 sequence 15904024 (e-149)
MKSIGTQILQTERLILRRFVESDAEAMFQNWASSAENLTYVTWDPHPDVEITRNSICNWVASYTNLNYYKWAICLKENPEQVIGDISIVKIDEADLSCEIGYVLGKAYWGNGMMTETLKAILDFCFTQAGFQKVRARYASLNPASGRVMEKAGMSYLQTIVNGVERKGYLADLIYYGISREEC

SEQ ID NO: 2885 - DNA, 822 bp, Streptococcus pneumoniae
atgagtttgcaagaaacgattatccaagagctgggtgtcaaaccagtgattgatgcccaggaagaaatccgtcgttctattgatttcttaaaaagatatctgaaaaaacatcccttcctaaaaacctttgtactagggatttctgggggacaagactcaaccttggcaggacgtttggcgcaattagctatggaagaactgcgagctgaaacgggagacgatagctacaaatttatcgctgtccgcctgccatacggagtgcaagctgatgaagcagatgctcaaaaagccctagccttcatccagccagatgtcagcttggttgtgaatatcaaggaatcagctgatgccatgacagctgcagttgaagcgacaggtagtcctgtttcagacttcaacaaggggaatatcaaggcacgttgccgtatgattgctcagtatgcccttgctggttcccatagcggagcggtcattggaacagaccacgccgcggaaaatatcacaggtttctttaccaagtttggtgacggcggtgcggatattctccctctttaccgcctcaataaacgccaaggaaaacagctcttgcagaaacttggcgcagagccagccctttatgaaaaaatcccaacggcagacctagaagaagataaaccaggcctagctgacgaagtcgcacttggagtcacctacgcagagattgacgactacctagaaggcaaaacaatcagcccagaagctcaagcgaccattgaaaactggtggcacaaaggccaacacaaacgccacttacccatcaccgtatttgatgacttttgggag

SEQ ID NO: 2886 - protein, 274 aa, Streptococcus pneumoniae
  NH(3)-dependent NAD(+) synthetase (nadE); Cellular location: cytoplasm; Similar to strain R6 sequence 15903319 (e-157)
MSLQETIIQELGVKPVIDAQEEIRRSIDFLKRYLKKHPFLKTFVLGISGGQDSTLAGRLAQLAMEELRAETGDDSYKFIAVRLPYGVQADEADAQKALAFIQPDVSLVVNIKESADAMTAAVEATGSPVSDFNKGNIKARCRMIAQYALAGSHSGAVIGTDHAAENITGFFTKFGDGGADILPLYRLNKRQGKQLLQKLGAEPALYEKIPTADLEEDKPGLADEVALGVTYAEIDDYLEGKTISPEAQATIENWWHKGQHKRHLPITVFDDFWE

SEQ ID NO: 2887 - DNA, 1458 bp, Streptococcus pneumoniae
atgtatccagatgatagtttgacattgcacacggacttgtaccagatcaacatgatgcaggtttactttgaccaagggattcacaataagaaggcggtctttgaggtgtatttccgccaacagccttttaagaacggctatgcggtttttgcaggtttagaaagaattgtgaactatcttgaagacttgcgtttttcagatagtgatatagcctatttggagtcgcttggttatcatggggcgttcttggattaccttcgcaatttcaagttggagttgaccgttcgttctgcccaagaaggggatttggtttttgctaatgaaccgattgtgcaggtggaaggacctctagcccaatgtcagttggtcgaaacggctcttttgaacatcgtcaactaccagactttggtggcgacgaaggcagctcgtattcgttcggttatcgaagatgaacccttgatggagtttgggacacgtcgggctcaagaaatggatgcggccatctggggaacacgcgcagctgtgattggtggcgccaatggaaccagcaacgtgcgtgcgggtaagctctttgacattcctgttttgggaacccatgcccatgccttggtacaggtttatggcaatgactatgaagctttcaaggcttacgctgcgacccacaaaaattgtgtctttcttgtggatacctatgacacccttcgcatcggtgtaccagctgccattcaggtggcgcgtgagctgggtgatcagattaactttatgggtgtgcggattgactctggggatattgcctacatttctaagaaagtccgtcagcaactggatgaggctggatttacagaggctaagatttatgcttctaatgatctagatgaaaataccatccttaacctcaagatgcaaaaggccaagattgatgtctggggtgtgggtaccaagctgattacagcctatgaccagccggctcttggggcggtttacaagattgttgcaatcgaagatgaaactggtcagatgcgcaatacgattaagctgtctaataatgctgaaaaagtttctacgccaggtaagaagcaggtgtggcgcattaccagtcgtgaaaaaggcaagtcagaaggcgactatatcacttatgatggtgtggatattagcgacatgacagaaatcaagatgttccatccgacctatacatacatcaagaagacggttcgtaattttgatgccgttcctctcttggtggatatcttcaaagaaggaatattagtttacaacttgcctagtttgactgacattcaggattatgcccgtaaggaatttgacaagttgtgggatgagtataagcgtgtgctcaatccgcagcactatccagtggatttggcgcgtgatgtatggcaagataagatggacttgattgataagatgcgcaaggaagcccttggtgaaggagaagaagaa

SEQ ID NO: 2888 - protein, 486 aa, Streptococcus pneumoniae
  conserved hypothetical protein; Cellular location: cytoplasm; Similar to strain R6 sequence 15903320 (0.E+01)
MYPDDSLTLHTDLYQINMMQVYFDQGIHNKKAVFEVYFRQQPFKNGYAVFAGLERIVNYLEDLRFSDSDIAYLESLGYHGAFLDYLRNFKLELTVRSAQEGDLVFANEPIVQVEGPLAQCQLVETALLNIVNYQTLVATKAARIRSVIEDEPLMEFGTRRAQEMDAAIWGTRAAVIGGANGTSNVRAGKLFDIPVLGTHAHALVQVYGNDYEAFKAYAATHKNCVFLVDTYDTLRIGVPAAIQVARELGDQINFMGVRIDSGDIAYISKKVRQQLDEAGFTEAKIYASNDLDENTILNLKMQKAKIDVWGVGTKLITAYDQPALGAVYKIVAIEDETGQMRNTIKLSNNAEKVSTPGKKQVWRITSREKGKSEGDYITYDGVDISDMTEIKMFHPTYTYIKKTVRNFDAVPLLVDIFKEGILVYNLPSLTDIQDYARKEFDKLWDEYKRVLNPQHYPVDLARDVWQDKMDLIDKMRKEALGEGEEE

SEQ ID NO: 2889 - DNA, 486 bp, Streptococcus pneumoniae
atgaaaaatagattttattattctcaattactagacgaaagagaagaacaactgttcaataaagcgggctctgaaagtttctatatctgcattgctttgtcgctcctatcttatatcatttcagtattagcaccaagcctttttaattctaatatgctgctaatcgttatcatcatagggacattttactttttcaatcgtgcccgttatctgggagtgacctactatggtcgttttcattttacgattttgggttgttttttcctaaccttggctattacggctcttttgatgttgcagaattatcaattcaacatagaaatttatcagcacaatcctttgaattttaaatacctgtctgcttgggtcattacttatatcatttaccttccgtggatctttattggcaatcttggtcttaagagctatggcgaatgggctcagaaaaaatttgaacaagatatggatgaattggagagtggagaa

SEQ ID NO: 2890 - protein, 162 aa, Streptococcus pneumoniae
  hypothetical protein; Cellular location: membrane; Similar to strain R6 sequence 15903321 (3.E-91)
MKNRFYYSQLLDEREEQLFNKAGSESFYICIALSLLSYIISVLAPSLFNSNMLLIVIIIGTFYFFNRARYLGVTYYGRFHFTILGCFFLTLAITALLMLQNYQFNIEIYQHNPLNFKYLSAWVITYIIYLPWIFIGNLGLKSYGEWAQKKFEQDMDELESGE

SEQ ID NO: 2891 - DNA, 237 bp, Streptococcus pneumoniae
atgagtattaaaactataaggaggacgaaggtggctaaaaatttaaaattaaaattagctcgggtagagcgtgatttaacacaaggtcaactggcagaggctgtcggggtgacacgccagactattggtttaatagaggcgggaaaatacaatcccagtctctcgctctgccagtctatttgcagatgtttagggaaaaccctagaccaactattttgggaggaagaagatgaaaaa

SEQ ID NO: 2892 - protein, 79 aa, Streptococcus pneumoniae
  transcriptional repressor, putative; Cellular location: cytoplasm; Similar to strain R6 sequence 15903322 (5.E-41)
MSIKTIRRTKVAKNLKLKLARVERDLTQGQLAEAVGVTRQTIGLIEAGKYNPSLSLCQSICRCLGKTLDQLFWEEEDEK

SEQ ID NO: 2893 - DNA, 399 bp, Streptococcus pneumoniae
atgaaattaaataaacagaagaatcggatgatttacgtcttgtctaattttctatatgctatctcagtttccattatttatgctttgaatggcattgtgttactagtcatagtaagtaaattgggtattccaggtgatttaggattaaattttatagtagctattgtagtcaatacaattttgttagtcctgttttattttctattatcttacattttctatttatacaaattgaaaagtggcttggtatttggtattttagtagctttactactctttatctctaatatattaaatacgatgatgatgaatactagtaatgatttgtttatcaaagcaattgaacttcttccttttttattctttacctgtatttgtggcttcaaatacgatgtctat

SEQ ID NO: 2894 - protein, 133 aa, Streptococcus pneumoniae
  hypothetical protein; Cellular location: membrane; Similar to strain R6 sequence 15903323 (8.E-58)
MKLNKQKNRMIYVLSNFLYAISVSIIYALNGIVLLVIVSKLGIPGDLGLNFIVAIVVNTILLVLFYFLLSYIFYLYKLKSGLVFGILVALLLFISNILNTMMMNTSNDLFIKAIELLPFLFFTCICGFKYDVY

SEQ ID NO: 2895 - DNA, 132 bp, Streptococcus pneumoniae
ttgagaattactatgtctgggaatattcaaaatagtgagctttttaaattttttaacgaaaactctattaaagtagttgattttgaaactaaaaaagagacgcttaaagatatttacctaaatcgttcaaaa

SEQ ID NO: 2896 - protein, 44 aa, Streptococcus pneumoniae
  hypothetical protein (ABC transporter); Cellular location: cytoplasm; Similar to strain R6 sequence 15903324 (5.E-19)
MRITMSGNIQNSELFKFFNENSIKVVDFETKKETLKDIYLNRSK

SEQ ID NO: 2897 - DNA, 732 bp, Streptococcus pneumoniae
atgagaatcaaagagaaaaccaataatattaatggaggaataaaaaatgtaagtaagcattatggtcattcaatcattctcaaagatataaattttgcacttaacaagggtgaaattgttggtctagcagggagaaatggagttggtaagagtacgttgatgaaaattcttgttcagaataatcaaccgacttcaggtaatattataagcagtgataatgttgggtatttaatcgaagaaccaaaattatttttatctaaaacaggtttagagaatttaaaatatttgtcaaatttatatggtgttgactacaatcaagaaagatttagatgtttgatccaagagttagatttgactcagtctattaataaaaaagtaaagacctattctttgggtacaaaacaaaaattagctttgcttctaactctcgttacggaacctgatatattgattttagatgaaccgactaatggtttagatattgaatcatcacaaatagttttagcggttctaaaaaaattagctttacatgaaaatgtgggaattttaatatcgagtcataaattagaagacattgaagaaatttgtgagagagttcttttcttggagaacgggcttttgacatttcaaaaagtaggaaaagatagtcataatttcttgtttgagatagctttttcatcagctacagatagagacattttcattaccaaacaagaattttgggatattgtt

SEQ ID NO: 2898 - protein, 244 aa, Streptococcus pneumoniae
  ABC transporter, ATP-binding protein; Cellular location: membrane; Similar to strain R6 sequence 15903324 (e-101)
MRIKEKTNNINGGIKNVSKHYGHSIILKDINFALNKGEIVGLAGRNGVGKSTLMKILVQNNQPTSGNIISSDNVGYLIEEPKLFLSKTGLENLKYLSNLYGVDYNQERFRCLIQELDLTQSINKKVKTYSLGTKQKLALLLTLVTEPDILILDEPTNGLDIESSQIVLAVLKKLALHENVGILISSHKLEDIEEICERVLFLENGLLTFQKVGKDSHNFLFEIAFSSATDRDIFITKQEFWDIV

SEQ ID NO: 2899 - DNA, 723 bp, Streptococcus pneumoniae
atgcgtgatgccaaccgtggtggatgttctcagtcatgccgttggaagtacgacctttacgatatgccatttgggaaagaacgtaagagtttgcagggtgagattccagaagaattttcaatgtcagccgttgatatgtctatgattgaccatatctcagatatgattgaaaatggtgtggacagtctaaaaatcgaaggacgtatggagtctattcactatgtatcaacagtaaccaactgctacaaggcggctgtggatgcctatcttgaaagtcctgaaaagtttgaagctatcaaacaagacttggtggacgagatgtggaaggttgcccaacgtgaactggctacaggattttactatggtacaccatctgaaaatgagcagttgtttggtgctcgtcgtaaaatccctgagtacaagtttgtcgctgaagtggtttcttatgatgatgcggcacaaacagcaactattcgtcaacgaaacgtcattaacgaaggggaccaagttgagttttatggtccaggtttccgtcattttgaaacctatattgaagatttgcatgatgctaaaggcaataaaatcgaccgcgctccaaatccaatggaactattgactattaaagtcccacaacctgttcaatcaggagacatggttcgagctcttaaagaggggcttatcaatctttataaggaagatggaaccagcgtcacagttcgtgct

SEQ ID NO: 2900 - protein, 241 aa, Streptococcus pneumoniae
  peptidase, U32 family; Cellular location: cytoplasm; Similar to strain R6 sequence 15903325 (e-139)
MRDANRGGCSQSCRWKYDLYDMPFGKERKSLQGEIPEEFSMSAVDMSMIDHISDMIENGVDSLKIEGRMESIHYVSTVTNCYKAAVDAYLESPEKFEAIKQDLVDEMWKVAQRELATGFYYGTPSENEQLFGARRKIPEYKFVAEVVSYDDAAQTATIRQRNVINEGDQVEFYGPGFRHFETYIEDLHDAKGNKIDRAPNPMELLTIKVPQPVQSGDMVRALKEGLINLYKEDGTSVTVRA

SEQ ID NO: 2901 - DNA, 165 bp, Streptococcus pneumoniae
ttgaacaatcttgatattatgcgttttattgtgggaagatttacttcattttctcttgaaattgagttttctcctacttcaaaactagatgatttgctatttaaaatagcgttccttatgattttggcaacctggattaaagcgagaaaaacaaaaggggcaact

SEQ ID NO: 2902 - protein, 55 aa, Streptococcus pneumoniae
  hypothetical protein
MNNLDIMRFIVGRFTSFSLEIEFSPTSKLDDLLFKIAFLMILATWIKARKTKGAT

SEQ ID NO: 2903 - DNA, 1284 bp, Streptococcus pneumoniae
atgacaaaaacattaaaacgtcctgaggttttatcacctgcagggactttagagaagctaaaggtagctgttcagtatggagcagatgctgtctttatcggtggtcaggcctatggtcttcgtagccgtgcgggaaactttactttcgaacagatggaagaaggcgtgcagtttgcggccaagtatggtgccaaggtctatgtagcggctaatatggttatgcacgaaggaaatgaagctggtgctggtgagtggttccgtaaactgcgtgatatcgggattgcagcagttatcgtatctgacccagccttgattatgattgcagtgactgaagcaccaggccttgaaatccacctttctacccaagccagtgccactaactatgaaacccttgagttctggaaagagctaggcttgactcgtgtcgttttagcgcgtgaggtttcaatggaagaattagctgagatccgcaaacgtacagatgttgaaattgaagcctttgtccatggagctatgtgtatttcatactctggacgttgtactctttcaaaccacatgagtatgcgtgatgccaaccgtggtggatgttctcagtcatgccgttggaaatacgacctttacgatatgccatttgggaaagaacgtaagagtttgcagggtgagattccagaagaattttcaatgtcagccgttgacatgtctatgattgaccacattccagatatgattgaaaatggtgtggacagtctaaaaatcgaaggacgtatgaagtctattcactacgtatcaacagtaaccaactgctacaaggcggctgtggatgcctatcttgaaagtcctgaaaagtttgaagctatcaaacaagacttggtggacgagatgtggaaggttgcccaacgtgaactggctacaggattttactatggtacaccatctgaaaatgagcagttgtttggtgctcgccgtaaaattcctgagtacaagtttgtcgctgaagtggtttcttatgatgatgcggcacaaacagcaacaattcgtcaacgaaatgtcattaacgaaggggaccaagttgagttttatggtccaggtttccgtcattttgaaacctatattgaagatttgcatgatgccaaaggcaataaaatcgaccgcgctccaaatccaatggaactattgactattaaggtgcctcaacccgttcaatcaggagatatggttcgtgcattaaaagaaggactcatcaatctttataaggaagatggaaccagcgtcacagttcgagct

SEQ ID NO: 2904 - protein, 428 aa, Streptococcus pneumoniae
  peptidase, U32 family; Cellular location: membrane; Similar to strain R6 sequence 15903327 (0.E+01)
MTKTLKRPEVLSPAGTLEKLKVAVQYGADAVFIGGQAYGLRSRAGNFTFEQMEEGVQFAAKYGAKVYVAANMVMHEGNEAGAGEWFRKLRDIGIAAVIVSDPALIMIAVTEAPGLEIHLSTQASATNYETLEFWKELGLTRVVLAREVSMEELAEIRKRTDVEIEAFVHGAMCISYSGRCTLSNHMSMRDANRGGCSQSCRWKYDLYDMPFGKERKSLQGEIPEEFSMSAVDMSMIDHIPDMIENGVDSLKIEGRMKSIHYVSTVTNCYKAAVDAYLESPEKFEAIKQDLVDEMWKVAQRELATGFYYGTPSENEQLFGARRKIPEYKFVAEVVSYDDAAQTATIRQRNVINEGDQVEFYGPGFRHFETYIEDLHDAKGNKIDRAPNPMELLTIKVPQPVQSGDMVRALKEGLINLYKEDGTSVTVRA

SEQ ID NO: 2905 - DNA, 180 bp, Streptococcus pneumoniae
atggcaaatgataataagagccattatttgatatacagagttttaggtatttcatttgaagaaggagaaaatatcgatttgtatcaaaataaaggtcgttttttatacaaatatgctggttcatttttagaagaagctgcagtactatgctttaacgaaaaatttggtacagaaaatact

SEQ ID NO: 2906 - protein, 60 aa, Streptococcus pneumoniae
  type II restriction endonuclease, putative, POINT MUTATION
MANDNKSHYLIYRVLGISFEEGENIDLYQNKGRFLYKYAGSFLEEAAVLCFNEKFGTENT

SEQ ID NO: 2907 - DNA, 189 bp, Streptococcus pneumoniae
atgttctactatccaaatagaactcaagctataaaaattcagcaaactttagaaacattgtataacggtattggagggaaatattattatggagattctgcctgggaacatttaagagcagtgaccggtattgatttacttagtattctaacagatattgcaaataaaaaaacaggggtaaaatcaaaa

SEQ ID NO: 2908 - protein, 63 aa, Streptococcus pneumoniae
  restriction endonuclease R.XbaI
MFYYPNRTQAIKIQQTLETLYNGIGGKYYYGDSAWEHLRAVTGIDLLSILTDIANKKTGVKSK

SEQ ID NO: 2909 - DNA, 1188 bp, Streptococcus pneumoniae
atgacagtattaaaaggagataacttagaaatattaaaaactattgaatcctcaagtattgatttaatctatatggaccctcctttctttacacagaaaacccaaaaattatctaataacaaaaatattatgtattcattcgaagatacgtggacttcgattgaggattacaaagaatttttgtctgtaagattagaagaatgcaaaagagtgctaaaaaatagtggcagtattttcgttcattgtgataaaattgcaaatcatcatattagattaattttagataatatctttggagtagatatgtttcaaagcgaaattatatggaactataaacggtggtctaattcaaaaaagggattattgaacaatcatcaaaacatttacttttattcaaagtcaaaagattttaaatttaatacaatttttacagagtattcttctactacaaatatcgaccaaatactagtggaacgaaaacgagatggaaactctaaaactatatataaggttgataataatggtaactatattctagcaaaagagaaaaatggagttcccctttcagatgtttggaatataccatttcttaatccaaaagctaaagaaagagtaggttatcctacacaaaaacctattctgttattagaacaaattataaagattgctactgataaaaatgatatagttttagacccgttctgtggaagtggaactactttagtagcctccaagattttgaatagaaattatatggggattgatttatctgaggaagctatcaatataactcagcaacgtctggaaaatgttataaaaacaagttcaaatttattgaataaaggaatcgaagcatatagaaccaaaactgaggaagaggaaaacattcttaaattattacaggcaaaaattgttcaaagaaataaaggaattgatggttttttacctaaacattttcaaaaaaaaccgatacctataaaaattcaaaaaaataatgaatgtctgaatgagagtatctctttattacagaatgctataaactccaaaaaacttgattttggagtagttataaaaactcattcagataatttattatttgattttgatacgattcctgaaaatataatagtagttgaccattttgaacttacaatcgaaaaatggttaagtaaaagtcaacagttacta

SEQ ID NO: 2910 - protein, 396 aa, Streptococcus pneumoniae
  type II DNA modification methyltransferase, putative; Cellular location: cytoplasm; Similar to strain R6 sequence 15903330 (0.E+01)
MTVLKGDNLEILKTIESSSIDLIYMDPPFFTQKTQKLSNNKNIMYSFEDTWTSIEDYKEFLSVRLEECKRVLKNSGSIFVHCDKIANHHIRLILDNIFGVDMFQSEIIWNYKRWSNSKKGLLNNHQNIYFYSKSKDFKFNTIFTEYSSTTNIDQILVERKRDGNSKTIYKVDNNGNYILAKEKNGVPLSDVWNIPFLNPKAKERVGYPTQKPILLLEQIIKIATDKNDIVLDPFCGSGTTLVASKILNRNYMGIDLSEEAINITQQRLENVIKTSSNLLNKGIEAYRTKTEEEENILKLLQAKIVQRNKGIDGFLPKHFQKKPIPIKIQKNNECLNESISLLQNAINSKKLDFGVVIKTHSDNLLFDFDTIPENIIVVDHFELTIEKWLSKSQQLL

SEQ ID NO: 2911 - DNA, 144 bp, Streptococcus pneumoniae
ttgtcttctaagctcttaaaagcaaaagaacaagtaaagagtcaagacaaggataaaaagtccatattagggcaaataaaaagctttaagacagatgacaaatctaagtcaaataagaaagaccatagcaaaggtgcagagaga

SEQ ID NO: 2912 - protein, 48 aa, Streptococcus pneumoniae
  hypothetical protein; Cellular location: cytoplasm
MSSKLLKAKEQVKSQDKDKKSILGQIKSFKTDDKSKSNKKDHSKGAER

SEQ ID NO: 2913 - DNA, 990 bp, Streptococcus pneumoniae
atgtcatattatgattttgtaaaagattatatgaaagtagatgaatgtaaaaacaatgagaagtattcaagtgcaggtcatacattttgttggaaaaaagagaattcaacttatgcagaaggactatattggttttatgaaggaggcagcttcattatcgatatacatgatttttatatcaaagaggaagtagttcaaaatagcacttatagtatgtcagactatgtttcaatttattcaagttacattgtcagtgcaaacggagaaaagtttaatccgtatcaaactattaccgcaaactctctatgtacttttgattttgataatataaaagataattttgtttttttattacacgagaattgttgttatcttgctgtttccattggttttaaaaaagagctaatagaaaaacatttagcatctattaacattaatccagaatctttttattcaaccttgcttcaaccgaatcaaataatacttacaaaggccttagaaagagtggcaatggaaatattaaattgtaagatggacgctcctgccgctgattttttctttaaagcaaaggcaaatgaatggataagtatagtaattgacacatacttaaatagaaaaaaatataaaattgaaattgatgatgataaagcacttgaagatgtagcaagattcttagatgatcattttgcaacgaatgtaaatcaaggcacgcttgaaaaaatatctaaaatgagtggtactaaattaaaaaatttatttaaggaaaaatattgtcaaagcattacagagtacactcaaagaaaaagaatgaatgtagctgaaactcttcttttaaacactgaactacctataaaagagatagcagaatctgttggatattcatctgccagcaaattttctatctattataaaagatacaagggaaaacttccaagtgaagtccgtaatttagcttgcaaacatcacaattttaaatgcgattattgtgat

SEQ ID NO: 2914 - protein, 330 aa, Streptococcus pneumoniae
  transcriptional regulator, araC family; Cellular location: cytoplasm; Similar to strain R6 sequence 15903331 (0.E+01)
MSYYDFVKDYMKVDECKNNEKYSSAGHTFCWKKENSTYAEGLYWFYEGGSFIIDIHDFYIKEEVVQNSTYSMSDYVSIYSSYIVSANGEKFNPYQTITANSLCTFDFDNIKDNFVFLLHENCCYLAVSIGFKKELIEKHLASININPESFYSTLLQPNQIILTKALERVAMEILNCKMDAPAADFFFKAKANEWISIVIDTYLNRKKYKIEIDDDKALEDVARFLDDHFATNVNQGTLEKISKMSGTKLKNLFKEKYCQSITEYTQRKRMNVAETLLLNTELPIKEIAESVGYSSASKFSIYYKRYKGKLPSEVRNLACKHHNFKCDYCD

SEQ ID NO: 2915 - DNA, 1758 bp, Streptococcus pneumoniae
atgcttatgaagatttacaaaaaactatttgcttatgtccaagataagaaatatcttggggttttggccataattttttctgctatatctgctgcacttacagtatatggatattatttaatctacaaatttctagataagttaataattaattcaaacttatccggtgcagagagtatagcattaaaatctgttattacactaacaagtggagcgatattttattttgtctcaggaatgttttcacatatcttgggattcaggcttgaaacaaatttaagaaaaaggggaatcgatggtctggaaaaagcaagttttaggttctttgacttaaatccatctggtcaaataagaaagattatagatgacaatgctgcacaaactcatcaggtggtagcacacatgattcccgatagttctcaggcaataatcacacccgtacttgtacttgcacttggctttatagtaagtataagagttggcataattttgcttgctcttactataattggtggcttaattttaggggcaatgatgggcgagcaagaatttatgaagatataccaagaatccctatctaaactaagtgctgaaactgttgagtacgtgagaggaatgcaagttgtaaaaatatttaaagcaaatgtagagtcttttaaaagcttttataaggcgataaaagattactcaaagtatgcttatgattattccctatcttgtaaaaggccttatgttttgtatcaatggttattttttggactgattgcaattttaattattcctatagtttattttatgactagcttagctagcgcaaaggtgattttacttgagcttatcatgattttatttttatcaggagttctctttgtttcattcatgagaatgatgtggtactccatgtatatttctcaaggaaattatgcagtagatactttagaggcgctttacgaagatatgcaaaaagacaaattagtgcatggtaatgtcaataattttaaaaactataatatagaatttgagaatgttagctttgcttataatgataaagctgtcattgaaaatttatcctttaatttagaagaaggaaagtcctacgcacttgtcggttcatctggatcaggcaaatcaacagtagcaaaacttatatcaggtttttacaatgttaataaaggaagcataaagataggcgggatagcaataagtgaatattctgacgaagccttaattaaagccatttcctttgtttttcaagattcaaaattattcaagaagagcatttatgataatgtagcgttagctaataaagatgcgacgaaagatgacgttatgagagccttaaaattagcaggatgcgatttaatattagacaaattcccagaaagagaaaatacaatcataggctcaaaaggtgtttatttatccggtggagaaaaacaaagaattgcaattgctagagcaattttaaaggattccaaaattattattatggatgaagcatcagcatctattgacccagataacgagtttgaattgcaaaaagcttttaaaaatcttatgaaggataaaacagttatcatgattgcacacaggctatctacaattaaagaccttgatgaaattattgtcatggatagtggaaaaattatagaaagagggtctgacaaagaattaatgtcaaaagatacaaggtataagagcctgcaagagatgtttaacagtgcgaatgaatggagggtttcaaatgaaagagtttta

SEQ ID NO: 2916 - protein, 586 aa, Streptococcus pneumoniae
  ABC transporter, ATP-binding/permease protein; Cellular location: membrane; Similar to strain R6 sequence 15903332 (0.E+01)
MLMKIYKKLFAYVQDKKYLGVLAIIFSAISAALTVYGYYLIYKFLDKLIINSNLSGAESIALKSVITLTSGAIFYFVSGMFSHILGFRLETNLRKRGIDGLEKASFRFFDLNPSGQIRKIIDDNAAQTHQVVAHMIPDSSQAIITPVLVLALGFIVSIRVGIILLALTIIGGLILGAMMGEQEFMKIYQESLSKLSAETVEYVRGMQVVKIFKANVESFKSFYKAIKDYSKYAYDYSLSCKRPYVLYQWLFFGLIAILIIPIVYFMTSLASAKVILLELIMILFLSGVLFVSFMRMMWYSMYISQGNYAVDTLEALYEDMQKDKLVHGNVNNFKNYNIEFENVSFAYNDKAVIENLSFNLEEGKSYALVGSSGSGKSTVAKLISGFYNVNKGSIKIGGIAISEYSDEALIKAISFVFQDSKLFKKSIYDNVALANKDATKDDVMRALKLAGCDLILDKFPERENTIIGSKGVYLSGGEKQRIAIARAILKDSKIIIMDEASASIDPDNEFELQKAFKNLMKDKTVIMIAHRLSTIKDLDEIIVMDSGKIIERGSDKELMSKDTRYKSLQEMFNSANEWRVSNERVL

SEQ ID NO: 2917 - DNA, 1743 bp, Streptococcus pneumoniae
gtgcgaatgaatggagggtttcaaatgaaagagttttataaaaaaagatttgctcttacagatggaggagcaagaaatttaagtaaagcaacactggcttcatttttcgtttattgtataaacatgcttcctgccatattacttatgatttttgctcaggaagttttggaaaatatgggcaaaagcaatggcttttatatagtattctcagttttgattttgatagcaatgtatattttgctttctatcgaatacgataaattatataacacaacctatcaagaaagtgcagatttaagaataaggacagcggagaatttatcaaaattacctctatcttacttttctaaacatgacatttccgacatttcacaaacaatcatggctgatattgaaggcatagagcatgcaatgagccactcaataccaaaggtgggcggcatggtactgtttttcccattaatatctgtaatgatgctagcgggcaatgtcaagatgggtttagctgtaattattccatctattttaagctttatatttatacctttatctaaaaaatatcaggttaatggacagaatagatattatgatgtcttaagaaaaaactcagaaagctttcaagaaaatatcgaaatgcaaatggagattaaagcatataatttatcgaaggatattaaagatgacttatataaaaaaatggaagatagtgagaaagtacacttaaaggcggaagtaactacaattttaactttgtctatatcttcaatatttagctttatatctcttgctgttgtgatatttgtcggcgtaaatctaattattaataaagagataaattctctctaccttataggatatttactagctgctatgaagataaaagactctttagatgcatctaaagagggcttgatggaaatattttatttatcgcccaaaatagaaagattaaaagaaattcaaaatcaagatttacaagaaggcgatgactatagcttaaaaaaatttgatattgatctaaaagatgttgagtttgcctacaataaagacgcaaaagttttaaatggtgtaagttttaaagctaagcagggagaggtcactgctttggtaggtgcaagtggctgcggtaaaacaactatcttgaaacttatatcaagactttatgattatgacaagggacaaatcttaatcgatggcaaagatataaaggaaatatcaacagaatccctttttgataaggtgtctattgttttccaagatgtggttctctttaatcaaagcgttatggaaaatattagaatcggtaagcaagatgcaagtgacgaagaggttaaaagagcagcaaaacttgcaaattgcacagattttatagaaaaaatggataaaggtttcgatacagttattggtgaaaacggagctgagctatcaggaggagaaagacaaagattatcaatagccagagccttcttaaaagatgcgccgatattgatcttagatgagataacagcaagccttgatgttaacaacgagaaaaagattcaagagtctttaaataatttagttaaagataaaactgttgtaatcatttcacatagaatgaaatccatagaaaatgcagacaagatagtagttcttcaaaacggaagagtagaaagcgaaggtaagcatgaagagcttttacaaaaatcaaaaatttacaaaaatttaatagaaaagacaaaaatggcagaagaatttatttat

SEQ ID NO: 2918 - protein, 581 aa, Streptococcus pneumoniae
  ABC transporter, ATP-binding protein; Cellular location: membrane; Similar to strain R6 sequence 15903333 (0.E+01)
MRMNGGFQMKEFYKKRFALTDGGARNLSKATLASFFVYCINMLPAILLMIFAQEVLENMGKSNGFYIVFSVLILIAMYILLSIEYDKLYNTTYQESADLRIRTAENLSKLPLSYFSKHDISDISQTIMADIEGIEHAMSHSIPKVGGMVLFFPLISVMMLAGNVKMGLAVIIPSILSFIFIPLSKKYQVNGQNRYYDVLRKNSESFQENIEMQMEIKAYNLSKDIKDDLYKKMEDSEKVHLKAEVTTILTLSISSIFSFISLAVVIFVGVNLIINKEINSLYLIGYLLAAMKIKDSLDASKEGLMEIFYLSPKIERLKEIQNQDLQEGDDYSLKKFDIDLKDVEFAYNKDAKVLNGVSFKAKQGEVTALVGASGCGKTTILKLISRLYDYDKGQILIDGKDIKEISTESLFDKVSIVFQDVVLFNQSVMENIRIGKQDASDEEVKRAAKLANCTDFIEKMDKGFDTVIGENGAELSGGERQRLSIARAFLKDAPILILDEITASLDVNNEKKIQESLNNLVKDKTVVIISHRMKSIENADKIVVLQNGRVESEGKHEELLQKSKIYKNLIEKTKMAEEFIY

SEQ ID NO: 2919 - DNA, 627 bp, Streptococcus pneumoniae
atggataataaaaaattaaaagtaaaagatttagtaagcatcggtgtttttggcgtaatttattttgccttcatgtttggagttggtatgatgggcttgattccaatattgttcttaatatacccgacagtattagccatagttgcaggaactgttgttatgttatttatggctaaggttcaaaagccatgggcactatttatatttggtatgatatcaccacttgtgatgtttgcagctggtcatacctacgtagttgtggttttatcacttatagtaatgataatagcagaattaattagaaagattggtaattataattcatttaaatacaatatgctttcttatgcaatcttcagcacatggatatgtagctctttaatgcaaatgcttttagcaaaagaaaaatatatggagtggtctttgatgactatgggaaaagattatgttgatgtattagaaaagttaataacttatcctcacatggctttagtagccttaggtgctttcttaggaggaattcttggagcatatataggcaaggctctattgaaaaaacacttttcaaatggattatattgtgtgggatactttactccttgcctaattttatggtgctatctgaat

SEQ ID NO: 2920 - protein, 209 aa, Streptococcus pneumoniae
  hypothetical protein; Cellular location: membrane; Similar to strain R6 sequence 15903334 (e-104)
MDNKKLKVKDLVSIGVFGVIYFAFMFGVGMMGLIPILFLIYPTVLAIVAGTVVMLFMAKVQKPWALFIFGMISPLVMFAAGHTYVVVVLSLIVMIIAELIRKIGNYNSFKYNMLSYAIFSTWICSSLMQMLLAKEKYMEWSLMTMGKDYVDVLEKLITYPHMALVALGAFLGGILGAYIGKALLKKHFSNGLYCVGYFTPCLILWCYLN

SEQ ID NO: 2921 - DNA, 441 bp, Streptococcus pneumoniae
atgtttttgagtatacctattgttattagaatgtttattttaccatttatggcagcaagctttatgataaagacctcggatgtaggcgcaataatttcatcgatggataagcttaagatttcaaagaatgtatccatacctattgcggttatgtttagattcttcccatcttttaaggaggagaagaaaaacatcaaaatggctatgagagtaagagggataaattttaaaaacccagtcaaatatcttgaatatgtttctgtgccactactcattatatcatctaatatatcagatgacattgcaaaagcggcagaaacaaaggcaatagaaaatccaattgccaagaccagatacattcgcgtaaagatacagctaattgattttgtttatgttttagcggttgctggacttattgtgggaggcttaatatggttgaaa

SEQ ID NO: 2922 - protein, 147 aa, Streptococcus pneumoniae
  conserved domain protein; Cellular location: membrane; Similar to strain R6 sequence 15903335 (1.E-76)
MFLSIPIVIRMFILPFMAASFMIKTSDVGAIISSMDKLKISKNVSIPIAVMFRFFPSFKEEKKNIKMAMRVRGINFKNPVKYLEYVSVPLLIISSNISDDIAKAAETKAIENPIAKTRYIRVKIQLIDFVYVLAVAGLIVGGLIWLK

SEQ ID NO: 2923 - DNA, 1122 bp, Streptococcus pneumoniae
atggttgaaataaaaaatttaagtcttgattatggtgaagagcatatattagatgatatatcactatccatagccgagggagagtgcgtgctatttacaggaaaaagtggaaatggtaagtcatctttaataaattcaatcaatggactagctgtaaggtatgataacgcaaagacaaagggcgaaataattattgatggtaagaatataaaaaatttggaactttatcaaatctcaatgcttgtttcaactgtttttcaaaatcctaagacatatttttttaatgtcaatacgacattagaattattattttatttggaaaatatcggtcttgcaagagaagagatggacaggcgtttgaaggatatacttgagatattcccgataaaaaatcttttgaacagaaatatatttaatctatccggcggtgaaaaacaaattctttgcattgcagcttcttatatagcaggtacaaagattatagttatggatgagccttcatcgaatttagatattaaaagcataagtgttttggcaaagatgctaaagatattaaaagagaaaggcataagcataattgttgcagagcatagaatttattatttgatggacatagttgaccgtgtatttttaatagataaaggaaagcttaaaaaaacttatactagaagtgaatttttaaagctagataaaaatgaattaaatgctttaagtttaagagataaagaattaagtaaattaaaagttccttatttaaaagaaggtggagagtatcagataaaaaatcttagttacaaatttactgatgatgagtgtttaagcttaaaagatatttcgttcaagcttgggaaaatttatggcataataggatccaacggacgaggaaaatcaacgcttttaagatgtttaataggtcttgagaaaaaatcaaaagaagaaatttattttaagggagagaagctatctaaaaaagaaagactcaaaaactcttcacttgttatgcaagatgtaaatcatcaattattcacagatgaagtattcaacgagcttagattaggagtaaagaattttgatgaagaaaaggcgaaaatcattttaaaccccaattattcaccccaaatc

SEQ ID NO: 2924 - protein, 374 aa, Streptococcus pneumoniae
  ABC transporter, ATP-binding protein; Cellular location: membrane; Similar to strain R6 sequence 15903336 (0.E+01)
MVEIKNLSLDYGEEHILDDISLSIAEGECVLFTGKSGNGKSSLINSINGLAVRYDNAKTKGEIIIDGKNIKNLELYQISMLVSTVFQNPKTYFFNVNTTLELLFYLENIGLAREEMDRRLKDILEIFPIKNLLNRNIFNLSGGEKQILCIAASYIAGTKIIVMDEPSSNLDIKSISVLAKMLKILKEKGISIIVAEHRIYYLMDIVDRVFLIDKGKLKKTYTRSEFLKLDKNELNALSLRDKELSKLKVPYLKEGGEYQIKNLSYKFTDDECLSLKDISFKLGKIYGIIGSNGRGKSTLLRCLIGLEKKSKEEIYFKGEKLSKKERLKNSSLVMQDVNHQLFTDEVFNELRLGVKNFDEEKAKIILNPNYSPQI

SEQ ID NO: 2925 - DNA, 1344 bp, Streptococcus pneumoniae; identical to SEQ ID NO: 517

SEQ ID NO: 2926 - protein, 448 aa, Streptococcus pneumoniae; identical to SEQ ID NO: 486
  IS1380-Spn1, transposase; Cellular location: cytoplasm; Similar to strain R6 sequence 15903941 (2.E-46)

SEQ ID NO: 2927 - DNA, 225 bp, Streptococcus pneumoniae
atgagtttatcaggagggcaaaagcaaaggcttgcaatagcatctgttatgtgcaagaattctccatttgtcttttttgacgaaccttcaagtggtatggattattccaatatgataaaaatatctgaactgattaataagtataaaaccatggataaaataatttttattgtttcccatgatatagaatttttaaatgaagtggcagatgaaatttttgaattg

SEQ ID NO: 2928 - protein, 75 aa, Streptococcus pneumoniae
  ABC transporter, ATP-binding protein, fragment; Cellular location: lipoprotein; Similar to strain R6 sequence 15904024 (e-149)
MSLSGGQKQRLAIASVMCKNSPFVFFDEPSSGMDYSNMIKISELINKYKTMDKIIFIVSHDIEFLNEVADEIFEL

SEQ ID NO: 2929 - DNA, 447 bp, Streptococcus pneumoniae
ttggtaaactgcgaacagctagaagcttatcgtcaactggaagaagctgcacttgttggatgttgggcgcatgtgagaaggaagttttttgaagtgccccccaagcaagcagataaatcatccttaggagctaaaggtttagcttattgtgatcagttattttccttggaaagagactgggaggctttgccagctgatgaacgactacagaaacgtcaagaacatctccagcccctaatggaagacttctttgcttggtgccgccgtcagtcagttttagcaggttcaaaactaggaagggcaattgaatacagcctcaagtatgaagaaacctttaagactattttgaaagacggacatctggtcctttccaataatctagctgaacgcgccattaaatcattggttatgggacggagtaaaagagtccagtggactcttttagcc

SEQ ID NO: 2930 - protein, 149 aa, Streptococcus pneumoniae
  conserved hypothetical protein
MVNCEQLEAYRQLEEAALVGCWAHVRRKFFEVPPKQADKSSLGAKGLAYCDQLFSLERDWEALPADERLQKRQEHLQPLMEDFFAWCRRQSVLAGSKLGRAIEYSLKYEETFKTILKDGHLVLSNNLAERAIKSLVMGRSKRVQWTLLA

SEQ ID NO: 2931 - DNA, 1317 bp, Streptococcus pneumoniae
atggaaaatcctctgagaaaagtgtttgcccatctggacaactcagtctttttgaagaggaacaaaatatggaagaagactctgacttacccagttgaaagagaagaaatcacctataaacgtaagaaagctaaagggaaacgtcaagctcttcttgcccaatttgattcagaagaagttcatcatcaagtagaagagagcatttgccctgattgtcagggagatctaaaagagattggagcaacccttcaacgacaagaattagtctttattcctgcgcaattaaaacgaatagatcatatccaacacgcttataagtgccaagcatgcagtgataaaaatccgagtgataaaatcgtgaaagctcctattcctaaagcccctttggcgcatagccttggctcagcttctattatcgctcacaccatccatcagaagtttaatctgaaggtacccaattatcgccaagaagaagattgggctaagatgggtttaccaatcacacgtaaggaaattgctaattggcatatcaaggcgagtcaatactatttggagcccctttataatcttttacgagaaaagttgttagaacaagctcttcttcatgcggatgaaacctcttatcgggttctagagagtgatagtcagttgccttactattggacttttttgtctgggaaagctgagaatcaagcaatcacgctgtaccaccatgatcagcgtcggagtggtttagtagtacaagaattcctaggagattattctggctatgttcattgtgacatgttgcggcagtaacttaggactttagtcctctagttctgcctatgcgatagcagtccaaggtttaggagtaaggcgacgctaagcttggtaaactgcgaacagctagaagcttatcgtcaactggaagaagctgcacttgttggatgttgggcgcatgtgagaaggaagttttttgaagtgccccccaagcaagcagataaatcatccttaggagctaaaggtttagcttattgtgatcagttattttccttggaaagagactgggaggctttgccagctgatgaacgactacagaaacgtcaagaacatctccagcccctaatggaagacttctttgcttggtgccgccgtcagtcagttttagcaggttcaaaactaggaagggcaattgaatacagcctcaagtatgaagaaacctttaagactattttgaaagacggacatctggtcctttccaataatctagctgaacgcgccattaaatcattggttatgggacggagtaaaagagtccagtggactcttttagcc

SEQ ID NO: 2932 - protein, 146 aa, Streptococcus pneumoniae
  IS66 family element, Orf3, degenerate
MKAPIPKAPLAHSLGSASIIAHTIHQKFNLKVPNYRQEEDWAKMGLPITRKEIANWHIKASQYYLEPLYNLLREKLLEQALLHADETSYRVLESDSQLPYYWTFLSGKAENQAITLYHHDQRRSGLVVQEFLGDYSGYVHCDMLRQ

SEQ ID NO: 2933 - DNA, 192 bp, Streptococcus pneumoniae
ttgaaaatcattcaacaacagagtgctacaattgatagtctcaccaatgaacttgcccttcttcgtgaacaagtggcttatctaacgcaaaagctctatggaaaatcctctgagaaaagtgtttgcccatctggacaactcagtctttttgaagaggaacaaaatatggaagaagactctgacttacccagt

SEQ ID NO: 2934 - protein, 64 aa, Streptococcus pneumoniae
  hypothetical protein
MKIIQQQSATIDSLTNELALLREQVAYLTQKLYGKSSEKSVCPSGQLSLFEEEQNMEEDSDLPS

SEQ ID NO: 2935 - DNA, 348 bp, Streptococcus pneumoniae
atgacaattcatctatctagcctagggcaggtctatctcgtatgtgggaaaacggatatgaggcaaggcattgattcattggcttatctggttaaaacccactttgaattagatcctttctccggtcaagtttttctcttttgtggtggacgtaaagaccgctttaaagccctttactgggatggtcaaggattttggctactatataaacgctttgagaacggaaaactgacttggcccagtacagaaaaggatgtcaaagctctcacacctgaacaagtagattggcttatgaagggcttttctatcactccaaaaataaatttatcagaaagtcgtgatttctat

SEQ ID NO: 2936 - protein, 116 aa, Streptococcus pneumoniae
  IS66 family element, Orf2; Cellular location: cytoplasm; Similar to strain R6 sequence 15903341 (4.E-67)
MTIHLSSLGQVYLVCGKTDMRQGIDSLAYLVKTHFELDPFSGQVFLFCGGRKDRFKALYWDGQGFWLLYKRFENGKLTWPSTEKDVKALTPEQVDWLMKGFSITPKINLSESRDFY

SEQ ID NO: 2937 - DNA, 237 bp, Streptococcus pneumoniae
atggagttcctcctgtatactattagtaaagtaaaactattggaggatattttaatgccacaacctattgttcctgtagagattccacaatctcgtcgttttgattctaaaaagagaaatgatattctgcttaaaattcgtattggcaagcttgaagtaagtttttttcaatctctcaatctcgaaatggtagaacagcttttggataaagtgttgctctatgacaattcatctatc

SEQ ID NO: 2938 - protein, 79 aa, Streptococcus pneumoniae
  IS66 family element, Orf1; Cellular location: cytoplasm; Similar to strain R6 sequence 15903342 (1.E-38)
MEFLLYTISKVKLLEDILMPQPIVPVEIPQSRRFDSKKRNDILLKIRIGKLEVSFFQSLNLEMVEQLLDKVLLYDNSSI

SEQ ID NO: 2939 - DNA, 1254 bp, Streptococcus pneumoniae; identical to SEQ ID NO: 2539

SEQ ID NO: 2940 - protein, 418 aa, Streptococcus pneumoniae; identical to SEQ ID NO: 2540
  IS1167, transposase; Cellular location: cytoplasm; Similar to strain R6 sequence 15903343 (0.E+01)

SEQ ID NO: 2941 - DNA, 1560 bp, Streptococcus pneumoniae
atgagcaacatttcaactgatttgcaagatgtagaaaaaatcatcgtattggactatggtagccagtacaaccagctgatttcacgccgtatccgtgagattggtgttttttcagaactaaaaagccataaaatttcagctgctgaagttcgtgaagtcaatcctgtaggaattattctatcaggtggtccaaattctgtatatgaagatggttcatttgatattgacccagaaatcttcgaactcggaattccaattttgggaatctgttatggtatgcagttattgacccataaacttggaggaaaagttgttcctgcaggtgatgctggaaatcgtgaatacggtcaatcaaccctaactcacacaccatcagcgctttttgaatcaacacctgatgaacagactgttttgatgagccatggtgatgcggttactgagattcctgctgactttgttcgtacaggtacatcagctgactgcccatacgcagccatcgaaaacccagataaacacatttacggtatccaattccacccagaagttcgtcattctgtatacggaaatgatatccttcgtaactttgcccttaacatttgtaaggctaaaggtgactggtcaatggataatttcattgacatgcagatcaaaaaaattcgtgaaaccgtcggtgataaacgtgtccttcttggtctatcaggtggtgttgactcatctgtcgttggggttcttctccaaaaagcgattggcgatcaattgatctgtatcttcgtagaccacggtcttcttcgtaaaggcgaagctgatcaagttatggacatgctcggtggtaagtttggtttgaatatcgtcaaagcagacgctgctaaacgtttccttgacaaacttgctggcgtttctgaccctgaacaaaaacgtaaaatcatcggtaacgagtttgtctatgtattcgatgacgaagcaagcaagctcaaagatgtgaaattccttgctcaaggtactttatatacagatgttatcgagtctggtacggatacagctcaaactatcaagtcacaccacaacgtgggtggtcttccagaagatatgcagtttgaattgattgaaccactcaatactctttacaaggatgaagttcgtgctcttggtacagagcttggtatgccagaccatatcgtatggcgccaaccattcccaggaccaggacttgctatccgtgtcatgggtgaaatcactgaagagaaacttgaaaccgttcgtgaatcagacgctattcttcgtgaagaaatcgctaaagctggacttgaccgcgatatttggcaatacttcactgttaacacaggcgttcgttcagtcggtgttatgggtgacggtcgtacgtatgactacacgattgcaatccgtgctatcacttctatcgatggtatgactgctgattttgccaaaattccatgggaagtacttcaaaaaatctcagtacgtatcgtaaatgaagtggatcatgttaaccgtatcgtctacgatattacaagtaaaccacctgcaacagttgagtgggaa

SEQ ID NO: 2942 - protein, 520 aa, Streptococcus pneumoniae
  GMP synthase (guaA); Cellular location: membrane; Similar to strain R6 sequence 15903580 (8.E-38)
MSNISTDLQDVEKIIVLDYGSQYNQLISRRIREIGVFSELKSHKISAAEVREVNPVGIILSGGPNSVYEDGSFDIDPEIFELGIPILGICYGMQLLTHKLGGKVVPAGDAGNREYGQSTLTHTPSALFESTPDEQTVLMSHGDAVTEIPADFVRTGTSADCPYAAIENPDKHIYGIQFHPEVRHSVYGNDILRNFALNICKAKGDWSMDNFIDMQIKKIRETVGDKRVLLGLSGGVDSSVVGVLLQKAIGDQLICIFVDHGLLRKGEADQVMDMLGGKFGLNIVKADAAKRFLDKLAGVSDPEQKRKIIGNEFVYVFDDEASKLKDVKFLAQGTLYTDVIESGTDTAQTIKSHHNVGGLPEDMQFELIEPLNTLYKDEVRALGTELGMPDHIVWRQPFPGPGLAIRVMGEITEEKLETVRESDAILREEIAKAGLDRDIWQYFTVNTGVRSVGVMGDGRTYDYTIAIRAITSIDGMTADFAKIPWEVLQKISVRIVNEVDHVNRIVYDITSKPPATVEWE

SEQ ID NO: 2943 - DNA, 705 bp, Streptococcus pneumoniae
gtgaaaaatatgctacctgcttatataaaaatccatgatcagataaaaaaggatattgacgagtaccgttgggctattggtgagaggcttcccagtgaaagagatttagctgagcagtttgcggtcagtcgcatgaccctccgccaagccgtatctctattagtcgaagaaggcgtcttagagcgccgtgtaggaagcggcacctttgtttccagtactcgagtacaagaaaagatgcgagggacaaccagttttactgaaattgtcaaatcccaaggtaaagttccctctagccagctcatttcctacaaaaaaaccattcccaatgagcaagaagttgccaagctaggaatttttccaacggacaatattatccgaatggagcgggtccgctatgccgaccaagttcccctagtttatgaagttgcttctattcctgaaaaattcattaaggactttaaaaaagaagaaatcaccagtcatttcttccaaaccttgcaaaaacatggctatcgtatcggcaaatctcaacagaccatctatgctcgccttgctaaagaaaagattgcccactatttggaagttgaaaaaggacatgctattcttggattgacccaggtttcctacctagaagatggtactgcttttgaatacgtaaaaagtcaatatgtaggcgaacgctttgaattttatcttgaaaataat

SEQ ID NO: 2944 - protein, 235 aa, Streptococcus pneumoniae
  transcriptional regulator, GntR family; Cellular location: cytoplasm; Similar to strain R6 sequence 15903344 (e-131)
MKNMLPAYIKIHDQIKKDIDEYRWAIGERLPSERDLAEQFAVSRMTLRQAVSLLVEEGVLERRVGSGTFVSSTRVQEKMRGTTSFTEIVKSQGKVPSSQLISYKKTIPNEQEVAKLGIFPTDNIIRMERVRYADQVPLVYEVASIPEKFIKDFKKEEITSHFFQTLQKHGYRIGKSQQTIYARLAKEKIAHYLEVEKGHAILGLTQVSYLEDGTAFEYVKSQYVGERFEFYLENN

SEQ ID NO: 2945 - DNA, 894 bp, Streptococcus pneumoniae
atgtcaaatagtttaaaagggactttactaacagttgtggctggtattgcttgggggttgtcaggaacgagtggccaatacctaatggcacacggaatttcggctctggtcttgactaacttgcgtcttttaatcgctggtggaattctcatgctcttggcttatgctactgcaaaggataaaatactggtctttttaaaggatagaaagagtttgctgtctcttcttatttttgctctgattggtctttttctcaaccaattcgcctatctgtctgctattcaggagaccaatgcgggaacagcgacggtgcttcagtatgtttgtcctgtcggaattttaatttatagctgtatcaaggatagggtggcaccgacactgggagagatagtttccatcatattcgccatcggaggaaccttcctgatcgcaacacatgggcagttggaccagttatccatgacacctgctggtctgttctggggtctcttttctgccttgacttatgctctgtatatcattttacccatagccttgattaaaaagtgggggagcagcttggtcattggtgtgggaatggtcatagcaggtttggtcgcccttccttttacaggggttctacaggccgatatcccgactagtcttgattttctccttgcgtttgcaggcattatccttatcgggactgtctttgcctatacagctttccttaaaggagccagtctgataggaccggtcaagtcaagcttgttggcttcaattgagccaatatcggcgattttctttgccttcttaataatgaatgaacaattttatcccattgattttcttggtatggcaatgatattgtttgctgtaactttgatttctttgaaagatttattcttagaaaaa

SEQ ID NO: 2946 - protein, 298 aa, Streptococcus pneumoniae
  membrane protein; Cellular location: membrane; Similar to strain R6 sequence 15903345 (e-163)
MSNSLKGTLLTVVAGIAWGLSGTSGQYLMAHGISALVLTNLRLLIAGGILMLLAYATAKDKILVFLKDRKSLLSLLIFALIGLFLNQFAYLSAIQETNAGTATVLQYVCPVGILIYSCIKDRVAPTLGEIVSIIFAIGGTFLIATHGQLDQLSMTPAGLFWGLFSALTYALYIILPIALIKKWGSSLVIGVGMVIAGLVALPFTGVLQADIPTSLDFLLAFAGIILIGTVFAYTAFLKGASLIGPVKSSLLASIEPISAIFFAFLIMNEQFYPIDFLGMAMILFAVTLISLKDLFLEK

SEQ ID NO: 2947 - DNA, 933 bp, Streptococcus pneumoniae
atgaagtggaccaagattattaaaaaaatagaagaacaaatcgaggcagggatttatcccggagcctcttttgcgtattttaaggacaatcaatggacagagttctatttaggccagagtgacccagagcatggcttgcagactgaggcaggactagtttatgacctagctagtgtcagcaaggttgttggggttggcacagtttgtaccttcttgtgggaaataggtcaattagatattgatagactggtaatagattttttacctgagagtgattatccagacatcactattcgccagctcttgactcatgcaacagaccttgatccttttattcctaatcgtgatcttttaacagcccctgaattaaaggaagcgatgtttcatctcaacagacgaagtcagccagcctttctttattcggatgtccattttttgctgttgggctttattttggaaagaatttttaatcaagatttggatgtgattttaaaggatcaagtctggaaaccttggggaatgacggaaactaagtttgggccagttgagcttgctgttccaacagttagaggtgtagaggcaggcatagtgcatgatcccaaggctcgtctcctgggtagacatgctgggagtgctggtttattttcgactataaaggatttacaaatctttttagaacactatttagcagatgattttgcaagagacttaaatcaaaatttttctcctttggatgacaaggaacgttctttagcatggaatttggaaggagattggctagaccatacgggctatacaggtacctttatcatgtggaatcgtcagaagcaagaagccactattttcctatcgaatcgtacctatgaaaaggacgagagagctcaatggatattagaccgcaatcaagtgatgaacttgattcgcaaagaagag

SEQ ID NO: 2948 - protein, 311 aa, Streptococcus pneumoniae
  conserved hypothetical protein; Cellular location: membrane; Similar to strain R6 sequence 15903346 (0.E+01)
MKWTKIIKKIEEQIEAGIYPGASFAYFKDNQWTEFYLGQSDPEHGLQTEAGLVYDLASVSKVVGVGTVCTFLWEIGQLDIDRLVIDFLPESDYPDITIRQLLTHATDLDPFIPNRDLLTAPELKEAMFHLNRRSQPAFLYSDVHFLLLGFILERIFNQDLDVILKDQVWKPWGMTETKFGPVELAVPTVRGVEAGIVHDPKARLLGRHAGSAGLFSTIKDLQIFLEHYLADDFARDLNQNFSPLDDKERSLAWNLEGDWLDHTGYTGTFIMWNRQKQEATIFLSNRTYEKDERAQWILDRNQVMNLIRKEE

SEQ ID NO: 2949 - DNA, 738 bp, Streptococcus pneumoniae
gtgacggaggaatttatgaatgtaaatcagattgtacggattattcctactttaaaagctaataatagaaaattaaatgaaacattttatattgaaacccttggaatgaaggccttgttagaagaatcggcctttctgtcactaggtgaccaaacgggtcttgaaaagctggttttagaagaagctcccagtatgcgtactcgtaaggtagagggaagaaaaaaactagctagattgattgtcaaggtggaaaatcccttagaaattgaaggaatcttatctaaaacagattcgattcatcgattatataaaggtcaaaatggctacgcttttgaaattttctcaccagaagatgatttgattttgattcatgcggaagatgacatagcaagtctagtagaagtaggagaaaagcctgaatttcaaacagatttggcatcaatttctttaagtaaatttgagatttctatggaattacatctcccaactgatatcgaaagtttcttggaatcatctgaaattggggcatcccttgattttattccagctcaggggcaggatttgactgtggacaatacggttacctgggacttatctatgctcaagttcttggtcaatgaattagacatagcaagtcttcgccagaagtttgagtctactgaatattttattcctaagtctgaaaaattcttccttggtaaagatagaaataatgttgaattgtggtttgaagaagta

SEQ ID NO: 2950 - protein, 246 aa, Streptococcus pneumoniae
  cppA protein (cppA); Cellular location: cytoplasm; Similar to strain R6 sequence 15903347 (e-134)
MTEEFMNVNQIVRIIPTLKANNRKLNETFYIETLGMKALLEESAFLSLGDQTGLEKLVLEEAPSMRTRKVEGRKKLARLIVKVENPLEIEGILSKTDSIHRLYKGQNGYAFEIFSPEDDLILIHAEDDIASLVEVGEKPEFQTDLASISLSKFEISMELHLPTDIESFLESSEIGASLDFIPAQGQDLTVDNTVTWDLSMLKFLVNELDIASLRQKFESTEYFIPKSEKFFLGKDRNNVELWFEEV

SEQ ID NO: 2951 - DNA, 633 bp, Streptococcus pneumoniae
gtggcagtacagttattagaaaattggctcctaaaggaacaagaaaaaattcaaactaagtatcgtcacctaaatcacatttctgttgtagaaccaaacattctttttattggggattccattgtcgagtattatcctctacaggagctatttgggacttcaaagacgattgtcaatcgaggaattcgtggctatcagacaggactgttactagagaaccttgatgctcatctatatggtggagcagtagataaaatttttcttctgattgggacaaatgatatcggaaaggatgttcctgtgaatgaggctctcaataatctcgaagctatcattcaatccgttgctcgcgattatccattgacagagattaaattgctttccattttgcctgtcaatgagagagaggagtaccagcaggcagtctatatccgctcgaatgaaaaaattcagaactggaatcaagcctatcaagagcttgcatctgcctatatgcaggtggaatttgtgccagtatttgattgtttgacagaccaagcaggccaactcaaaaaagaatatacaactgatggactgcacctcagtattgctggttatcaggctttgtcaaaatccttgaaagactatctttac

SEQ ID NO: 2952 - protein, 211 aa, Streptococcus pneumoniae
  platelet activating factor, putative; Cellular location: cytoplasm; Similar to strain R6 sequence 15903348 (e-119)
MAVQLLENWLLKEQEKIQTKYRHLNHISVVEPNILFIGDSIVEYYPLQELFGTSKTIVNRGIRGYQTGLLLENLDAHLYGGAVDKIFLLIGTNDIGKDVPVNEALNNLEAIIQSVARDYPLTEIKLLSILPVNEREEYQQAVYIRSNEKIQNWNQAYQELASAYMQVEFVPVFDCLTDQAGQLKKEYTTDGLHLSIAGYQALSKSLKDYLY

SEQ ID NO: 2953 - DNA, 825 bp, Streptococcus pneumoniae
atgatgattaaggtaattgcgacagatatggatgggaccttgctggatgctagaggtcagcttgatctcccacgattggaaaagattttagatcagttggatcaaaggggcattcgttttgtcattgcgacgggcaatgaaattcaccgcatgagacaactactgagtcccttggtggatcgagtggttctggttgttgctaatggcgctcgtatttttgaaaacaatgaattgattcaggctcagacatgggatgacgccattgtcaacaaggctttgactcatttcaagggtcgagcgtgtcaggaccagtttgttgtaacggggatgaagggtgattttgtcaaggaaggtacgatttttacagatcttgaaagttttatgactccagaaatgattgaaaaattctaccaacggatgcaatttgtggatgaattaacatctgacctctttggtggtgtgctcaagatgagcatggttgttggtgaggaacgtttgagttcggttttggaagaaatcaatgctctctttgatggccgtgtccgagctgtatccagtggctatggttgcattgatatcctccaagctgggattcataaagcatggggcttggaggaattactcaagcgctgggacttgaaatcccaagaaatcatggcttttggtgatagtgaaaatgatgttgaaatgcttgaaatggctggaattgcctatgcgatggaaaatgctgatgagaaagccaaagctgtggcgactgctctagcaccagccaacagccaaggaggagtttatcaagtcttggaaaactggttagaaaaaggagaa

SEQ ID NO: 2954 - protein, 275 aa, Streptococcus pneumoniae
  Cof family protein; Cellular location: cytoplasm; Similar to strain R6 sequence 15903349 (e-155)
MMIKVIATDMDGTLLDARGQLDLPRLEKILDQLDQRGIRFVIATGNEIHRMRQLLSPLVDRVVLVVANGARIFENNELIQAQTWDDAIVNKALTHFKGRACQDQFVVTGMKGDFVKEGTIFTDLESFMTPEMIEKFYQRMQFVDELTSDLFGGVLKMSMVVGEERLSSVLEEINALFDGRVRAVSSGYGCIDILQAGIHKAWGLEELLKRWDLKSQEIMAFGDSENDVEMLEMAGIAYAMENADEKAKAVATALAPANSQGGVYQVLENWLEKGE

SEQ ID NO: 2955 - DNA, 297 bp, Streptococcus pneumoniae
atgggagatgaagagaatgctaagtggactgaacgtggtgttctcatggatgtcaccatcaagaagaaggatggaaaaacaactatcggaacagctaaagctcatcctacttgggtcaatcgaacaccaaagggaaccttttcaccagaaggatatcccttgtatcattaccaaacttatattttggaagattttatagaggatggcagtcatcgtgaccagttagatgaagcgactaaggaacgaattgatacagcctataaagaaatgaatgaacatgtgggattgaagtggtat

SEQ ID NO: 2956 - protein, 99 aa, Streptococcus pneumoniae
  hypothetical protein; Cellular location: cytoplasm; Similar to strain R6 sequence 15903350 (8.E-58)
MGDEENAKWTERGVLMDVTIKKKDGKTTIGTAKAHPTWVNRTPKGTFSPEGYPLYHYQTYILEDFIEDGSHRDQLDEATKERIDTAYKEMNEHVGLKWY

SEQ ID NO: 2957 - DNA, 510 bp, Streptococcus pneumoniae
atggatgctattaaggaggcaggttatcatgtgctggatttagctcataatcatattttggattcgcaaattgagggagttatttcaacggccgatattattgagaaagctggaatcactccaatcggagtttatacgcacgaaccacgtgatcaggctccgctggtcattaaggaagtgaatggtatcaaggttgcattgttagcctattcctatggtttcaatggaattgagcagtatatttctcaggaagactataatcgttatctttcagatttaaacgaagataagatgaaggttgaaattgaacgggcagagaaggaagcagatatcaccattatcatgcttcagatgggtgttgagtatcgattggaaccaactgaagaacaaaaagctctttatcacaagatgatcgatttgggagcggatattatctttggagggcatcctcacgttgttgaaccatctgaaacggttgaaaaagatggagataagaaactcattatctat

SEQ ID NO: 2958 - protein, 170 aa, Streptococcus pneumoniae
  capA-related protein; Cellular location: cytoplasm; Similar to strain R6 sequence 15903351 (2.E-95)
MDAIKEAGYHVLDLAHNHILDSQIEGVISTADIIEKAGITPIGVYTHEPRDQAPLVIKEVNGIKVALLAYSYGFNGIEQYISQEDYNRYLSDLNEDKMKVEIERAEKEADITIIMLQMGVEYRLEPTEEQKALYHKMIDLGADIIFGGHPHVVEPSETVEKDGDKKLIIY

SEQ ID NO: 2959 - DNA, 120 bp, Streptococcus pneumoniae
atggcccacggggatttgctctaccacgatggacttttcttttcagctaaaaaagaagacggtacctatgactttcatgaaaattttgagtatgtgactccttggctcaagcaaggggac

SEQ ID NO: 2960 - protein, 40 aa, Streptococcus pneumoniae
  hypothetical protein; Cellular location: cytoplasm
MAHGDLLYHDGLFFSAKKEDGTYDFHENFEYVTPWLKQGD

SEQ ID NO: 2961 - DNA, 189 bp, Streptococcus pneumoniae
gtgaaagaaatacttatctgtgatataataaaaagaaaaggcttgcataagaaagtagggagaacgaagatacaaagaagacaaaatcgaaatcagggtggtttagcttttcgttttatgaagggcttggtaaactttttaggagttatcgcaagtggagcaataagggatttgtggcgatactcttgc

SEQ ID NO: 2962 - protein, 63 aa, Streptococcus pneumoniae
  hypothetical protein; Cellular location: cytoplasm
MKEILICDIIKRKGLHKKVGRTKIQRRQNRNQGGLAFRFMKGLVNFLGVIASGAIRDLWRYSC

SEQ ID NO: 2963 - DNA, 609 bp, Streptococcus pneumoniae
atgtctgcaatagaacgtattacaaaagctgctcacttaattgatatgaacgatattatccgtgaagggaatcctactctacgcgcgattgctgaggaagtcactttccccctatctgaccaggaaatcatcctaggcgaaaagatgatgcaattccttaaacattcccaagatcctgtcatggctgaaaaaatgggactccgcggtggtgttggactggctgctccccagttagatatctcaaaacgcattatcgctgttttggtacctaatattgttgaagaaggcgaaactccacaggaagcctacgatttggaagccattatgtacaatccaaaaatcgtctctcactctgttcaagatgctgctcttggcgaaggagaaggttgcctgtctgttgaccgtaacgtgcctggctatgttgttcgccatgcccgcgttactgttgactactttgacaaagatggagaaaaacaccgtatcaaactcaaaggctacaactccattgttgttcagcatgaaattgaccacattaacggtatcatgttttacgatcgcatcaatgaaaaagacccatttgcagttaaagatggtttactgattcttgaa

SEQ ID NO: 2964 - protein, 203 aa, Streptococcus pneumoniae
  polypeptide deformylase (def); Cellular location: cytoplasm; Similar to strain R6 sequence 15903353 (e-113)
MSAIERITKAAHLIDMNDIIREGNPTLRAIAEEVTFPLSDQEIILGEKMMQFLKHSQDPVMAEKMGLRGGVGLAAPQLDISKRIIAVLVPNIVEEGETPQEAYDLEAIMYNPKIVSHSVQDAALGEGEGCLSVDRNVPGYVVRHARVTVDYFDKDGEKHRIKLKGYNSIVVQHEIDHINGIMFYDRINEKDPFAVKDGLLILE

SEQ ID NO: 2965 - DNA, 760 bp, Streptococcus pneumoniae
ttgcaagacggggttttgtgttataatagaggcatgaaaacaaatgatattgtctatggtgtccacgccgttaccgaagccctccttgcaaatacaggaaacaaactctacctccaagaagatctccgaggtaagaatgttgagaaagtcaaggaactagctacagaaaagaaggtgtccatttcttggacatcaaaaaaatctctctctgagattactgaaggtgctgttcatcaaggttttgttctacgagtgtctgaatttgcctatagcgagctagattacatccttgcaaaaacacgccaagaagaaaatccacttctattgattctagatggtctaaccgatccccataatctgggttctatcttgcgaacagccgatgcgaccaatgtttcaggtgtcatcattcccaagcaccgtactgtcggagtaactcctgtcgttgccaaaacagccacaggtgctattgaacacgttccaattgcccgagtgaccaacctcagtcaaaccttaggataaacttaaggatgaaggtttctggacctttggaacggatatgaacggtactccttgccacaagtggaatacaaaagggaaaatcgccctcatcattggaaatgaaggaaaaggtatctctagcaacatcaaaaaacaggtcgatgaaatgattaccattccgatgaatggacatgttcaaagccttaatgccagtgttgctgcggccattctcatgtacgaagttttccgaaatagacta

SEQ ID NO: 2966 - skipped

SEQ ID NO: 2967 - DNA, 909 bp, Streptococcus pneumoniae
atgtacgatactattattatcggtgctggacctgcagggatgactgcggccttgtatgctgctcgaagcaatctaaaagtagctttgattgaaggtggtctgccaggtggtcagatgaataatacatctgatatcgaaaattacccaggatacgctaatattagtggacctgaattggctgaaaagatgtttgaaccacttgaaaatcttggtgttgagcacatttatggttatgttgaaaatgtcgaagaccatggtgattttaagaaagtgatgactgatgaccaaacatatgaaacacgtacagttatcgtagcaactggttctaaacaccgtcctttgggagtgcctggagaagaagaactgaacagtcgtggtgtttcttactgtgctgtgtgtgatggtgctttcttccgtgaccaagatttattggtagttggtggtggagattcagctgttgaagaagccctcttcttgactcgttttgctaagactgttaccattgttcaccgtcgtgaccaacttcgtgcccaaaaggttttacaagatcgcgcctttgcgaatgaaaaaatcagctttatctgggattctgtagtaagggaaatcaagggtgaaaaccgagtagaatcagtcgtatttgaaaatgtgaaaacaggtcaagtgacagaacaagccttcggtggtgtctttatctatgttggtttggaccctcttagcgattttgttaaagaattgaatatccaagatcaggcaggatggattgtgacagataaccacatgaaaactgcagtcgacggtatctttgcagttggagatgttcgcttgaaagaccttcgccaagtaacaacagcggttggagatggagctatcgctggtcaagaagcctataaattcattacagaacatagt

SEQ ID NO: 2968 - protein, 303 aa, Streptococcus pneumoniae
  thioredoxin reductase (trxB); Similar to strain R6 sequence 15903354 (e-136)
MYDTIIIGAGPAGMTAALYAARSNLKVALIEGGLPGGQMNNTSDIENYPGYANISGPELAEKMFEPLENLGVEHIYGYVENVEDHGDFKKVMTDDQTYETRTVIVATGSKHRPLGVPGEEELNSRGVSYCAVCDGAFFRDQDLLVVGGGDSAVEEALFLTRFAKTVTIVHRRDQLRAQKVLQDRAFANEKISFIWDSVVREIKGENRVESVVFENVKTGQVTEQAFGGVFIYVGLDPLSDFVKELNIQDQAGWIVTDNHMKTAVDGIFAVGDVRLKDLRQVTTAVGDGAIAGQEAYKFITEHS

SEQ ID NO: 2969 - DNA, 234 bp, Streptococcus pneumoniae
atgagagaaatcatgctactgcaactattttctttatatttcgagagtttgatcttgaccaccatccttgttctgatttttttagggatttggattggtctgagagccatgtcgggagttgataagacagccagggctcgccaagcccatctctatgatatgattatgattggagtcttggttgtcccagtattatcctttgcggttatgagtttaattcttgttttcaaggca

SEQ ID NO: 2970 - protein, 78 aa, Streptococcus pneumoniae
  hypothetical protein; Cellular location: membrane; Similar to strain R6 sequence 15903356 (1.E-37)
MREIMLLQLFSLYFESLILTTILVLIFLGIWIGLRAMSGVDKTARARQAHLYDMIMIGVLVVPVLSFAVMSLILVFKA

SEQ ID NO: 2971 - DNA, 741 bp, Streptococcus pneumoniae
atgattaagatttcgaatttaagcaaatccttttcaggacagactgtcttggatcatctggacttggatattcaaaaaggggaagttgtagccttgattggttcttcaggagctggaaaatcaacctttcttcgcagtctcaattatcttgaaacacctgacagtggctctattcagattgatggtttttcagttgatttttctaaaatcactcaagaagaaatccttgccctacgtcgtaagttgtctatggttttccaacagtttaatttgtttgaacgccgaacagcacttgataatgtgaaagaaggcttggttgttgtcaagaaattatctgaccaagaagcgactaagattgccaaggaagagttggctaaggttgggctttcggaccgtgaaaaccattatcctcgccatttatcaggtggacagaagcaacgggttgccctagcgcgtgcgcttgctatgaaaccagatgttttgctcttagacgaaccaacttcagcccttgacccagaattggtcggtgaagtagaaaagtctattgcagatgctgctaagtcaggtcagaccatgattttggtcagtcatgacatgtcctttgtagcccaagttgcggataaaattctcttcttagataaggggaaaatcatcgagtctggaactccggatgagattatccacacccctaaagaagagcggacaaaagaattcttcgctagttacaaacggacttatatt

SEQ ID NO: 2972 - protein, 247 aa, Streptococcus pneumoniae
  amino acid ABC transporter, ATP-binding protein; Cellular location: cytoplasm; Similar to strain R6 sequence 15903357 (e-135)
MIKISNLSKSFSGQTVLDHLDLDIQKGEVVALIGSSGAGKSTFLRSLNYLETPDSGSIQIDGFSVDFSKITQEEILALRRKLSMVFQQFNLFERRTALDNVKEGLVVVKKLSDQEATKIAKEELAKVGLSDRENHYPRHLSGGQKQRVALARALAMKPDVLLLDEPTSALDPELVGEVEKSIADAAKSGQTMILVSHDMSFVAQVADKILFLDKGKIIESGTPDEIIHTPKEERTKEFFASYKRTYI

SEQ ID NO: 2973 - DNA, 798 bp, Streptococcus pneumoniae
atgaatgttacaacgattttagcatcagattggtaccaaaacttgatgcaattgattccggatggcaagctgtttagcctacgttcggtctttgatggaatccctagaattgtccaacaacttccaacaacaattatgttgacaattggtggtgccctttttggcttggttttggcgcttctttttgccattgtgaagatcaatcgtgtcaagattttatatcccttgcaggccttctttgttagtttcttaaaagggacaccgattttggtgcaactcatgttgacctactacggaatccctttggctttgaaagccctcaatcagcaatggggaactggtctcaatatcaatgcgattccagctgcagcttttgcgattgtcgcctttgcctttaatgaggcagcttatgctagtgaaaccattcgtgcagccattctctcagttaatcctggtgagattgaggcggcacgcagtctgggtatgacccgagcgcaagtttatcgacgagtgattattcctaatgcagcggtggtagctactccaaccttgattaattccctcatcggtttgaccaagggaacatctctagcttttagtgcgggtgttgtggaagtctttgcccaagctcagattctaggtggagctgattatcgctattttgaacgcttcatctccgttgcccttgtttattgggtagtcaatatcggaattgaaagcctcggtcgtttcatcgagagaaaaatggctatttctgcacctgatacagtgcaaacagatgtgaaaggagaccttcgt

SEQ ID NO: 2974 - protein, 266 aa, Streptococcus pneumoniae
  amino acid ABC transporter, permease protein; Cellular location: membrane; Similar to strain R6 sequence 15903358 (e-146)
MNVTTILASDWYQNLMQLIPDGKLFSLRSVFDGIPRIVQQLPTTIMLTIGGALFGLVLALLFAIVKINRVKILYPLQAFFVSFLKGTPILVQLMLTYYGIPLALKALNQQWGTGLNINAIPAAAFAIVAFAFNEAAYASETIRAAILSVNPGEIEAARSLGMTRAQVYRRVIIPNAAVVATPTLINSLIGLTKGTSLAFSAGVVEVFAQAQILGGADYRYFERFISVALVYWVVNIGIESLGRFIERKMAISAPDTVQTDVKGDLR

SEQ ID NO: 2975 - DNA, 354 bp, Streptococcus pneumoniae
atgttagaatttatcgaataccccaaatgttcaacttgtaaaaaagcaaaacaagaattaaatcaattaggtgtggactataaagccgtccatatcgtggaagaaacacctagccaagaagtcattttgaattggctagaaacctcaggatttgaattgaagcaatttttcaacaccagtggtatcaaataccgtgaattagggctaaaagataaggtaggaagtttgtcaaaccaagaagcggctgagttgctagcaagtgacggtatgttgttaaaacggcccattttagtagaaaatggaactgttaagcaaatcggttatcgaaaatcttatgaggaactgggactgaaa

SEQ ID NO: 2976 - protein, 118 aa, Streptococcus pneumoniae
  conserved hypothetical protein; Cellular location: cytoplasm; Similar to strain R6 sequence 15903359 (3.E-64)
MLEFIEYPKCSTCKKAKQELNQLGVDYKAVHIVEETPSQEVILNWLETSGFELKQFFNTSGIKYRELGLKDKVGSLSNQEAAELLASDGMLLKRPILVENGTVKQIGYRKSYEELGLK

SEQ ID NO: 2977 - DNA, 528 bp, Streptococcus pneumoniae
atgcaaaagaagtatgtaaaaatcctctactcctcaccaattggtattctatcacttgtagctgatgaccattatttgtatggaatttgggttcaggagcagaagcattttgagaggggactaggagatgaaacgatagaagaagttgttagtcatcctattttagacccagttattgcttgcttagatgattactttaaaggcaagcctcaggatttatccaacttgctcttggcgccaatcggaacgaattttgaaaagagagtttgggactatttacagggcattccttatggtcagacagtgacctatggacaaattgctcaagacctgcaagtggcttctgctcaagcaattggtggagcagtgggacgcaatccttggtctatcctagtaccttgtcatcgtgtgttgggagcaggcaagcgtctgacaggttatgctgcaggagtggaaaagaaagcttggctcttggagcatgaaggagtagattttaaagatagaagcaatagaaggagaagcacatgt

SEQ ID NO: 2978 - protein, 176 aa, Streptococcus pneumoniae
  methylated-DNA--protein-cysteine S-methyltransferase (ogt); Cellular location: outside; Similar to strain R6 sequence 15903360 (e-102)
MQKKYVKILYSSPIGILSLVADDHYLYGIWVQEQKHFERGLGDETIEEVVSHPILDPVIACLDDYFKGKPQDLSNLLLAPIGTNFEKRVWDYLQGIPYGQTVTYGQIAQDLQVASAQAIGGAVGRNPWSILVPCHRVLGAGKRLTGYAAGVEKKAWLLEHEGVDFKDRSNRRRSTC

SEQ ID NO: 2979 - DNA, 492 bp, Streptococcus pneumoniae
atggaaattcgtttagcttttccaaatgaagtagatgccatcatgcaggtgatggaggatgccaaaaaatgtttagcagatgctggtagtgaccagtggcaaaatggctatccaaatgcagatgttattatcgatgatatcatctcagggcaagcctacgtagccttggaagagggagaactgctagcctatgctgctgtgaccaagagtccagaggaggcctatgaagctatttatgagggaaactggcaagctggagagtcagagtatctagtctttcaccgtattgctgtggcagcagatgtgcagggaaaaggagttgctcaaaccttcttagagggcttgattgaaggttttgattatcttgattttcgctcagatacgcatgctgaaaacaaggttatgcaacatatttttgaaaaacttggttttaaacaagtcggtaagatgccagtagatggcgaacgcttggcctatcaaaaattaaagaaa

SEQ ID NO: 2980 - protein, 164 aa, Streptococcus pneumoniae
  acetyltransferase, GNAT family; Cellular location: cytoplasm; Similar to strain R6 sequence 15903361 (1.E-91)
MEIRLAFPNEVDAIMQVMEDAKKCLADAGSDQWQNGYPNADVIIDDIISGQAYVALEEGELLAYAAVTKSPEEAYEAIYEGNWQAGESEYLVFHRIAVAADVQGKGVAQTFLEGLIEGFDYLDFRSDTHAENKVMQHIFEKLGFKQVGKMPVDGERLAYQKLKK

SEQ ID NO: 2981 - DNA, 444 bp, Streptococcus pneumoniae
atgaaaactaccttttcctacccaaaatgggcagaaattccaaacattgacctctatctggaccaggttttgctctatgtcaatcaggtctgcgcccctatctctcctaataaagacaagggcctaacagcatctatggtcaacaattatgtgaaaaatggttacctgacaaagcctgacaaaaaaaaataccaacgccaacagattgcccgtttgattgctatcacaaccctcaagtctgtattttctattcaagaaatagcccagacacttaatactctacaaactcaagcaagttcagaccaactctacgatgcttttgtggactacatgaaccaaggaattgacccagctaaccctattatccaaaccagctgccaaaccgttaaactctatcatcaaactctagacttaatcgatcatactcaagaggaggtaatccaa

SEQ ID NO: 2982 - protein, 148 aa, Streptococcus pneumoniae
  hypothetical protein; Cellular location: cytoplasm; Similar to strain R6 sequence 15903362 (6.E-83)
MKTTFSYPKWAEIPNIDLYLDQVLLYVNQVCAPISPNKDKGLTASMVNNYVKNGYLTKPDKKKYQRQQIARLIAITTLKSVFSIQEIAQTLNTLQTQASSDQLYDAFVDYMNQGIDPANPIIQTSCQTVKLYHQTLDLIDHTQEEVIQ

SEQ ID NO: 2983 - DNA, 645 bp, Streptococcus pneumoniae
atgaacactagtcttaaactcagcaaacaactcagttttggagaggagattgctaatagcgtgacccatgctgtgggtgcagtcatcatgcttatcttgctgcctatttcatccatctatagttatgaagcacacggatttttatcctctatcggcgtttccattttcgtcatcagtctctttctcatgttcctatcatccaccatttatcactctatggcctatggttcgacccacaaatatgttttgcgaatcattgaccattctatgatttacgttgccattgccggctcatacacgcccgttgtcttgaccttgatgaataactggtttggctatctgattattgtcatccaatggggaacgaccatctttggtattctctataaaatctttgctaaaaaggtcaatgagaaatttagccttgctctttacctgattatgggctggttggttctggctatcattcctgccattatcagtcaaacgacacccgttttctggagtctcatggtaactggcggactctgttatacagttggagctggattttatgccaagaaaaaaccttatttccacatgatttggcatctctttatcctagctgcgtccgcacttcaatacatcgctattgtttattacatg

SEQ ID NO: 2984 - protein, 215 aa, Streptococcus pneumoniae
  hemolysin; Cellular location: membrane; Similar to strain R6 sequence 15903363 (e-121)
MNTSLKLSKQLSFGEEIANSVTHAVGAVIMLILLPISSIYSYEAHGFLSSIGVSIFVISLFLMFLSSTIYHSMAYGSTHKYVLRIIDHSMIYVAIAGSYTPVVLTLMNNWFGYLIIVIQWGTTIFGILYKIFAKKVNEKFSLALYLIMGWLVLAIIPAIISQTTPVFWSLMVTGGLCYTVGAGFYAKKKPYFHMIWHLFILAASALQYIAIVYYM

SEQ ID NO: 2985 - DNA, 579 bp, Streptococcus pneumoniae
atgaaaatcggaatattggccttgcaaggggcctttgcagaacatgcaaaagtgctagatcaattaggtgtcgagagtgtagaactcagaaatctagatgattttcagcaagatcagagtgacttgtcgggtttgattttgcctggtggtgagtctacaaccatgggcaagctcttacgtgaccagaacatgctacttcccatccgagaagccattctatctggcttaccagtgtttgggacctgtgcgggcttaattttgctggctaaggaaatcacttctcagaaagagagtcatctaggaactatggatatggtggtcgagcgtaatgcttatgggcgccaattaggaagtttctacacggaagcagaatgtaagggagttggcaagattccaatgacctttatccgtggtccgattatcagtagtgttggtgagggtgtagaaattttagcaacagtgaacaatcaaattgttgcagcccaagaaaaaaatatgttggtaagttcttttcatccagaattgactgatgatgtgcgcttgcaccagtactttatcaatatgtgtaaagaaaaaagt

SEQ ID NO: 2986 - protein, 193 aa, Streptococcus pneumoniae
  conserved hypothetical protein; Cellular location: membrane; Similar to strain R6 sequence 15903364 (e-106)
MKIGILALQGAFAEHAKVLDQLGVESVELRNLDDFQQDQSDLSGLILPGGESTTMGKLLRDQNMLLPIREAILSGLPVFGTCAGLILLAKEITSQKESHLGTMDMVVERNAYGRQLGSFYTEAECKGVGKIPMTFIRGPIISSVGEGVEILATVNNQIVAAQEKNMLVSSFHPELTDDVRLHQYFINMCKEKS

SEQ ID NO: 2987 - DNA, 891 bp, Streptococcus pneumoniae
atgatgaggataaaacaaatgactgaaaatcgttatgaactaaataaaaacttggcacagatgctcaagggtggtgttattatggatgtgcagaatcctgaacaggctcgtatcgcagaagctgctggtgcggcagctgtgatggccttggaacgaattccggctgatattcgtgcagctggaggagtttcccgcatgagcgacccaaagatgattaaggaaatccaagaagcggttagtattccagtaatggctaaggtcagaatcgggcattttgttgaagctcagattttagaggctattgaaattgattatatcgacgagagtgaagttctatctccagctgatgaccgtttccatgtggacaagaaagaattccaagttccttttgtctgtggtgctaaggatttgggtgaagccttgcgtcgtatcgctgaaggtgcttccatgattcgtaccaaaggagaaccagggacaggggatatcgtccaagctgttcgtcatatgcgtatgatgaatcaggaaattcgccgcattcaaaacttacgtgaggacgagctttatgttgctgccaaggatttgcaagtccctgtagaattggtccaatatgttcatgaacatggaaaattgccagttgtaaatttcgctgctggaggtgttgcaacgccagcagatgctgcgttaatgatgcaattaggggcagagggggtctttgtcggttcaggtattttcaagtcaggagatcctgttaaacgagcgagtgccattgttaaggctgtgactaacttccgtaatcctcaaatcctagctcaaatctctgaagatttaggagaagccatggttggtattaatgaaaatgaaatccaaattctcatggctgaacgaggaaaa

SEQ ID NO: 2988 - protein, 297 aa, Streptococcus pneumoniae
  pyridoxine biosynthesis protein; Cellular location: cytoplasm; Similar to strain R6 sequence 15903365 (e-161)
MMRIKQMTENRYELNKNLAQMLKGGVIMDVQNPEQARIAEAAGAAAVMALERIPADIRAAGGVSRMSDPKMIKEIQEAVSIPVMAKVRIGHFVEAQILEAIEIDYIDESEVLSPADDRFHVDKKEFQVPFVCGAKDLGEALRRIAEGASMIRTKGEPGTGDIVQAVRHMRMMNQEIRRIQNLREDELYVAAKDLQVPVELVQYVHEHGKLPVVNFAAGGVATPADAALMMQLGAEGVFVGSGIFKSGDPVKRASAIVKAVTNFRNPQILAQISEDLGEAMVGINENEIQILMAERGK

SEQ ID NO: 2989 - DNA, 1377 bp, Streptococcus pneumoniae
atgagtaaaatcgttgtagtcggtgctaaccacgctggtacagcatgtatcaataccatgttggataattttggaaatgagaacgaaattgttgtatttgaccaaaactctaacatctctttcctaggatgtggaatggctctttggattggtgaacaaattgacggtgctgaaggcttgttctattctgataaagaaaaattggaagctaaaggtgctaaagtttacatgaactcacctgttctttcaatcgactatgataacaaagtagttacagcggaagttgaaggaaaagagcacaaagaatcatacgaaaaattgattttcgctacaggctctacaccaatcttgccaccaatcgaaggtgttgaaattgttaaaggaaaccgcgaatttaaagcaactcttgaaaacgtacaattcgtgaaattgtaccaaaatgctgaagaagttatcaataaactttctgacaagagccaacacctcgaccgtatcgccgttgttggtggtggttacatcggtgttgaacttgctgaagcctttgaacgtcttggaaaagaagttgtccttgttgatatcgttgatactgtcttgaacggttactatgacaaagacttcacacaaatgatggcgaagaacttggaagatcacaacatccgcttggctctaggtcaaactgttaaagcaatcgaaggtgacggtaaagttgaacgcttgattactgacaaagaaagctttgacgtggatatggttatccttgcagttggtttccgtccaaacacagcccttgcaggtggtaagatcgaactcttccgcaacggtgccttccttgtagacaagaaacaagaaacatctatcccagacgtttacgctgttggtgactgtgcgactgtttatgacaatgctcgtaaagatacaagctatatcgctcttgcttcaaatgctgttcgcactggtatcgttggtgcctacaatgcttgtggacatgaattggaaggaatcggtgttcaaggttcaaatggtatctcaatctacggtcttcacatggtttcaactggtttgactcttgaaaaagcgaaagctgctggttacaacgcaactgaaacaggctttaacgatcttcaaaaaccagaattcatgaaacatgacaaccatgaagtagcaattaagattgtctttgacaaagatagccgtgaaattcttggtgcccaaatggtttcacatgatattgcaattagcatgggaatccacatgttctcacttgctatccaagagcatgtgacaattgataaattggcattgacagacctcttcttcttgccacacttcaacaaaccatacaactacatcacaatggctgcccttacggctgaaaaa

SEQ ID NO: 2990 - protein, 459 aa, Streptococcus pneumoniae
  NADH oxidase (nox); Cellular location: cytoplasm; Similar to strain R6 sequence 15903366 (0.E+01)
MSKIVVVGANHAGTACINTMLDNFGNENEIVVFDQNSNISFLGCGMALWIGEQIDGAEGLFYSDKEKLEAKGAKVYMNSPVLSIDYDNKVVTAEVEGKEHKESYEKLIFATGSTPILPPIEGVEIVKGNREFKATLENVQFVKLYQNAEEVINKLSDKSQHLDRIAVVGGGYIGVELAEAFERLGKEVVLVDIVDTVLNGYYDKDFTQMMAKNLEDHNIRLALGQTVKAIEGDGKVERLITDKESFDVDMVILAVGFRPNTALAGGKIELFRNGAFLVDKKQETSIPDVYAVGDCATVYDNARKDTSYIALASNAVRTGIVGAYNACGHELEGIGVQGSNGISIYGLHMVSTGLTLEKAKAAGYNATETGFNDLQKPEFMKHDNHEVAIKIVFDKDSREILGAQMVSHDIAISMGIHMFSLAIQEHVTIDKLALTDLFFLPHFNKPYNYITMAALTAEK

SEQ ID NO: 2991 - DNA, 921 bp, Streptococcus pneumoniae
ttgactcttcgttcacattctgaacggctaatggggactactatcactatttcattagtggatgagcaagccgatatctttctccaaaaatcctttgacttgctcaaagaacttgaataccgcttcaacgccaatagtcaagaatctgagttgatggaaatcaattatcaagcaggaatagcccccgtcacggttcatccagacctgtttgagctgatttcacttgggttagagcatagcctagcgctctctagccacctcaatatcagcattggtcccttaattcaaacctggcgtatcggtttttcagatgccaaggtcgcccagcctcaagaaattgaatcggtgctgcctctaatcaatcctcatggtatcgagttagattcttctacttctactgtgtttttaaaacagaaaggaatgaagatcgatctaggttgtttagccaaaggatacagtgcggataaggttgcccaatttcttaggaaagagggggtgacttctgccttgatcaatctgggagggaatatcctgaccattggaaaaaatcaggcaagaggggataacccatggcaaatcgggattcaagacccagccaatcctaggggaaatcatttaatgaccatccctgttgtcaataaatctgtcgtgacttcaggcatttatgaacgtcacctgaccgtcgatggacaagattaccatcacatttttgacagtcaaacaggatatcctgttgaaacggaactagcgagtctaacaatcatctctgataaatcagtcgatggcgaaatctggacgactcgactctttggagaaagacctgcttctatcctctggcaagtcgaaagtttggagggcatcgaagtcatcctcatcgataaagaaggccacctaagctgttcttcaggaattcctactcta

SEQ ID NO: 2992 - protein, 307 aa, Streptococcus pneumoniae
  thiamine biosynthesis protein ApbE, putative; Cellular location: cytoplasm; Similar to strain R6 sequence 15903367 (e-176)
MTLRSHSERLMGTTITISLVDEQADIFLQKSFDLLKELEYRFNANSQESELMEINYQAGIAPVTVHPDLFELISLGLEHSLALSSHLNISIGPLIQTWRIGFSDAKVAQPQEIESVLPLINPHGIELDSSTSTVFLKQKGMKIDLGCLAKGYSADKVAQFLRKEGVTSALINLGGNILTIGKNQARGDNPWQIGIQDPANPRGNHLMTIPVVNKSVVTSGIYERHLTVDGQDYHHIFDSQTGYPVETELASLTIISDKSVDGEIWTTRLFGERPASILWQVESLEGIEVILIDKEGHLSCSSGIPTL

SEQ ID NO: 2993 - DNA, 603 bp, Streptococcus pneumoniae
atgttaaaacttattgctattgttggaacaaattcaaaacgttctacaaaccgtcaattgcttcaatacatgcaaaaacactttactgacaaagctgaaattgaacttgttgaaatcaaggccattcctgtcttcaacaaaccagctgacaagcaagtacctgctgaaatattggaaattgctgctaaaatcgaagaggcagatggcgttattatcggtactcctgagtatgatcactctattccagctgttttgatgagcgctcttgcttggttgtcttatggtatttacccacttttgaacaaaccaatcatgattacaggtgcttcttacggtacgcttggttcatctcgtgcccaattgcaacttcgtcaaatcttgaatgctcctgaaatcaaggcaaatgttcttccagatgaattcttgctctcacactctcttcaagcatttaacccaagtggcgacttggttgaccttgatgttatcaagaaattggatgccatctttgatgacttccgtatctttgtaaaaatcacagaaaaattacgtaatgcacaagaattacttcgcaaagatgctgaagactttgactgggaaaatttg

SEQ ID NO: 2994 - protein, 201 aa, Streptococcus pneumoniae
  oxidoreductase, putative; Cellular location: cytoplasm; Similar to strain R6 sequence 15903368 (e-110)
MLKLIAIVGTNSKRSTNRQLLQYMQKHFTDKAEIELVEIKAIPVFNKPADKQVPAEILEIAAKIEEADGVIIGTPEYDHSIPAVLMSALAWLSYGIYPLLNKPIMITGASYGTLGSSRAQLQLRQILNAPEIKANVLPDEFLLSHSLQAFNPSGDLVDLDVIKKLDAIFDDFRIFVKITEKLRNAQELLRKDAEDFDWENL

SEQ ID NO: 2995 - DNA, 1242 bp, Streptococcus pneumoniae
atgaaatttgttggacttgttggatcaaactacgatcaatcatataaccgtaagctcttggaatttatccgtcgctacttcaaactcaaatttgaattagaagttcttgaaattgacgaagttccaatgtttaaccaagatgaaaaatgggatgaaagtttccaattacgttatttatataacaaaattactcgtgcagatggtgttatcattgctactcctgagcataaccacactatctcagcttcactcaaatctgtacttgaatggctttcatacgaagttcatccatttgaaaacaagcctgttatgattgtgggtgcatcatactatgaccaaggaacatcacgtgctcaagttcaccttcgtaaaatccttgatgctccaggtgttaatgcctacacgcttccaggtaacgaattccttcttggtaaagctaaggaagcttttgataacaacggaaatatcaccaacgaaggcactgttaaattccttgaaacttgcttagataactttgttaaatacgtaggagtcgtttcgaaattgaaaaaaccaaaaccaatcgaatcagaagacttggattgtggaaaaccaatcgctacaaccatcacagaagttgaccctgacgatccagaatgggtagaaaaagttgcagcattcactggtgctgtttctggtgatacctatgtcaaattggaccacggtatcctaacagttaaccaaattgatatgttcttgaaagctatgccatttgaattgacatacgctgacgacaacaaccaattcctctactacaacaacgctcaccaagatccagacactatgttcgctaaacgtgtaccacctcaatcaggtagccgtatgtcgactgttcatggttctcttccaccagcacgtatgaagaacgtagagtgggttatcggaacacttcgcaacggaaaccaagaatacgtccgtacgatcgttccaggttctcctgcaggtgttatcaacactcacaactaccaagcaatgtactatcctgatggatcatacgctggtatcaatgaaatcgtctttaacttccaaccatggcttgactggtacctaaaagagactggtcaacgtttggtgggtggtagcggaccatttgctcctgctgccggaggtcatggagacgccgatgctacttctggcgcttctgattcaggggatgctggaggccacggtggtgacgcagacgctacagccggtgcaagttac

SEQ ID NO: 2996 - protein, 414 aa, Streptococcus pneumoniae
  oxidoreductase, putative; Cellular location: cytoplasm; Similar to strain R6 sequence 15903369 (0.E+01)
MKFVGLVGSNYDQSYNRKLLEFIRRYFKLKFELEVLEIDEVPMFNQDEKWDESFQLRYLYNKITRADGVIIATPEHNHTISASLKSVLEWLSYEVHPFENKPVMIVGASYYDQGTSRAQVHLRKILDAPGVNAYTLPGNEFLLGKAKEAFDNNGNITNEGTVKFLETCLDNFVKYVGVVSKLKKPKPIESEDLDCGKPIATTITEVDPDDPEWVEKVAAFTGAVSGDTYVKLDHGILTVNQIDMFLKAMPFELTYADDNNQFLYYNNAHQDPDTMFAKRVPPQSGSRMSTVHGSLPPARMKNVEWVIGTLRNGNQEYVRTIVPGSPAGVINTHNYQAMYYPDGSYAGINEIVFNFQPWLDWYLKETGQRLVGGSGPFAPAAGGHGDADATSGASDSGDAGGHGGDADATAGASY

SEQ ID NO: 2997 - DNA, 255 bp, Streptococcus pneumoniae
atggatccgaaaaaaattgctcgtatcaatgagcttgctaaaaagaaaaaaacagaaggcttaacaccagaagaaaaagtggaacaagccaaactacgtgaggagtacatcgaaggttatcgccgcgctgttcgtcaccacattgaaggaatcaaaattgtggacgaagaaggaaacgatgttacaccagaaaaactacgccaagtacaacgtgaaaaaggattacatggccgtagtcttgatgatccaaattca

SEQ ID NO: 2998 - protein, 85 aa, Streptococcus pneumoniae
  conserved hypothetical protein; Cellular location: cytoplasm; Similar to strain R6 sequence 15903370 (2.E-45)
MDPKKIARINELAKKKKTEGLTPEEKVEQAKLREEYIEGYRRAVRHHIEGIKIVDEEGNDVTPEKLRQVQREKGLHGRSLDDPNS

SEQ ID NO: 2999 - DNA, 2034 bp, Streptococcus pneumoniae
atgacaaaaaacttattagtagaactcggtcttgaagaattaccagcctatgttgttacgccaagtgaaaaacaactaggcgaaaaaatggcagccttcctcaagggaaaacgcctgtcttttgaagccattcaaactttctcaacaccacgtcgtttggctgttcgtgtaactggtcttgcagacaaacagtctgatttaacagaagatttcaagggtccagcaaagaaaattgccttagatagtgatggaaacttcaccaaagcagctcaaggatttgtccgtgggaaaggtttgactgttgaagatatcgaattccgtgaaatcaagggtgaagaatatgtctatgtcactaaggaagaaattggtcaagcagttgaagccattgttccaggcattgtggatgtcttgaagtcactgactttccctgtcagcatgcactgggcgggaaatagctttgaatacatccgccctgttcacactttaactgttctcttggatgagcaagagtttgacttggatttccttgatatcaagggaagtcgtgtgagtcgtggccatcgttttttgggacaagaaaccaagattcagtcagcattgagctatgaagaagaccttcgtaagcagtttgtaatcgcagatccatgtgaacgtgagcaaatgattgttgaccaaatcaaggaaattgaggcaaaacatggtgtacgtatcgaaattgatgcggatttgctgaatgaagtcttgaatttggttgaatacccaactgccttcatgggaagttttgatgctaaataccttgaagttccagaagaagtcttggtgacttctatgaaggaacaccagcgttactttgttgttcgtgatcaagatggaaaactcttgccaaacttcatttctgttcgtaacggaaacgcagagcgtttgaaaaatgtcatcaaaggaaatgaaaaagtcttggtagcccgcttggaagacggagaattcttctggcgtgaagaccaaaaattggtgatttcagatcttgttgaaaaattaaacaatgtcaccttccatgagaagattggttctcttcgtgaacacatgattcgtacgggtcaaatcactgtacttttggcagaaaaagctagtttgtcagtggatgaaacagttgaccttgctcgtgcagcagccatttacaagtttgacttgttgacaggtatggttggtgaatttgacgaactccaaggaattatgggtgaaaaatacacccttcttgctggtgaaactccagcggtggcagctgctattcgtgaacactacatgcctacatcagctgaaggagaacttccagagagcaaggtcggcgcagttctagccattgcagacaaattggatacgattttgagtttcttctcagtaggattgattccatcaggttctaatgacccttatgcccttcgtcgtgcaactcaaggtgtggttcgtatcttggatgcctttggttggcacattgctatggatgagctgattgatagcctttatgcattgaaatttgacagtttgacttatgaaaataaagcagaggttatggactttatcaaggctcgtgttgataagatgatgggctctactccaaaagatatcaaggaagcagttcttgcaggttcaaactttgttgtggcagatatgttggaagcagcaagtgctctcgtagaagtaagcaaggaagaagattttaaaccatctgttgaatcactttctcgtgcctttaacctggccgagaaggcagaaggggttgctacggttgattcagcactatttgagaatgaccaagaaaaagctttggcagaagcagtagaaacactcattttatcaggacctgcaagtcagcaattgaaacaactttttgcgcttagcccagtcattgatgctttctttgaaaatactatggtaatggctgaagatcaggctgtccgtcaaaatcgtttggcaatcttgtcacaactaaccaagaaagcagctaagtttgcttgttttaaccaaattaacactaaa

SEQ ID NO: 3000 - protein, 678 aa, Streptococcus pneumoniae
  glycyl-tRNA synthetase, beta subunit (glyS); Cellular location: cytoplasm; Similar to strain R6 sequence 15903371 (0.E+01)
MTKNLLVELGLEELPAYVVTPSEKQLGEKMAAFLKGKRLSFEAIQTFSTPRRLAVRVTGLADKQSDLTEDFKGPAKKIALDSDGNFTKAAQGFVRGKGLTVEDIEFREIKGEEYVYVTKEEIGQAVEAIVPGIVDVLKSLTFPVSMHWAGNSFEYIRPVHTLTVLLDEQEFDLDFLDIKGSRVSRGHRFLGQETKIQSALSYEEDLRKQFVIADPCEREQMIVDQIKEIEAKHGVRIEIDADLLNEVLNLVEYPTAFMGSFDAKYLEVPEEVLVTSMKEHQRYFVVRDQDGKLLPNFISVRNGNAERLKNVIKGNEKVLVARLEDGEFFWREDQKLVISDLVEKLNNVTFHEKIGSLREHMIRTGQITVLLAEKASLSVDETVDLARAAAIYKFDLLTGMVGEFDELQGIMGEKYTLLAGETPAVAAAIREHYMPTSAEGELPESKVGAVLAIADKLDTILSFFSVGLIPSGSNDPYALRRATQGVVRILDAFGWHIAMDELIDSLYALKFDSLTYENKAEVMDFIKARVDKMMGSTPKDIKEAVLAGSNFVVADMLEAASALVEVSKEEDFKPSVESLSRAFNLAEKAEGVATVDSALFENDQEKALAEAVETLILSGPASQQLKQLFALSPVIDAFFENTMVMAEDQAVRQNRLAILSQLTKKAAKFACFNQINTK

SEQ ID NO: 3001 - DNA, 915 bp, Streptococcus pneumoniae
atgtctaagaaattaacatttcaagaaattattttgactttgcaacaattttggaatgaccaagattgtatgcttatgcaggcttatgataatgaaaaaggtgcggggacaatgagtccttacactttccttcgtgctatcggacctgagccatggaatgcagcttatgtagagccatcacgtcgtcctgctgacggtcgttatggggaaaaccctaaccgtctctaccaacaccaccaattccaggtggtcatgaagccttctccatcaaatatccaagaactttaccttgagtctttggaaaaattgggaatcaatcctttggagcacgatattcgttttgttgaggacaactgggaaaacccatcaactggttcagctggtcttggttgggaagtttggcttgacggaatggaaatcactcagttcacttatttccaacaagtcggtggattggcaactggccctgtgactgcggaagttacctatggtttggagcgcttggcttcttacattcaagaagtagactctgtctatgatatcgagtgggctgatggtgtaaaatacggagaaatctttatccagcctgagtatgagcactcaaaatattcatttgaaatttcggaccaagaaatgttgcttgaaaactttgataagtttgaaaaagaagctggtcgtgcattagaagaaggcttggtacaccctgcctatgactatgttctcaaatgttcacatacctttaatctgcttgacgcgcgtggtgccgtatctgtaacagagcgtgcaggctatatcgctcgtatccgtaacttggcccgtgtcgtagccaaaacctttgtcgcagaacgcaaacgcctaggctacccacttttggatgaagaaacaagagctaaactcctagcagaagacgcagaa

SEQ ID NO: 3002 - protein, 305 aa, Streptococcus pneumoniae
  glycyl-tRNA synthetase, alpha subunit (glyQ); Cellular location: cytoplasm; Similar to strain R6 sequence 15903372 (e-179)
MSKKLTFQEIILTLQQFWNDQDCMLMQAYDNEKGAGTMSPYTFLRAIGPEPWNAAYVEPSRRPADGRYGENPNRLYQHHQFQVVMKPSPSNIQELYLESLEKLGINPLEHDIRFVEDNWENPSTGSAGLGWEVWLDGMEITQFTYFQQVGGLATGPVTAEVTYGLERLASYIQEVDSVYDIEWADGVKYGEIFIQPEYEHSKYSFEISDQEMLLENFDKFEKEAGRALEEGLVHPAYDYVLKCSHTFNLLDARGAVSVTERAGYIARIRNLARVVAKTFVAERKRLGYPLLDEETRAKLLAEDAE

SEQ ID NO: 3003 - DNA, 387 bp, Streptococcus pneumoniae
ttggtcggacattttttagatgattttgatggttatgactcttatatctggttcgaagaggggatggttgaatatattagtcgcaagtatttcttgacagaagaggaatttcaagcggaaaaaatttgtaatcaatctctcgtagaactttttcagaagaagtatagttggcattcattgaatgattttggttcttcgacttatgataagaactatgcaagtattttttatgaatactggcgcagctttttgacagtagataagttggtagaaaatttaggtagtgtacaagcggtcttagattcttatcatttatgggcaaatacagaaaaaacttttcccttgttagattggtttgttcagcagaaattaattgaaaaagaaata

SEQ ID NO: 3004 - protein, 129 aa, Streptococcus pneumoniae
  hypothetical protein; Cellular location: cytoplasm; Similar to strain R6 sequence 15903373 (4.E-74)
MVGHFLDDFDGYDSYIWFEEGMVEYISRKYFLTEEEFQAEKICNQSLVELFQKKYSWHSLNDFGSSTYDKNYASIFYEYWRSFLTVDKLVENLGSVQAVLDSYHLWANTEKTFPLLDWFVQQKLIEKEI

SEQ ID NO: 3005 - DNA, 405 bp, Streptococcus pneumoniae
gtgaaagaaaggagagccgtggacaacctttatcttgtaaaagacgatagtcaactagctacatttcgtgattttgtagtaagaaatactgaaaagttgaaagattatcaatcttttttaaagaatgaacttgcagtctgtgatttaccgcaagctgttatttggtcagattttaatgctgctacacagattattagggaaagtgctgttccaacctatacaaataatagacgagtggttatgacgcctgatttagctgtttggaaagaattgtatttgtatcagttgatggactacgagtgttctgagcaaactcaagcaatagaaagtcactatcattctttatctgaaaatttcctcttacagattgtaggacatgagttagctcattggtcggacattttt

SEQ ID NO: 3006 - protein, 135 aa, Streptococcus pneumoniae
  hypothetical protein; Cellular location: cytoplasm; Similar to strain R6 sequence 15903374 (3.E-76)
MKERRAVDNLYLVKDDSQLATFRDFVVRNTEKLKDYQSFLKNELAVCDLPQAVIWSDFNAATQIIRESAVPTYTNNRRVVMTPDLAVWKELYLYQLMDYECSEQTQAIESHYHSLSENFLLQIVGHELAHWSDIF

SEQ ID NO: 3007 - DNA, 840 bp, Streptococcus pneumoniae
atgaatacctatcaattaaataatggagtagaaattccagtattgggatttggaacttttaaggctaaggatggagaagaagcctatcgtgcagtgttagaagccttgaaggctggttatcgtcatattgatacggcggcgatttatcagaatgaagaaagtgttggtcaagcaatcaaagatagcggagttccacgtgaagaaatgttcgtaactaccaagctttggaatagtcagcaaacctatgagcaaactcgtcaagctttggaaaaatctatagaaaaactgggcttggattatttggatttgtatttgattcattggccgaacccaaaaccgctcagagaaaatgacgcatggaaaactcgcaatgcggaagtttggagagcgatggaagacctctatcaagaagggaaaatccgtgctatcggcgttagcaattttcttccccatcatttggatgccttgcttgaaactgcaactatcgttcctgcggtcaatcaagttcgcttggcgccaggtgtgtatcaagatcaagtcgtagcttactgtcgtgaaaagggaattttattggaagcttgggggccttttggacaaggagaactgtttgatagcaagcaagtccaagaaatagcagcaaatcacggaaaatcggttgctcagatagccttggcctggagcttggcagaaggatttttaccacttccaaaatctgtcacaacctctcgtattcaagctaatcttgattgctttggaattgaactgagtcatgaggagagagaaaccttaaaaacgattgctgttcaatcgggtgctccacgagttgatgatgtggatttc

SEQ ID NO: 3008 - protein, 280 aa, Streptococcus pneumoniae
  oxidoreductase, aldo/keto reductase family; Cellular location: cytoplasm; Similar to strain R6 sequence 15903375 (e-163)
MNTYQLNNGVEIPVLGFGTFKAKDGEEAYRAVLEALKAGYRHIDTAAIYQNEESVGQAIKDSGVPREEMFVTTKLWNSQQTYEQTRQALEKSIEKLGLDYLDLYLIHWPNPKPLRENDAWKTRNAEVWRAMEDLYQEGKIRAIGVSNFLPHHLDALLETATIVPAVNQVRLAPGVYQDQVVAYCREKGILLEAWGPFGQGELFDSKQVQEIAANHGKSVAQIALAWSLAEGFLPLPKSVTTSRIQANLDCFGIELSHEERETLKTIAVQSGAPRVDDVDF

SEQ ID NO: 3009 - DNA, 1440 bp, Streptococcus pneumoniae
ttgccaaattgtatcattgaaattattgctcaaatttgttatgatataaatatgaataaaagtagactaggacgtggcagacacgggaaaacgagacatgtattattggctttgattggtattttagcaatttctatttgcctattaggcggatttattgcttttaagatctaccagcaaaaaagttttgagcaaaagattgaatcgctcaaaaaagagaaagatgatcaattgagtgagggaaatcagaaggagcattttcgtcaggggcaagccgaagtgattgcctattatcctctccaaggggagaaagtgatttcctctgttagggagctgataaatcaagatgttaaggacaagctagaaagtaaggacaatcttgttttctactatacagagcaagaagagtcaggtttaaagggagtcgttaatcgtaatgtgaccaaacaaatctatgatttagttgcttttaagattgaagagactgaaaagaccagtctaggaaaggttcacttaacagaagatgggcaaccttttacacttgaccaactgttttcagatgctagtaaggctaaggaacagctgataaaagagttgacctccttcatagaggataaaaaaatagagcaagaccagagtgagcagattgtaaaaaacttctctgaccaagacttgtctgcatggaattttgattacaaggatagtcagattatcctttatccaagtcctgtggttgaaaatttagaagagatagccttgccagtatctgctttctttgatgttatccaatcttcgtacttactcgaaaaagatgcggccttgtaccaatcttactttgataagaaacatcaaaaagttgtcgctctaacctttgatgatggtccaaatccagcaacgaccccgcaggtattagagaccctagctaaatatgatattaaagcgactttctttgtgcttgggaaaaatgtttctgggaatgaggacttggtgaagaggataaaatctgaaggtcatgttgttggaaaccatagctggagccatccgattctctcgcaactctctcttgatgaagctaaaaagcagattactgatactgaggatgtgctaactaaagtgctgggttctagttctaaactcatgcgtccaccttatggtgctattacagatgatattcgcaatagcttggatttgagctttatcatgtgggatgtggatagtctggactggaagagtaaaaatgaagcatctattttgacagaaattcagtatcaagtagctaatggctctatcgttttgatgcatgatattcacagtccgacagtcaatgccttgccaagggtcattgagtatttgaaaaatcaaggttatacctttgtgaccataccagagatgctcaatactcgcctaaaagctcatgagctgtactatagtcgtgatgaa

SEQ ID NO: 3010 - protein, 480 aa, Streptococcus pneumoniae
  peptidoglycan N-acetylglucosamine deacetylase A (pgdA); Cellular location: outside; Similar to strain R6 sequence 15903376 (0.E+01)
MPNCIIEIIAQICYDINMNKSRLGRGRHGKTRHVLLALIGILAISICLLGGFIAFKIYQQKSFEQKIESLKKEKDDQLSEGNQKEHFRQGQAEVIAYYPLQGEKVISSVRELINQDVKDKLESKDNLVFYYTEQEESGLKGVVNRNVTKQIYDLVAFKIEETEKTSLGKVHLTEDGQPFTLDQLFSDASKAKEQLIKELTSFIEDKKIEQDQSEQIVKNFSDQDLSAWNFDYKDSQIILYPSPVVENLEEIALPVSAFFDVIQSSYLLEKDAALYQSYFDKKHQKVVALTFDDGPNPATTPQVLETLAKYDIKATFFVLGKNVSGNEDLVKRIKSEGHVVGNHSWSHPILSQLSLDEAKKQITDTEDVLTKVLGSSSKLMRPPYGAITDDIRNSLDLSFIMWDVDSLDWKSKNEASILTEIQYQVANGSIVLMHDIHSPTVNALPRVIEYLKNQGYTFVTIPEMLNTRLKAHELYYSRDE

SEQ ID NO: 3011 - DNA, 243 bp, Streptococcus pneumoniae
ttggcggagttagataatggaatccaagttatcatcgaaattcaggttcatcatcagaattttttcatcaatcgcctatggccttatctgtgcagtcaggttaatcaaaacctagaaaaaattcgccaacgtgaaggtgatacccaccagagctacaaacaaatcgcactagtatacgctatcgcaattgtcgatagtaattacttctcagatgacctagcttttcatagttttatagtaaaa

SEQ ID NO: 3012 - protein, 81 aa, Streptococcus pneumoniae
  hypothetical protein; Cellular location: cytoplasm; Similar to strain R6 sequence 15903377 (8.E-44)
MAELDNGIQVIIEIQVHHQNFFINRLWPYLCSQVNQNLEKIRQREGDTHQSYKQIALVYAIAIVDSNYFSDDLAFHSFIVK

SEQ ID NO: 3013 - DNA, 105 bp, Streptococcus pneumoniae
atgatttgtcaatttatccgcgatatgctggacttgccagcaaaaaatgtgacgattttggagggaagtaacattcacgtcttgccttccatgccctactcagcg

SEQ ID NO: 3014 - protein, 35 aa, Streptococcus pneumoniae
  hypothetical protein; Cellular location: cytoplasm; Similar to strain R6 sequence 15902075 (1.E-12)
MICQFIRDMLDLPAKNVTILEGSNIHVLPSMPYSA

SEQ ID NO: 3015 - DNA, 1059 bp, Streptococcus pneumoniae
ttgaaattttctcctctctgttggatagtcccgtctatctatgttataatgaaagaaggatttaaaatcggaaaaggagtatttatgctaaaattaggtgtcatcggaactggcgctatcagccatcatttcatagaagcagcccataccagtggagaataccaactggtcgcaatctattctagaaaactagaaactgcagcaacctttgcttctcgctatcagaatatccaactattcgatcaattagaagtcttcttcaaatcttcttttgatttagtctatatcgccagtccaaactccttacattttgctcaggcaaaagctgccttgtctgctggtaaacatgttattctcgaaaagccagctgtctctcaaccacaagaatggtttgatttgattcaaacagctgaaaaaaataactgttttatctttgaagcagctcgtaattaccacgagaaagcctttactactatcaaaaactttttagcagataagcaagtgttaggagcagatttcaactatgccaaatactcttccaagatgcctgacttgttggctggacaaacaccaaatgtcttttcagaccgttttgctggtggagccctcatggatttggggatttatcccctctatgctgctgttcgtctttttggaaaagccaatgacgcgacttaccatgctcaacagcttgacaatagcattgacctaaatggagatggtatcctcttctacccagactatcaagttcacatcaaggctggaaaaaacatcacttccaatcttccttgcgagatttatacaacagatggaaccttgactctcaacacgattgagcatattcgctcagctatttttaccgaccaccaaggaaatcaagtccagcttcctatccaacaggctcctcatacgatgactgaggaagtcgctgcatttgcacacatgatccagcaaccagatctgaatctctaccaaacttggctgtatgatgcaggctctgttcatgagctactatataccatgcgccagactgctggcattagatttgaggcagaaaaa

SEQ ID NO: 3016 - protein, 353 aa, Streptococcus pneumoniae
  oxidoreductase, Gfo/Idh/MocA family; Cellular location: outside; Similar to strain R6 sequence 15903378 (0.E+01)
MKFSPLCWIVPSIYVIMKEGFKIGKGVFMLKLGVIGTGAISHHFIEAAHTSGEYQLVAIYSRKLETAATFASRYQNIQLFDQLEVFFKSSFDLVYIASPNSLHFAQAKAALSAGKHVILEKPAVSQPQEWFDLIQTAEKNNCFIFEAARNYHEKAFTTIKNFLADKQVLGADFNYAKYSSKMPDLLAGQTPNVFSDRFAGGALMDLGIYPLYAAVRLFGKANDATYHAQQLDNSIDLNGDGILFYPDYQVHIKAGKNITSNLPCEIYTTDGTLTLNTIEHIRSAIFTDHQGNQVQLPIQQAPHTMTEEVAAFAHMIQQPDLNLYQTWLYDAGSVHELLYTMRQTAGIRFEAEK

SEQ ID NO: 3017 - DNA, 1080 bp, Streptococcus pneumoniae
atgaaaaccaaactaccgactgaatggcaagaactgagtgaccaactcggtttccaagaattcacccccattcaaactcaactatttgagccccttcttgctggagaaaacctcctaggagtgagccaaaccggaactggtaagaccctagcgtatctcctaccaagtcttctcagactacaaaagaaaaaagcccaacaactcttgattctagcaccaaatacggaacttgctggacagatttttgatgtatgtaaaacgtgggcagaagctatcggattgactgctcaactcttcctttcaggttcaagtcagaaacgacaaattgaacgtcttaaaaaggggccagaaattctgattggaactcctggccgtatctttgaactcattaaacttaaaaaaatcaagatgatgaatgtggaaaccatcatcctggatgaatttgaccaattactagatgattctcagattcactttgtagaaaaaatcactcactacgcacctcgtgaccaccaactggtctacatgagtgccacgaccaagtttgaccaagaaaagattgtgccgaatacacgcactattgatctctctgatcaaaaattggacaatatccagcatttctacatgcaggtagaccaacgtcatcgagtggatatgctacgaaaactggctcatgtagaggatttccgtggtctagtcttcttcaatagcctgtcagaccttgggaatgccgaggaaaaactacagtatcgtgatatattggctgtttccctcgctagtgatgttaatgttaaatttagaaaaatcatcttagaaaagtttaaagataaccaactaaccctgcttcttgcaactgaccttttggctcgtggaattgatatcgatagcctagaatgtgtcgtaaactttgatattcctagagatagcgaaacctacacacaccgtgctggccgtactggtcgtatgggcaaggaaggttatgttatcactctcgtcactcatccagaagaaatcaaaaaacttaaaaagtttgcaagtatccgagaaattgtcctaaaaaaccaagaactctatatcaaa

SEQ ID NO: 3018 - protein, 360 aa, Streptococcus pneumoniae
  ATP-dependent RNA helicase, DEAD/DEAH box family; Cellular location: cytoplasm; Similar to strain R6 sequence 15903379 (0.E+01)
MKTKLPTEWQELSDQLGFQEFTPIQTQLFEPLLAGENLLGVSQTGTGKTLAYLLPSLLRLQKKKAQQLLILAPNTELAGQIFDVCKTWAEAIGLTAQLFLSGSSQKRQIERLKKGPEILIGTPGRIFELIKLKKIKMMNVETIILDEFDQLLDDSQIHFVEKITHYAPRDHQLVYMSATTKFDQEKIVPNTRTIDLSDQKLDNIQHFYMQVDQRHRVDMLRKLAHVEDFRGLVFFNSLSDLGNAEEKLQYRDILAVSLASDVNVKFRKIILEKFKDNQLTLLLATDLLARGIDIDSLECVVNFDIPRDSETYTHRAGRTGRMGKEGYVITLVTHPEEIKKLKKFASIREIVLKNQELYIK

SEQ ID NO: 3019 - DNA, 159 bp, Streptococcus pneumoniae
gtgtggaaagagattcgtaaacgtggatttaagaataaagcctttcgaactttggaagatgtcatgaatcaactccaagatgtcatacaaggattggagaaggaggtgataaagtccatcgttaatcggagatggactagaatgctttttgaaaacaga

SEQ ID NO: 3020 - protein, 53 aa, Streptococcus pneumoniae
  hypothetical protein
MWKEIRKRGFKNKAFRTLEDVMNQLQDVIQGLEKEVIKSIVNRRWTRMLFENR

SEQ ID NO: 3021 - DNA, 414 bp, Streptococcus pneumoniae
ttgatgtaccaagatgaggctggtttcggtagaatcagtaaactgggatcttgttggtctccaataggagtaggtccacatgtccatagtcactatatacgagaatttcgctattgttatggagctgttgatgcccatacaggcgaatcatttttcttaatagctggtggatgtaatactgagtggatgaacgcctttttagaagagctttcacaagcttatccagatgattatcttttactcgttatggacaatgctatatggcataaatcaagtaccttaaagattccgactaatattggttttacctttattcctccatacacaccagagatgaacccattgaacaagtgtggaaagagattcgtaaacgtggatttaagaataaagcctttcgaactttggaagatgtca

SEQ ID NO: 3022 - protein, 138 aa, Streptococcus pneumoniae
  transposase family protein, FRAMESHIFT
MMYQDEAGFGRISKLGSCWSPIGVGPHVHSHYIREFRYCYGAVDAHTGESFFLIAGGCNTEWMNAFLEELSQAYPDDYLLLVMDNAIWHKSSTLKIPTNIGFTFIPPYTPEMNPLNKCGKRFVNVDLRIKPFELWKMS

SEQ ID NO: 3023 - DNA, 120 bp, Streptococcus pneumoniae
ttgttgagaaaacaagagggagagtacctgagagcggagaatgccatcctaaaaaagttaagagaactccgattgaaggaggaaaaagagaaagaagaaagacagaaattattcaagaat

SEQ ID NO: 3024 - protein, 40 aa, Streptococcus pneumoniae
  hypothetical protein
MLRKQEGEYLRAENAILKKLRELRLKEEKEKEERQKLFKN

SEQ ID NO: 3025 - DNA, 831 bp, Streptococcus pneumoniae
atgactgagttttcgttagatattcttctaaaagccattaaactagctcgtttgacctactactatcacttgaaacagctagataaaccagataaggaccaagagcttaaagctgaaattcaatccatttttatcgaacacaagggaaattatgcttatcgtcggatttatttagaactaagaaatcgtggttatctggtaaatcataaaagagttcaaggcttgataaaagtactcaatttacaagctaaaatgcgacagaaacgaaaatattcttctcataaaggagacgttggcaagaaggcagagaatctcattcaaggacaatttgaaggctctaaaacaatggaaaagtgctacacagatgtgacagaatttgccattccagcaagtactcaaaagctttacttatcaccagttttagatggctttaacagtgaaattattgcttttaatctttcttgttcgcctaatttagaacaagtacaaacaatgttggaacaggcattcaaagagaagcactacgagaatacgattctccatagtgaccaaggctggcaatatcaacacgattcttatcatcggttcctagagagtaagggaattcaagcatccatgtcacgtaagggcaacagccaagacaacggtaggatggaatctttctttggcattttaaaatccgaaatgttttatggctatgagaaaacatttaaatcacttaaccaattggaacaagccattatagactatattgattattacaacaataagaaaattaagataaaactaaaaggacttagtcctgtgcagtacagaactaaatcctttgga

SEQ ID NO: 3026 - protein, 277 aa, Streptococcus pneumoniae
  IS3-Spn1, transposase; Cellular location: cytoplasm; Similar to strain R6 sequence 15903382 (7.E-89)
MTEFSLDILLKAIKLARLTYYYHLKQLDKPDKDQELKAEIQSIFIEHKGNYAYRRIYLELRNRGYLVNHKRVQGLIKVLNLQAKMRQKRKYSSHKGDVGKKAENLIQGQFEGSKTMEKCYTDVTEFAIPASTQKLYLSPVLDGFNSEIIAFNLSCSPNLEQVQTMLEQAFKEKHYENTILHSDQGWQYQHDSYHRFLESKGIQASMSRKGNSQDNGRMESFFGILKSEMFYGYEKTFKSLNQLEQAIIDYIDYYNNKKIKIKLKGLSPVQYRTKSFG

SEQ ID NO: 3027 - DNA, 436 bp, Streptococcus pneumoniae
atgaaattaacttatgatgataaagttcagatctatgaacttagaaaacaaggatatagcttagagaagctttcaaataaatttgggataaacaattctaatcttaggtacatgattaaattgattgatcgttacggaatagagttcgtcaaaaaaggaaaaaatcgttactattctcctgatttaaaacaagaaatgattcataaagtctgacatgaaggctggactaaagatagagtttctcttgaatactgtctcccaagtcgtacgatacttcttaactggctagcacaatacaggaaaaacgggtatactattgttgagaaaacaagagggagagtacctgagagcggagaatgccatcctaaaaaagttaagagaactccgattgaaggaggaaaaagagaaagaagaaagacagaaattattcaagaat

SEQ ID NO: 3028 - protein, 89 aa, Streptococcus pneumoniae
  IS3-Spn1, hypothetical protein, POINT MUTATION FRAMESHIFT
MNCTPKVRQKKSNFWGVFIMKLTYDDKVQIYELRKQGYSLEKLSNKFGINNSNLRYMIKLIDRYGIEFVKKGKNRYYSPDLKQEMIHKV

SEQ ID NO: 3029 - DNA, 336 bp, Streptococcus pneumoniae
ttggcgaaatgtaaaaaatatgaggagttcggactcgactctctccttcaagaaacacgtggtggtcgtaaccatgcttatatgacggttgagcaagagaaagtctttcttgcccgccatttgaaggctacagaggcaggagaatttgttacaattgatgccttatttcaggcttataaaaaggagttaggtcgttcctacacacgtgatgccttctatcaactgttgaagcgccatggttggcgaaatattacgccacgtccagaacatcctaagaaagcagatgctcaaaccattgtcgcgtctaaaaataaagtctcaattcaagaagacaag

SEQ ID NO: 3030 - protein, 112 aa, Streptococcus pneumoniae
  hypothetical protein (Degenerate transposase); Cellular location: cytoplasm; Similar to strain R6 sequence 15903385 (6.E-62)
MAKCKKYEEFGLDSLLQETRGGRNHAYMTVEQEKVFLARHLKATEAGEFVTIDALFQAYKKELGRSYTRDAFYQLLKRHGWRNITPRPEHPKKADAQTIVASKNKVSIQEDK

SEQ ID NO: 3031 - DNA, 138 bp, Streptococcus pneumoniae
atgaaatcaattaaagaagaaatccaaaccatcaaaacacttttaaaagactctcgtacagctaaatatcataaacgccttcaaatcgttctatttcgtctgatgggcaaatcttataaagagattatagaactttta

SEQ ID NO: 3032 - protein, 46 aa, Streptococcus pneumoniae
  hypothetical protein; Cellular location: cytoplasm
MKSIKEEIQTIKTLLKDSRTAKYHKRLQIVLFRLMGKSYKEIIELL

SEQ ID NO: 3033 - DNA, 1212 bp, Streptococcus pneumoniae
ttggaggcttttactcaaatggcaaaagaaaaatacgatcgtagtaaaccacacgttaacattggtactatcggacacgttgaccacggtaaaactaccctaactgcagctatcacaactgttttggcacgtcgcttgccttcatcagttaaccaacctaaagactatgcgtctatcgatgctgctccagaagaacgcgaacgcggtatcactatcaacactgcgcacgttgagtacgaaactgaaaaacgtcactacgctcacatcgacgctccaggacacgcggactacgttaaaaacatgatcactggtgctgctcaaatggacggagctatccttgtagtagcttcaactgacggaccaatgccacaaactcgtgagcacatccttctttcacgtcaggttggtgttaaacaccttatcgtcttcatgaacaaagttgacttggttgacgacgaagaattgcttgaattggttgaaatggaaatccgtgacctattgtcagaatacgacttcccaggtgacgatcttccagttatccaaggttcagcacttaaagctcttgaaggtgactctaaatacgaagacatcgttatggaattgatgaacacagttgatgagtatatcccagaaccagaacgtgacactgacaaaccattgcttcttccagtcgaggacgtattctcaatcactggacgtggtacagttgcttcaggacgtatcgaccgtggtatcgttaaagtcaacgacgaaatcgaaatcgttggtatcaaagaagaaactcaaaaagcagttgttactggtgttgaaatgttccgtaaacaacttgacgaaggtcttgctggagataacgtaggtgtccttcttcgtggtgttcaacgtgatgaaatcgaacgtggacaagttatcgctaaaccaggttcaatcaacccacacactaaattcaaaggtgaagtctacatccttactaaagaagaaggtggacgtcacactccattcttcaacaactaccgtccacaattctacttccgtactactgacgttacaggttcaatcgaacttccagcaggtactgaaatggtaatgcctggtgataacgtgacaatcgacgttgagttgattcacccaatcgccgtagaacaaggtactacattctctatccgtgagggtggacgtactgttggttcaggtatggttacagaaatcgaagct

SEQ ID NO: 3034 - protein, 404 aa, Streptococcus pneumoniae
  translation elongation factor TU (tuf); Cellular location: cytoplasm; Similar to strain R6 sequence 15903386 (0.E+01)
MEAFTQMAKEKYDRSKPHVNIGTIGHVDHGKTTLTAAITTVLARRLPSSVNQPKDYASIDAAPEERERGITINTAHVEYETEKRHYAHIDAPGHADYVKNMITGAAQMDGAILVVASTDGPMPQTREHILLSRQVGVKHLIVFMNKVDLVDDEELLELVEMEIRDLLSEYDFPGDDLPVIQGSALKALEGDSKYEDIVMELMNTVDEYIPEPERDTDKPLLLPVEDVFSITGRGTVASGRIDRGIVKVNDEIEIVGIKEETQKAVVTGVEMFRKQLDEGLAGDNVGVLLRGVQRDEIERGQVIAKPGSINPHTKFKGEVYILTKEEGGRHTPFFNNYRPQFYFRTTDVTGSIELPAGTEMVMPGDNVTIDVELIHPIAVEQGTTFSIREGGRTVGSGMVTEIEA

SEQ ID NO: 3035 - DNA, 93 bp, Streptococcus pneumoniae
ttgttagaaatcgatttgactgtcctgaacgatttgccctattcttgtttcattttactatataaaccagagactgtttacattttcagcaag

SEQ ID NO: 3036 - protein, 31 aa, Streptococcus pneumoniae
  hypothetical protein; Cellular location: cytoplasm; Similar to strain R6 sequence 15902350 (6.E-05)
MLEIDLTVLNDLPYSCFILLYKPETVYIFSK

SEQ ID NO: 3037 - DNA, 120 bp, Streptococcus pneumoniae
ttgactctgctgagtcctatgattgttatcgttttatctgcaattttatactcaatgaaaatcaaagggcaaactaagaagctagccgcaggttgttcaaaacacagttttgaggttgta

SEQ ID NO: 3038 - protein, 40 aa, Streptococcus pneumoniae
  box element
MTLLSPMIVIVLSAILYSMKIKGQTKKLAAGCSKHSFEVV

SEQ ID NO: 3039 - DNA, 867 bp, Streptococcus pneumoniae
atggatttcacatgggcactgaagtatgccactgaatttttgggaactgccattttgatcattcttgggaatggtgcagttgccaacgttgaacttaaaggtacgaaaggtcaccaaagtggctggatcgtcatcgctgttggttatggtatgggggttatgatcccagccttgatgtttggtaacgtatctgggaatcacatcaaccctgctttcactctagggcttgcagttagcggtcttttcccttgggcacaagtggtaccttacattatcgcgcaagtcttgggggctatctttggccaagccttagttgtggcaacataccgtccattctacttgaaaactgaaaacccaaataacatcttgggaactttctcaactatttcaagtattgaccatggtacaaaagaaagtcgctatgcagcaactgtcaatggtttgattaatgagtttgttggttcatttgttttgttctttgcagctcttggtttgactaaaaacttctttggtgctgaagtgcttcaattcatgaaacaaaaggcaacagaagcaggacaaacagttgatttttctgacttggctattaaagcacaggtggctccacacactgcttcaggactttctgtggctcacttggcacttggattcctcgttatggctttggtaacatcacttggaggacctacaggacctgccttgaacccagcccgtgacttgggaccacgtctccttcatgctttccttcccaaatcagttcttggtgagcataaaggcgattcaaaatggtggtattcttgggtaccagtagtagcacctatcgcagcagcaattgcggcagtagctgtattcaaattcctttatctc

SEQ ID NO: 3040 - protein, 289 aa, Streptococcus pneumoniae
  glycerol uptake facilitator protein, putative; Cellular location: membrane; Similar to strain R6 sequence 15903387 (e-166)
MDFTWALKYATEFLGTAILIILGNGAVANVELKGTKGHQSGWIVIAVGYGMGVMIPALMFGNVSGNHINPAFTLGLAVSGLFPWAQVVPYIIAQVLGAIFGQALVVATYRPFYLKTENPNNILGTFSTISSIDHGTKESRYAATVNGLINEFVGSFVLFFAALGLTKNFFGAEVLQFMKQKATEAGQTVDFSDLAIKAQVAPHTASGLSVAHLALGFLVMALVTSLGGPTGPALNPARDLGPRLLHAFLPKSVLGEHKGDSKWWYSWVPVVAPIAAAIAAVAVFKFLYL

SEQ ID NO: 3041 - DNA, 606 bp, Streptococcus pneumoniae
gtggttcccaaaacagcaacctctactgagacgaagactataacgcgtatcattcattacgttgataaagttacgaaccaaaatgtaaaagaagatgttgttcaacctgtaaccttaagccgtacaaaaactgagaacaaggtcacgggagttgtaacctacggtgaatggacaacaggaaactgggacgaggttatatctggtaagattgacaagtacaaagatccagatattccaacagttgaatcacaagaagttacgtcagactctagtgataaagaaataacggtaaggtatgaccgtttatcaacaccagaaaaaccaatcccacaaccaaatccagagcatccaagtgttccgacaccaaacccagaactaccaaatcaagagactccaacaccagataaaccaactccagaaccaggtactccaaaaactgaaactccagtgaatccagacccagaagttccgacttatgagacaggtaagagagaggaattgccaaacacaggtacagaagctaatgctaccttggctagtgctggtatcatgaccttgttagctggtctaggattaggatttttcaagaaaaaagaagatgaaaaa

SEQ ID NO: 3042 - protein, 202 aa, Streptococcus pneumoniae
  cell wall surface anchor family protein; Cellular location: Peptidoglycan-bound (LPXTG); Similar to strain R6 sequence 15903388 (e-118)
MVPKTATSTETKTITRIIHYVDKVTNQNVKEDVVQPVTLSRTKTENKVTGVVTYGEWTTGNWDEVISGKIDKYKDPDIPTVESQEVTSDSSDKEITVRYDRLSTPEKPIPQPNPEHPSVPTPNPELPNQETPTPDKPTPEPGTPKTETPVNPDPEVPTYETGKREELPNTGTEANATLASAGIMTLLAGLGLGFFKKKEDEK

SEQ ID NO: 3043 - DNA, 1110 bp, Streptococcus pneumoniae
gtgccgatgaatataattctaatcgccaaacttttgagagagaatacaaatacaaaagcaaatgcccttaataatggttgggctagatctggttctgaagagttcaaaaagttctcccactttgtaggggtagacaaagggattgtgcgaacgaatgtactgactggtaaaaaactatctgataagattaggaaagaagtgggctctggagatagcaaactaggaaaaggcggctatttctctactggggatgttctattaggaaaagatgttgtttcttataccgtacaagtattttcagagaataatgaaagagtaggagtaaacactcaaagtcaccgtgttcagtataatctcccaattctagctgacttttcagtcatccaagatactgtggaaccatcacgaaccgttgttgaaaaaatcattccaaaactaaatattcccgaagaagagaaagggaaaataaccgaagaaatcaagaaaaagaaaaaaacctcagaattggcagaactaatctcagaaaatgtgaaagttcgctatgttgatgaacaagggcgtttgctatcattgaaaaatgatactggaattggagaaaaagaaagtgacggaacctacattaccaataaaaaacaactgattggtaccagctataatgtcacagataaaaaactcagtagcatgactactactgacggaaaatattatacttttaaagaagcagatacaaattctgcaagtttaactgggaatattgtaagcgaaggtagaacagtgaccttagtttatagagaaagcgaagcgccaaccactgctacagtaacagccaattactataaagaaggtaggcaagagaagttggtagagtctgttataaaagctgatttagcgataggttctgagtataccacagaatcaaaaactattgaagggaaaacaacaactgaggacaaagaagaccgagttatcacaaggaaaacaacatacaccttggtagcaactcctgaaaatgcgtaccagaagacggtgcaacagttgactattactaccgtgagaatgttgaggaaacagtggttcccaaaacagcaacctctactgagacgaagacta

SEQ ID NO: 3044 - protein, 370 aa, Streptococcus pneumoniae
  hypothetical protein; Cellular location: cytoplasm; Similar to strain R6 sequence 15903389 (0.E+01)
MPMNIILIAKLLRENTNTKANALNNGWARSGSEEFKKFSHFVGVDKGIVRTNVLTGKKLSDKIRKEVGSGDSKLGKGGYFSTGDVLLGKDVVSYTVQVFSENNERVGVNTQSHRVQYNLPILADFSVIQDTVEPSRTVVEKIIPKLNIPEEEKGKITEEIKKKKKTSELAELISENVKVRYVDEQGRLLSLKNDTGIGEKESDGTYITNKKQLIGTSYNVTDKKLSSMTTTDGKYYTFKEADTNSASLTGNIVSEGRTVTLVYRESEAPTTATVTANYYKEGRQEKLVESVIKADLAIGSEYTTESKTIEGKTTTEDKEDRVITRKTTYTLVATPENAYQKTVQQLTITTVRMLRKQWFPKQQPLLRRRL

SEQ ID NO: 3045 - DNA, 252 bp, Streptococcus pneumoniae
gtgttgaatgttgaccaggatttcatgagcatatctaagtctaataaaagtggttcagactggaagaaaactttcacagtgaggataaccaataggctagcaaatgacttgaataatgtcttgaaacaggttgataaagatactcctaataccccaacttggctaaactcagctgcttctaaagctaaagatgatgacagagtatataaactactgaagactcttataccaggagaaaattacctatcatgt

SEQ ID NO: 3046 - protein, 84 aa, Streptococcus pneumoniae
  hypothetical protein; Cellular location: cytoplasm; Similar to strain R6 sequence 15903390 (4.E-45)
MLNVDQDFMSISKSNKSGSDWKKTFTVRITNRLANDLNNVLKQVDKDTPNTPTWLNSAASKAKDDDRVYKLLKTLIPGENYLSC

SEQ ID NO: 3047 - DNA, 207 bp, Streptococcus pneumoniae
ttgaatgttgaacttgcgcaccaacaaattaagggattttttgaagcagagtttaaaaatcgtattaatggagttcttaatactaaaataaaaaatagtacattaaatcgtgtaaataaaaaaactatacaccagagcaacaaaaactccatgatcaatttgaagcagaagcaacggaagatgctaaaaaacaaggcgatattgtgt

SEQ ID NO: 3048 - protein, 69 aa, Streptococcus pneumoniae
  hypothetical protein; Cellular location: cytoplasm; Similar to strain R6 sequence 15903391 (2.E-42)
MNVELAHQQIKGFFEAEFKNRINGVLNTKIKNSTLNRVNKKTIHQSNKNSMINLKQKQRKMLKNKAILC

SEQ ID NO: 3049 - DNA, 93 bp, Streptococcus pneumoniae
ttgaatgtttggaatgcttttttaaaactagatgactataacggttctaaaggaacctatcgagtagtcattaaaactaaggatactgctggt

SEQ ID NO: 3050 - protein, 31 aa, Streptococcus pneumoniae
  hypothetical protein
MNVWNAFLKLDDYNGSKGTYRVVIKTKDTAG

SEQ ID NO: 3051 - DNA, 297 bp, Streptococcus pneumoniae
atgatttacaagaaaagcatgacaagcgatttctttgtggagtggttcaaaacgcaactcctacctgctttgaagacacctcatgttattgtcatgggcaatgctggttttcatcccaagaacattttggatgaactctgcatccaagataaacactttttcttacctctaccaccttattcaccggatttgaatcctattgagcaagcttgggctatcttgaaaaagaaagtgacggatgtattaagggaagttccaactatttttgaatgtttggaatgcttttttaaaactaga

SEQ ID NO: 3052 - protein, 99 aa, Streptococcus pneumoniae
  transposase, IS630-Spn1 related, Orf2; Cellular location: cytoplasm; Similar to strain R6 sequence 15903392 (6.E-57)
MIYKKSMTSDFFVEWFKTQLLPALKTPHVIVMGNAGFHPKNILDELCIQDKHFFLPLPPYSPDLNPIEQAWAILKKKVTDVLREVPTIFECLECFFKTR

SEQ ID NO: 3053 - DNA, 213 bp, Streptococcus pneumoniae
gtgggaaaagaaagacgtgaacaagaacacatagagaggaaaaagcgagtcgtcaaaaaccgaaagattcctttagaggaattgaaagcctttgtagaggctcatccagatgcttttttacgggaaattgcggcacattttgattgtgctgttccttcagtatgggcagctttaaagcagattaaggtcactttaaaaaaagatgacgagctt

SEQ ID NO: 3054 - protein, 71 aa, Streptococcus pneumoniae
  transposase, IS630-Spn1 related, Orf1 FRAMESHIFT
MGKERREQEHIERKKRVVKNRKIPLEELKAFVEAHPDAFLREIAAHFDCAVPSVWAALKQIKVTLKKDDEL

SEQ ID NO: 3055 - DNA, 1716 bp, Streptococcus pneumoniae
atgtcttaccaagaaaattaccagaaatgggttgattttgtggagcttcctgactaccttcgtcaagatttggaaaatatggacgaaaaaactaaggaagatgccttctatacaaatcttgaatttggtactgcaggtatgcgtggcttggttggtgctggtacaaaccgtatcaacatctacgttgttcgccaagctactgaaggattggctcgtttgattgagtcaaaaggtggaaacgagaaagaacgcggtgtagcaattgcctacgatagccgtcacttctcacctgagtttgcctttgaatctgcggcagttcttgctaaacacggcatcaaatcttacgtatttgaaagccttcgtccgactccagaactatcatttgcagttcgtcatctcaactgtttcgcaggtatcatggtcacagccagccacaaccctgctccatttaacggttacaaggtttacggtgaagacggtggacaaatgcctccacacgatgcggacgctttgactacttatatccgtgcaatcgaaaacccatttgcagttgaagttgctgatgtggaaactgaaaaagcttctggcttgattgaagttatcggcgaagctgttgacatagaataccttaaagaggttaaggacataaacatcaacccagccttgattgaagaatttggtaaagacatgaagattgtctacacaccacttcatggtactggtgaaatgttggctcgtcgtgctcttgcccaagcaggatttgactctgttcaagttgttgaagcgcaagcaactgctgacccagacttttcaactgtaacatctccaaacccagaaagccaagcagcctttgcccttgctgaagaacttggtcgtcaagttggtgcagatgttcttgtcgcaactgacccagacgctgaccgtgttggtgttgaagttcttcaaaaagatggtagctacctcaacctttcaggtaaccaaatcggtgctatcatggctaaatacatcttggaagctcacaaaaacgctggaactcttcctgaaaatgccgctctctgcaaatctatcgtttcaactgacttggtaacgaagattgctgaaagctacggcgcaactatgttcaacgtcttgacaggtttcaaatttatcgctgaaaaaatccaagaattcgaagaaaaacacaaccacacttacatgatgggatttgaagaaagcttcggttacttgattaaaccatttgtacgtgataaagatgccatccaagccgttcttgtagttgctgaacttgctgcctactaccgttctcgtggtttgacacttgctgacggtatcgaagaaatctataaagaatatggctactacgcagaaaaaacaatctctgttactctttcaggtgtcgatggtgctgaacaaatcaaagcgattatggctaaattccgcaacaatgctccaacagaatggaacgcaacagctatcactgtcgtagaagacttcaaggcacaaactgctactgttgctgacggtactgttacaaacttgacaactcctccaagtgatgtgttgaaatacacacttgctgacggttcatggattgccgttcgcccttcaggtacagaaccaaaaatcaagttctacattgcagttgtaggggaaaccaacgaagaatcacaagctaagattgctaacatcgaagcagaaatcaatgcatttgtaaaa

SEQ ID NO: 3056 - protein, 572 aa, Streptococcus pneumoniae
  phosphoglucomutase (pgm); Cellular location: cytoplasm; Similar to strain R6 sequence 15903394 (0.E+01)
MSYQENYQKWVDFVELPDYLRQDLENMDEKTKEDAFYTNLEFGTAGMRGLVGAGTNRINIYVVRQATEGLARLIESKGGNEKERGVAIAYDSRHFSPEFAFESAAVLAKHGIKSYVFESLRPTPELSFAVRHLNCFAGIMVTASHNPAPFNGYKVYGEDGGQMPPHDADALTTYIRAIENPFAVEVADVETEKASGLIEVIGEAVDIEYLKEVKDININPALIEEFGKDMKIVYTPLHGTGEMLARRALAQAGFDSVQVVEAQATADPDFSTVTSPNPESQAAFALAEELGRQVGADVLVATDPDADRVGVEVLQKDGSYLNLSGNQIGAIMAKYILEAHKNAGTLPENAALCKSIVSTDLVTKIAESYGATMFNVLTGFKFIAEKIQEFEEKHNHTYMMGFEESFGYLIKPFVRDKDAIQAVLVVAELAAYYRSRGLTLADGIEEIYKEYGYYAEKTISVTLSGVDGAEQIKAIMAKFRNNAPTEWNATAITVVEDFKAQTATVADGTVTNLTTPPSDVLKYTLADGSWIAVRPSGTEPKIKFYIAVVGETNEESQAKIANIEAEINAFVK

SEQ ID NO: 3057 - DNA, 345 bp, Streptococcus pneumoniae
atggaacaatttttagataacatcaaagaccttgaagtcactacagttgtgcgtgcgcaagaagctcttgataaaaaagaaactgcaaccttctttatcggtcgcaaaacttgcccttactgccgtaaatttgcaggtacattgtcaggtgtcgtagctgaaaccaaagctcacatttacttcatcaatagtgaagaaccaagccaactcaatgatttgcaagcattccgctcacgctatggaatcccaactgtaccaggttttgttcatattacagatggacaaatcaacgtccgttgcgactcttcaatgtcagcacaagaaatcaaagatttcgcaggattg

SEQ ID NO: 3058 - protein, 115 aa, Streptococcus pneumoniae
  bacterocin transport accessory protein (bta); Cellular location: cytoplasm; Similar to strain R6 sequence 15903395 (2.E-63)
MEQFLDNIKDLEVTTVVRAQEALDKKETATFFIGRKTCPYCRKFAGTLSGVVAETKAHIYFINSEEPSQLNDLQAFRSRYGIPTVPGFVHITDGQINVRCDSSMSAQEIKDFAGL

SEQ ID NO: 3059 - DNA, 834 bp, Streptococcus pneumoniae
atgaaaaaatggatgcttgtattagtcagtctgatgactgctttgttcttagtagcttgtgggaaaaattctagcgaaactagtggagataattggtcaaagtaccagtctaacaagtctattactattggatttgatagtacttttgttccaatgggatttgctcagaaagatggttcttatgcaggatttgatattgatttagctacagctgtttttgaaaaatacggaatcacggtaaattggcaaccgattgattgggatttgaaagaagctgaattgacaaaaggaacgattgatctgatttggaatggctattccgctacagacgaacgccgtgaaaaggtggctttcagtaactcatatatgaagaatgagcaggtattggttacgaagaaatcatctggtatcacgactgcaaaggatatgactggaaagacattaggagctcaagctggttcatctggttatgcggactttgaagcaaatccagaaattttgaagaatattgtcgctaataaggaagcgaatcaataccaaacctttaatgaagccttgattgatttgaaaaacgatcgaattgatggtctattgattgaccgtgtctatgcaaactattatttagaagcagaaggtgttttaaacgattataatgtctttacagttggactagaaacagaagcttttgcggttggagcccgtaaggaagatacaaacttggttaagaagataaatgaagctttttctagtctttacaaggacggcaagttccaagaaatcagccaaaaatggtttggagaagatgtagcaaccaaagaagtaaaagaaggacag

SEQ ID NO: 3060 - protein, 278 aa, Streptococcus pneumoniae
  amino acid ABC transporter, amino acid-binding protein (aatB); Cellular location: lipoprotein; Similar to strain R6 sequence 15903396 (e-160)
MKKWMLVLVSLMTALFLVACGKNSSETSGDNWSKYQSNKSITIGFDSTFVPMGFAQKDGSYAGFDIDLATAVFEKYGITVNWQPIDWDLKEAELTKGTIDLIWNGYSATDERREKVAFSNSYMKNEQVLVTKKSSGITTAKDMTGKTLGAQAGSSGYADFEANPEILKNIVANKEANQYQTFNEALIDLKNDRIDGLLIDRVYANYYLEAEGVLNDYNVFTVGLETEAFAVGARKEDTNLVKKINEAFSSLYKDGKFQEISQKWFGEDVATKEVKEGQ

SEQ ID NO: 3061 - DNA, 627 bp, Streptococcus pneumoniae
atgttagaattacgaaatatcaataaagtctttggagacaaacaaatcctgtctaatttcagtctaagtattcctgaaaagcaaatcctggctatcgttggaccttctggtggaggtaagacaactcttttacgtatgcttgcaggtcttgaaaccattgattcagggcaaatcttttataatggacaacctttagagctggatgaattgcagaagcgcaatctactgggatttgtcttccaagattttcaactatttcctcatctatcagttctggaaaatttgactttatcgcctgtgaagaccatgggaatgaagcaggaagaggctgagaagaaggcgagtggactcttggaacagttaggactaggaggacacgcagaggcctatcctttctcactatctggtgggcaaaagcagcgggtggctttggcgcgtgctatgatgattgacccagaaatcattggctacgatgaaccaacttctgccctggatccagaattacgtttggaagtggagaagctaatcttgcaaaatagggaacttgggatgacccagattgtggttacccatgatttgcagtttgctgaaaatatcgcagatgtattattgaaagtagaacctaaa

SEQ ID NO: 3062 - protein, 209 aa, Streptococcus pneumoniae
  amino acid ABC transporter, ATP-binding protein; Cellular location: cytoplasm; Similar to strain R6 sequence 15903397 (e-115)
MLELRNINKVFGDKQILSNFSLSIPEKQILAIVGPSGGGKTTLLRMLAGLETIDSGQIFYNGQPLELDELQKRNLLGFVFQDFQLFPHLSVLENLTLSPVKTMGMKQEEAEKKASGLLEQLGLGGHAEAYPFSLSGGQKQRVALARAMMIDPEIIGYDEPTSALDPELRLEVEKLILQNRELGMTQIVVTHDLQFAENIADVLLKVEPK

SEQ ID NO: 3063 - DNA, 639 bp, Streptococcus pneumoniae
atgtcttatttatttgagatattaccgagtttactgaatggtgcgagcacgactgtacaggtctttgcactggtcttgctattttcgattcccttgggcgttttgattgcctttgccttgcaagtccattggaagcccctccattatctgattaacatttacatctgggttatgcgaggaacccccttactcttgcaactgatttttatctattatgtgctcccaagtattgggattcgtttagaccgccttcctgcagctattattgcctttgttctcaactatgcagcttactttgcagaaattttccgtgggggaattgacactattccaagaggacagtatgaggccgccaaggtcttgaagtttagcccttttgacagagtgcgctatattatcttgccccaagtgaccaagatcgttcttcctagtgtctttaatgaagttatgagtttggtcaaggatacttctttggtctatgctctcggaatttcagaccttatcttggctagtcgaacagctgctaaccgcgatgctagtctagttcctatgttcttggcaggagccatttatttgattttgattgggattgtgacaattatttccaaaaaagttgagaagaagtatagttattataga

SEQ ID NO: 3064 - protein, 213 aa, Streptococcus pneumoniae
  amino acid ABC transporter, permease protein; Cellular location: membrane; Similar to strain R6 sequence 15903398 (e-116)
MSYLFEILPSLLNGASTTVQVFALVLLFSIPLGVLIAFALQVHWKPLHYLINIYIWVMRGTPLLLQLIFIYYVLPSIGIRLDRLPAAIIAFVLNYAAYFAEIFRGGIDTIPRGQYEAAKVLKFSPFDRVRYIILPQVTKIVLPSVFNEVMSLVKDTSLVYALGISDLILASRTAANRDASLVPMFLAGAIYLILIGIVTIISKKVEKKYSYYR

SEQ ID NO: 3065 - DNA, 1344 bp, Streptococcus pneumoniae; identical to SEQ ID NO: 517

SEQ ID NO: 3066 - protein, 448 aa, Streptococcus pneumoniae; identical to SEQ ID NO: 486
  IS1380-Spn1, transposase; Cellular location: cytoplasm; Similar to strain R6 sequence 15903941 (2.E-46)

SEQ ID NO: 3067 - DNA, 1242 bp, Streptococcus pneumoniae
gtgaggaagtcaagagtgaacaatagtcaacagatgttacaggctttggaggagcaagatttaactaaggctgagcattatttcgccaaagctttagaaaatgattcaagtgatcttctgtatgaattggcaacttatcttgaagggattggtttctatcctcaggccaaggaaatttacctgaaaattgtagaggattttccagaggttcatcttaatctagctgcaattgctagcgaggatggtcaaatagaagaagcctttacctatcttgaggaaatccaagctgacagtgactggtatgtctcgtctttggctctgaaggcagacctttaccagctggaaggtttgacagatgtggcacgtgagaaattattggaggccttgacctactcagaggattctctcttgatattgggtttggcagagttggatagtgagttggaaaattaccaagcggctattcaagcctatgcccagttagataatcgctcgatttatgagcaaacgggcatttccacctatcaacgaattggctttgcctatgctcagttagggaaatttgaaacggctactgagtttttagaaaaagccctggagttagaatacgatgacttaacagcttttgagttggccagtctttattttgatcaagaagaatatcaaaaagccaccctctactttaagcagcttgataccatttctcctgactttgaaggctatgagtatgggtacagtcaggctttacataaggaacatcaagttcaagaagccctgcgtatcgctaagcaaggattagagaaaaatccctttgaaactcgcctcttgctagctgcttcacaattttcttatgaattgcatgatgctagtggtgcagaaaattatctccttactgcaaaagaagacgctgaggatacagaagaaatcttgcttcgtttagccactatttatctggagcaggagcgttatgaggatattctagaattgcagagtgaggagccagaaaatcttttgaccaagtggatgattgctcgttcttatcaagaaatggacgatttggatactgcttatgagtattatcaagagttgacaggagatttgaaggacaatccagaatttctggaacactatatctatctcttgcgtgaattgggacattttgaagaagcaaaagtccatgctcacacttacttaaaactggttccagatgatgtgcaaatgcaagaactgtttgagagattg

SEQ ID NO: 3068 - protein, 414 aa, Streptococcus pneumoniae
  TPR domain protein; Cellular location: cytoplasm; Similar to strain R6 sequence 15904024 (e-149)
MRKSRVNNSQQMLQALEEQDLTKAEHYFAKALENDSSDLLYELATYLEGIGFYPQAKEIYLKIVEDFPEVHLNLAAIASEDGQIEEAFTYLEEIQADSDWYVSSLALKADLYQLEGLTDVAREKLLEALTYSEDSLLILGLAELDSELENYQAAIQAYAQLDNRSIYEQTGISTYQRIGFAYAQLGKFETATEFLEKALELEYDDLTAFELASLYFDQEEYQKATLYFKQLDTISPDFEGYEYGYSQALHKEHQVQEALRIAKQGLEKNPFETRLLLAASQFSYELHDASGAENYLLTAKEDAEDTEEILLRLATIYLEQERYEDILELQSEEPENLLTKWMIARSYQEMDDLDTAYEYYQELTGDLKDNPEFLEHYIYLLRELGHFEEAKVHAHTYLKLVPDDVQMQELFERL

SEQ ID NO: 3069 - DNA, 1071 bp, Streptococcus pneumoniae
ttgggactgaatctttttattttaagtaagattagttttctattttcacctgttttagactttttagcagttgtgatgttgccagtcattttgtctggtttgttatattatttgttgaatcctattgttgattggatggagaagcataaggttaatcgtgttatagctatcactattgtctttgttatcatcgctctctttatcatttggggcttggcagtcgccattccaaatctgcaacgtcaggttttgacctttgcaagaaacgttcctgtttacttagaagatatagataggattgttaatggattggtagcccagcacctgccagatgatttcagacctcaattagagcaagttttgaccaatttttctagccaggctacagttttggcaagtaaggtttcatctcaggcagtcaactgggtgagtgcctttattagcggggcttctcaagtgattgttgccttgattatcgttcctttcatgctcttttatctcttgcgtgatgggaaaggcttgcgtaactatttgacccaattcattccaagaaaattgaaggaacctgttggacaagttttatcagatgtgaatcaacagttgtccaactatgttcgagggcaagtgacagtggctattattgtagcagtaatgtttatcatcttcttcaagattattggtctacgctatgcggttacgctgggggttactgctggtattttaaatctggtcccttatcttggtagctttctagccatgcttcctgctctagtattgggtttgattgctggtccagtcatgcttttgaaagtagtgattgtctttatcgtagaacaaactattgaaggccgttttgtctctccattgattttgggaagtcaattaaacatccaccctattaatgttctctttgttttgttaacttcaggatctatgtttggtatctggggagttttacttggtattccggtttatgcctctgctaaggttgtcatttcagccattttcgaatggtataaggtagtcagtggtctatatgaattagagggtgaggaagtcaagagtgaacaa

SEQ ID NO: 3070 - protein, 357 aa, Streptococcus pneumoniae
  membrane protein; Cellular location: membrane; Similar to strain R6 sequence 15903400 (0.E+01)
MGLNLFILSKISFLFSPVLDFLAVVMLPVILSGLLYYLLNPIVDWMEKHKVNRVIAITIVFVIIALFIIWGLAVAIPNLQRQVLTFARNVPVYLEDIDRIVNGLVAQHLPDDFRPQLEQVLTNFSSQATVLASKVSSQAVNWVSAFISGASQVIVALIIVPFMLFYLLRDGKGLRNYLTQFIPRKLKEPVGQVLSDVNQQLSNYVRGQVTVAIIVAVMFIIFFKIIGLRYAVTLGVTAGILNLVPYLGSFLAMLPALVLGLIAGPVMLLKVVIVFIVEQTIEGRFVSPLILGSQLNIHPINVLFVLLTSGSMFGIWGVLLGIPVYASAKVVISAIFEWYKVVSGLYELEGEEVKSEQ

SEQ ID NO: 3071 - DNA, 99 bp, Streptococcus pneumoniae
ttgtttcaaaaatggtataatgagagaacaatagaaaggaagtatttatggagcaaaaagagaaacattttagcctatcttggtttttcaagtggtttt

SEQ ID NO: 3072 - protein, 33 aa, Streptococcus pneumoniae
  hypothetical protein
MFQKWYNERTIERKYLWSKKRNILAYLGFSSGF

SEQ ID NO: 3073 - DNA, 1011 bp, Streptococcus pneumoniae
atgaaagaaactgtttattttggaacttatacacgtcgtacttctcaagggatttacaaggcagactttgatacagaaactggtcagctttcaaatctagaactttttgcagctgagccaagtccaacctaccttgcctttgaccagcaccaacatttatacactgttggtagccaagacgataaggggggaattgcagcctatcaaactgacgggactgtgttaaatcatgttgttgaagaaggagctccccactgttatgttgctgtcgatgaaaagcgtgatttggtttacgcagctaactatcacaagggacaagtccttgtttataaacgccaggaagatggtagtcttctacttagtgatatggatcaacacagtggccaaggtccacatgaaaatcaagcttccccccatgttcactatacagatttaacacctgaccactatctagtgacctgcgacttgggaactgaccaagtcatcacctatgacctcgatcaagaaggaaaattatctaagctctatacctatcacagcaagccaggagcaggctcacgccatatcattttccataaccactataaaatcgcttatctcatttgtgaactcaatagtactatcgaagttttaatctacgatggcgttggcgaatttgaacgtatgcaggtcatttcaactttaccggaagcttacgaaggctttaatggaaccgctgctattcatctctctaaagacggtaaatacctctacgcttctaaccgtggccatgattctatcgcagtatataccatccttgcggacggtagcttagagttattagaaatcgttccaacgcatggtcagactccacgtgattttgatttgacacccgaccaaaaatttctcattgttgtccatcaagactctgacaatgcaactgtctttaaacgtaattgtgacaatggtcgtctagcagaactctccaacgacttccatgttcccgaagcagtctgcatccgttttgctcct

SEQ ID NO: 3074 - protein, 337 aa, Streptococcus pneumoniae
  conserved hypothetical protein; Cellular location: cytoplasm; Similar to strain R6 sequence 15903401 (0.E+01)
MKETVYFGTYTRRTSQGIYKADFDTETGQLSNLELFAAEPSPTYLAFDQHQHLYTVGSQDDKGGIAAYQTDGTVLNHVVEEGAPHCYVAVDEKRDLVYAANYHKGQVLVYKRQEDGSLLLSDMDQHSGQGPHENQASPHVHYTDLTPDHYLVTCDLGTDQVITYDLDQEGKLSKLYTYHSKPGAGSRHIIFHNHYKIAYLICELNSTIEVLIYDGVGEFERMQVISTLPEAYEGFNGTAAIHLSKDGKYLYASNRGHDSIAVYTILADGSLELLEIVPTHGQTPRDFDLTPDQKFLIVVHQDSDNATVFKRNCDNGRLAELSNDFHVPEAVCIRFAP

SEQ ID NO: 3075 - DNA, 417 bp, Streptococcus pneumoniae
atggctcagttaactgtccagatcgtgacaccagatggtctcgtctatgatcaccatgccagctatgtatcggttcgaactctggatggtgagatggggatcttgccacgacatgaaaatatgattgcggttttagcagttgatgaagtaaaggtaaaacgtatcgatgataaagatcacgtgaactggattgcagtaaacggtggcgttattgaaattgccaatgatatgatcacaatcgtcgctgactctgcagaacgtgctcgtgatatcgatatcagtcgtgcagaacgtgccaaacttcgtgcagaacgtgcaattgaagaagcacaagacaaacatttgattgaccaagaacgtcgtgctaagattgctttgcaacgtgctattaaccgtattaatgtcggaaatagacta

SEQ ID NO: 3076 - protein, 139 aa, Streptococcus pneumoniae
  ATP synthase F1, epsilon subunit (atpC); Cellular location: cytoplasm; Similar to strain R6 sequence 15903402 (2.E-74)
MAQLTVQIVTPDGLVYDHHASYVSVRTLDGEMGILPRHENMIAVLAVDEVKVKRIDDKDHVNWIAVNGGVIEIANDMITIVADSAERARDIDISRAERAKLRAERAIEEAQDKHLIDQERRAKIALQRAINRINVGNRL

SEQ ID NO: 3077 - DNA, 1404 bp, Streptococcus pneumoniae
atgagttcaggtaaaattgctcaggttatcggtcccgttgtagacgttttgtttgcagcaggggaaaaacttcctgagattaacaatgcacttgtcgtctacaaaaatgacgaaagaaaaacaaaaatcgtccttgaagtagccttggagttaggagatggtatggttcgtactatcgccatggaatcaacagatgggttgactcgtggaatggaagtattggacacaggtcgtccaatctctgtaccagtaggtaaagaaactttgggacgtgtcttcaacgttttgggagataccattgacttggaagctccttttacagaagacgcagagcgtcagccaattcataaaaaagctccaacttttgatgagttgtctacctcttctgaaatccttgaaacagggatcaaggttattgaccttcttgccccttaccttaaaggtggtaaagttggacttttcggtggtgccggagttggtaaaactgtcttaatccaagaattgattcacaacattgcccaagagcacggtggtatttcagtatttgctggtgttggggaacgtactcgtgaggggaatgacctttactgggaaatgaaagaatcaggcgttatcgagaaaacagccatggtctttggtcagatgaatgagccaccaggagcacgtatgcgtgttgcccttactggtttgacaatcgctgaatacttccgtgatgtggaaggccaagacgtgcttctctttatcgataatatcttccgtttcactcaggctggttcagaagtatctgcccttttgggtcgtatgccatcagccgttggttaccaaccaacacttgctacggaaatgggtcaattgcaagaacgtatcacatcaaccaagaagggttctgtaacctctatccaggctatctatgtgccagcggatgactatactgacccagcgccagcaacagccttcgctcacttggattcaacaacaaacttggaacgtaagttggtacaattgggtatctacccagccgttgacccacttgcttcaagctcacgtgccttggcacctgaaatcgttggagaagagcactatgcagttgctgctgaagtaaaacgtgtccttcaacgttaccatgaattgcaagatatcattgctatccttggtatggatgagctttctgatgaagaaaagaccttggttgctcgcgcccgtcgtatccagttcttcttgtcacaaaacttcaacgttgcggaacaatttactggtcagccaggttcttatgttccagttgctgaaactgtacgtggctttaaggaaatccttgatggtaaatacgaccacttgccagaagatgccttccgtggtgtaggttctatcgaagatgtgattgcaaaagctgaaaaaatgggattt

SEQ ID NO: 3078 - protein, 468 aa, Streptococcus pneumoniae
  ATP synthase F1, beta subunit (atpD); Cellular location: cytoplasm; Similar to strain R6 sequence 15903403 (0.E+01)
MSSGKIAQVIGPVVDVLFAAGEKLPEINNALVVYKNDERKTKIVLEVALELGDGMVRTIAMESTDGLTRGMEVLDTGRPISVPVGKETLGRVFNVLGDTIDLEAPFTEDAERQPIHKKAPTFDELSTSSEILETGIKVIDLLAPYLKGGKVGLFGGAGVGKTVLIQELIHNIAQEHGGISVFAGVGERTREGNDLYWEMKESGVIEKTAMVFGQMNEPPGARMRVALTGLTIAEYFRDVEGQDVLLFIDNIFRFTQAGSEVSALLGRMPSAVGYQPTLATEMGQLQERITSTKKGSVTSIQAIYVPADDYTDPAPATAFAHLDSTTNLERKLVQLGIYPAVDPLASSSRALAPEIVGEEHYAVAAEVKRVLQRYHELQDIIAILGMDELSDEEKTLVARARRIQFFLSQNFNVAEQFTGQPGSYVPVAETVRGFKEILDGKYDHLPEDAFRGVGSIEDVIAKAEKMGF

SEQ ID NO: 3079 - DNA, 876 bp, Streptococcus pneumoniae
atggcagtatctctaaatgatattaaaacaaaaatcgcctcaacaaaaaatacgagtcaaatcactaatgccatgcaaatggtatcggctgctaagctaggtcgttctgaagaagctgctcgcaacttccaagtttacgctcagaaagtgcgtaaacttttgacagatatccttcatggtaatggagctggtgcttcaactaatccgatgttgattagccgttctgtgaagaagacaggctatatcgttatcacttcagaccgcggtttggttggaggttataattcctctattttgaaagctgttatggagttgaaagaagaataccacccagacggtaaaggttttgaaatgatctgtatcggtgggatgggagctgatttctttaaggctcgcggtattcaaccactttatgaattacgtggcttgtcagaccaacctagctttgatcaagttcgtaagattatttcaaaaactgttgaaatgtaccaaaatgaactctttgatgagctttatgtttgctacaaccaccatgtcaatacgctaaccagtcaaatgcgtgtggaacaaatgcttccgattgttgacttggatccaaatgaagcggatgaagagtacagcttgacttttgaattggaaaccagccgagaagaaattctggagcagttgttgcctcagtttgcagaaagtatgatttacggtgccattatcgatgccaagacagctgagaatgctgcgggcatgacagccatgcaaacagcgacagataatgctaagaaagtcatcaatgatttgacaattcagtataaccgtgccagacaggcggcgattacacaagaaattacagaaatcgtagcaggtgctagtgccttagaa

SEQ ID NO: 3080 - protein, 292 aa, Streptococcus pneumoniae
  ATP synthase F1, gamma subunit (atpG); Cellular location: cytoplasm; Similar to strain R6 sequence 15903404 (e-163)
MAVSLNDIKTKIASTKNTSQITNAMQMVSAAKLGRSEEAARNFQVYAQKVRKLLTDILHGNGAGASTNPMLISRSVKKTGYIVITSDRGLVGGYNSSILKAVMELKEEYHPDGKGFEMICIGGMGADFFKARGIQPLYELRGLSDQPSFDQVRKIISKTVEMYQNELFDELYVCYNHHVNTLTSQMRVEQMLPIVDLDPNEADEEYSLTFELETSREEILEQLLPQFAESMIYGAIIDAKTAENAAGMTAMQTATDNAKKVINDLTIQYNRARQAAITQEITEIVAGASALE

SEQ ID NO: 3081 - DNA, 1503 bp, Streptococcus pneumoniae
ttggcaattaacgcacaagaaatcagcgctttaattaagcaacaaattgaaaatttcaaacccaattttgatgtgactgaaacaggtgttgtaacctatatcggggacggtatcgcgcgtgctcacggccttgaaaatgtcatgagtggagagttgttgaattttgaaaacggctcttatggtatggctcaaaacttggagtcaacagacgttggtattatcatcctaggtgactttacagatatccgtgaaggcgatacaatccgccgtacagggaaaatcatggaagtccctgtaggtgaaagtctgattggtcgtgttgtggatccgcttggtcgtccagttgacggtcttggagaaatccacactgataaaactcgtccagtagaagcaccagctcctggtgttatgcaacgtaagtctgtttcagaaccattgcaaactggtttgaaagctattgacgcccttgtaccgattggtcgtggtcaacgtgagttgattatcggtgaccgtcagacagggaaaacaaccattgcgattgatacaatcttgaaccaaaaagatcaagatatgatctgtatctacgtcgcgattggacaaaaagaatcaacagttcgtacgcaagtagaaacacttcgtcagtacggtgccttggactacacaatcgttgtgacagcctctgcttcacaaccatctccattgctcttcctagctccttatgctggggttgctatggcggaagaatttatgtatcaaggtaagcatgttttgattgtatacgatgatctatcaaaacaagcggtagcttatcgtgaactgtcgctcttgcttcgtcgtcctccaggtcgtgaagccttcccaggggatgttttctatctccacagccgtttgcttgagcgctcagctaaagtttctgatgaacttggtggtggatcaattacagccctaccatttatcgagacacaagcaggagatatctcagcctatatcgcaaccaacgtgatttctatcactgatggacaaatcttccttggcgatggcctcttcaatgcaggtattcgtccagccatcgatgcgggttcatctgtatctcgtgtaggtggttctgcacaaatcaaagccatgaagaaggttgctggtacacttcgtatcgaccttgcttcataccgtgagttggaagcctttactaagtttggttctgacttggacgcagcaacacaggctaagttgaaccgtggacgtcgtaccgttgaggtcttgaaacaacctgttcacaaaccattacctgttgagaaacaagtaaccattctttatgctttgacacatggtttcttggatactgttccagtagatgatattgttcgtttcgaggaagagttccatgccttctttgatgctcaacatccagagattttggaaaccattcgtgatacaaaagacttgccagaagaagcagtcttggatgctgcgattacagagtttctcaatcaatctagcttccaa

SEQ ID NO: 3082 - protein, 501 aa, Streptococcus pneumoniae
  ATP synthase F1, alpha subunit (atpA); Cellular location: cytoplasm; Similar to strain R6 sequence 15903405 (0.E+01)
MAINAQEISALIKQQIENFKPNFDVTETGVVTYIGDGIARAHGLENVMSGELLNFENGSYGMAQNLESTDVGIIILGDFTDIREGDTIRRTGKIMEVPVGESLIGRVVDPLGRPVDGLGEIHTDKTRPVEAPAPGVMQRKSVSEPLQTGLKAIDALVPIGRGQRELIIGDRQTGKTTIAIDTILNQKDQDMICIYVAIGQKESTVRTQVETLRQYGALDYTIVVTASASQPSPLLFLAPYAGVAMAEEFMYQGKHVLIVYDDLSKQAVAYRELSLLLRRPPGREAFPGDVFYLHSRLLERSAKVSDELGGGSITALPFIETQAGDISAYIATNVISITDGQIFLGDGLFNAGIRPAIDAGSSVSRVGGSAQIKAMKKVAGTLRIDLASYRELEAFTKFGSDLDAATQAKLNRGRRTVEVLKQPVHKPLPVEKQVTILYALTHGFLDTVPVDDIVRFEEEFHAFFDAQHPEILETIRDTKDLPEEAVLDAAITEFLNQSSFQ

SEQ ID NO: 3083 - DNA, 534 bp, Streptococcus pneumoniae
atggacaagaaaacagtaaaggtaattgaaaaatacagcatgccttttgtccaattggtacttgaaaaaggagaagaagaccgtatcttttcagacttgactcaaatcaagcaagttgttgaaaaaacaggtctgccttcttttttaaaacaagtggcagtagacgagtcggataaggaaaaaacaattgcttttttccaagattctgtgtcgcctttattacaaaactttatccaggttctggcctacaatcacagagcaaatcttttttatgatgtgcttgtagattgcttgaaccgacttgaaaaagaaacaaatcgatttgaagtgacgattacgtctgctcatcctctaactgatgaacagaagactcgtttgctccctttgattgagaaaaaaatgtctctgaaagtaaggagtgtaaaagaacaaatcgatgaaagtctcattggtggttttgtcatttttgccaatcacaagacaattgatgtgagtattaaacaacaacttaaagttgttaaagaaaatttgaaa

SEQ ID NO: 3084 - protein, 178 aa, Streptococcus pneumoniae
  ATP synthase F1, delta subunit (atpH); Cellular location: cytoplasm; Similar to strain R6 sequence 15903406 (1.E-96)
MDKKTVKVIEKYSMPFVQLVLEKGEEDRIFSDLTQIKQVVEKTGLPSFLKQVAVDESDKEKTIAFFQDSVSPLLQNFIQVLAYNHRANLFYDVLVDCLNRLEKETNRFEVTITSAHPLTDEQKTRLLPLIEKKMSLKVRSVKEQIDESLIGGFVIFANHKTIDVSIKQQLKVVKENLK

SEQ ID NO: 3085 - DNA, 492 bp, Streptococcus pneumoniae
atgcacgtaacagtaggtgaattaattggtaattttattttaatcactggctcttttattcttttgctagtcttgattaaaaaatttgcatggtctaatattacaggcattttcgaagaaagagctgaaaaaattgcttcagatattgacagagctgaagaagcccgtcaaaaagcagaagtattggctcaaaaacgcgaagatgaattggctggtagccgtaaagaagctaagacaatcattgaaaatgcaaaggaaacagctgagcaaagtaaggctaatatcttagcagatgctaaactagaagcaggacacttaaaagaaaaagccaatcaagaaattgctcaaaataaagtagaagctttacagagtgttaagggtgaggtcgcagatttgaccatcagcttagctggtaaaatcatctcacaaaaccttgacagtcatgcccataaagcactcattgatcagtatatcgatcagctaggagaagct

SEQ ID NO: 3086 - protein, 164 aa, Streptococcus pneumoniae
  ATP synthase F0, B subunit (atpF); Cellular location: membrane; Similar to strain R6 sequence 15903407 (2.E-86)
MHVTVGELIGNFILITGSFILLLVLIKKFAWSNITGIFEERAEKIASDIDRAEEARQKAEVLAQKREDELAGSRKEAKTIIENAKETAEQSKANILADAKLEAGHLKEKANQEIAQNKVEALQSVKGEVADLTISLAGKIISQNLDSHAHKALIDQYIDQLGEA

SEQ ID NO: 3087 - DNA, 714 bp, Streptococcus pneumoniae
atggaagaaagtattaatccaatcatctctattggtcctgttatcttcaatctgactatgttagccatgactttgttgattgtgggagttatttttgtctttatttattgggcaagccgcaatatgaccttgaaacccaaaggaaagcaaaatgtacttgagtatgtctatgactttgttattggatttacagaacctaacattggttcgcgctacatgaaagattactcactctttttcctttgtttattccttttcatggtgattgccaataaccttggcttaatgacaaagcttcaaacgatcgatgggactaactggtggagttcgccaaccgctaatttacagtatgacttaaccttatcttttcttgtcattttgttgacacatatagaaagcgttcgtcgtcgtggatttaaaaaaagtataaaatcttttatgagtcctgtttttgtcataccgatgaatatcttggaagaatttacaaacttcttatctttggctttgcggatttttgggaatatctttgcaggagaggtcatgacgagtttgttacttcttctttcccaccaagctatttattggtatccagtagcctttggagctaatttggcttggactgcattttctgtctttatttcctgcatccaagcttatgtttttactcttttgacatctgtgtatttagggaataagattaatattgaagaggaa

SEQ ID NO: 3088 - protein, 238 aa, Streptococcus pneumoniae
  ATP synthase F0, A subunit (atpB); Cellular location: membrane; Similar to strain R6 sequence 15903408 (e-135)
MEESINPIISIGPVIFNLTMLAMTLLIVGVIFVFIYWASRNMTLKPKGKQNVLEYVYDFVIGFTEPNIGSRYMKDYSLFFLCLFLFMVIANNLGLMTKLQTIDGTNWWSSPTANLQYDLTLSFLVILLTHIESVRRRGFKKSIKSFMSPVFVIPMNILEEFTNFLSLALRIFGNIFAGEVMTSLLLLLSHQAIYWYPVAFGANLAWTAFSVFISCIQAYVFTLLTSVYLGNKINIEEE

SEQ ID NO: 3089 - DNA, 198 bp, Streptococcus pneumoniae
atgaatttaacatttttaggcttatgtattgcctgtatgggcgtatctgtcggtgaaggtttattgatgaatggactgtttaaatcagtagcacgccaaccagatatgctttctgagtttcgtagtttgatgtttttaggtgttgcctttattgaaggaactttctttgtaactcttgtcttctcatttattatcaaa

SEQ ID NO: 3090 - protein, 66 aa, Streptococcus pneumoniae
  ATP synthase F0, C subunit (atpE); Cellular location: membrane; Similar to strain R6 sequence 15903409 (3.E-33)
MNLTFLGLCIACMGVSVGEGLLMNGLFKSVARQPDMLSEFRSLMFLGVAFIEGTFFVTLVFSFIIK

SEQ ID NO: 3091 - DNA, 105 bp, Streptococcus pneumoniae
ttgtcaacttttaaccgctattggaagcgtttaataaaaattatttccattttgctaaatttcaagttcaagttagccatccagaagtcttctctgggtgacttg

SEQ ID NO: 3092 - protein, 35 aa, Streptococcus pneumoniae
  hypothetical protein
MSTFNRYWKRLIKIISILLNFKFKLAIQKSSLGDL

SEQ ID NO: 3093 - DNA, 153 bp, Streptococcus pneumoniae
atgactcccaaagaagtcgcattcatcgaaaagtggattaacaactatcctaaaaaatgcttggactacaagtcacccagagaagacttctggatggctaacttgaacttgaaatttagcaaaatggaaataatttttattaaacgcttccaa

SEQ ID NO: 3094 - protein, 51 aa, Streptococcus pneumoniae
  transposase, putative
MTPKEVAFIEKWINNYPKKCLDYKSPREDFWMANLNLKFSKMEIIFIKRFQ

SEQ ID NO: 3095 - DNA, 567 bp, Streptococcus pneumoniae
ttgaccaaggaactaaaggaaaagattctccactatcataaccaaaaattttcgcctgaaatgatggttatggctaaaggggttaacgtgggaatttcaaccatttactattggattcatcatggaaaattggggttaagcaagcaggatttgctttaccctagaaaaggaaaagcgcttaagaaacaggctagcaccaactttaaacctgctggtcaatccatcgaacagcggcctgaagctatcaatcttcgcttggagaatgggcattatgagattgatacggttctacttacgagatcgaaaaactactgcttgattgtcttgacggatcgaaagagtagacatcagatcatccgattgattccaaataaaagtgctgaggtggtcaatcaggctctaaaactcatcttaaaacaacacaagattctttccatcacggcagataatggaacggaattcaatcgcttgtttgatatattttctgaggagcacatctattatgcgcacccctatgcctcttgggaaaggggaactaatgagaatcacaacaggctcattcgtaga

SEQ ID NO: 3096 - protein, 189 aa, Streptococcus pneumoniae
  insertion sequence IS1239 putative transposase
MTKELKEKILHYHNQKFSPEMMVMAKGVNVGISTIYYWIHHGKLGLSKQDLLYPRKGKALKKQASTNFKPAGQSIEQRPEAINLRLENGHYEIDTVLLTRSKNYCLIVLTDRKSRHQIIRLIPNKSAEVVNQALKLILKQHKILSITADNGTEFNRLFDIFSEEHIYYAHPYASWERGTNENHNRLIRR

SEQ ID NO: 3097 - DNA, 1004 bp, Streptococcus pneumoniae
atgcaagacaattatactacaaaagccaaacatttgacaatcgatagccgtcgcttaatcgaaagatggaaaaaagaaggaaaatcaaatagagaaattgcctctctacttggaaaagctcctcaaactatcacactgaaatcaagcgtgggacagtccgacaatgtcttggaaaagggcgcttcaaagaggtttattctgccgactacgctcaacagtcttatgaaaacaatcgcaagcgctcggtcaagaaatcaagcttgaccaaggaactaaaggaaaagattctccactatcataaccaaaaattttcgcctgaaatgatggttatggctaaaggggttaacgtgggaatttcaaccatttactattggattcatcatggaaaattggggttaagcaagcaggatttgctttaccctagaaaaggaaaagcgcttaagaaacaggctagcaccaactttaaacctgctggtcaatccatcgaacagcggcctgaagctatcaatcttcgcttggagaatgggcattatgagattgatacggttctacttacgagatcgaaaaactactgcttgattgtcttgacggatcgaaagagtagacatcagatcatccgattgattccaaataaaagtgctgaggtggtcaatcaggctctaaaactcatcttaaaacaacacaagattctttccatcacggcagataatggaacggaattcaatcgcttgtttgatatattttctgaggagcacatctattatgcgcacccctatgcctcttgggaaaggggaactaatgagaatcacaacaggctcattcgtagatagttacctaagggaaccaagaaaatgactcccaaagaagtcgcattcatcgaaaagtggattaacaactatcctaaaaaatgcttggactacaagtcacccagagaagacttctggatggctaacttgaacttgaaatttagcaaaatggaaataatttttattaaacgcttccaa

SEQ ID NO: 3098 - protein, 102 aa, Streptococcus pneumoniae
  IS1239, transposase, putative FRAMESHIFT POINT MUTATION
MLYLLFNHKHKKGTEMQDNYTTKAKHLTIDSRRLIERWKKEGKSNREIASLLGKAPQTITLKSSVGQSDNVLEKGASKRFILPTTLNSLMKTIASARSRNQA

SEQ ID NO: 3099 - DNA, 480 bp, Streptococcus pneumoniae
ttgatttctaagacattgttagaaattagattaaattccttaatcgatttgcgcatgttttatttcatttcactatactttagattggaaaataaggaatcacataaatcgcaagaaatagggaatctgattcgtgtttataaccgttcaaaaagagaagaggctgaaagtgagccacttaatctttatgtcgaagatgaaaagggcaatctcctggcaggtttgatagcagagacttttggaaattggctagaaatcgagtatttgtttgtaaaagaggaactgcgagggcaaggaatcggttcaaaactattgcaacaggcagaaagtgaagctaagaatcgaaattgttgttttgcctttgtcaatacttaccagttccaggcaccggacttttatcagaaacatggctacaaggaagttttttctttgcaagactgtctctacattaggcaaagatattattaccaaaagaatctg

SEQ ID NO: 3100 - protein, 160 aa, Streptococcus pneumoniae
  acetyltransferase, GNAT family; Cellular location: cytoplasm; Similar to strain R6 sequence 15903411 (4.E-80)
MISKTLLEIRLNSLIDLRMFYFISLYFRLENKESHKSQEIGNLIRVYNRSKREEAESEPLNLYVEDEKGNLLAGLIAETFGNWLEIEYLFVKEELRGQGIGSKLLQQAESEAKNRNCCFAFVNTYQFQAPDFYQKHGYKEVFSLQDCLYIRQRYYYQKNL

SEQ ID NO: 3101 - DNA, 360 bp, Streptococcus pneumoniae
gtgcttcactcactcctttttccattttgctactcttcgaaaatctcttcaaaccacgtcagcgtcgccttgccgtatgtatggttactgactttgtcagtttcatctacaacctcaaaacagtgttttgagctaacttcgtcagtttcatctacaacctcaaaactatgttttgagctgacttcgtcagtttcatctacaacctcaaaaccatgttttgagccgacttcgtcagtttcatctacaacctcaaaactatgttttgagctgacttcgtcagttctatctacaacctcaaaacagtgttttgagcaacctgcggctagtttcctagtttgctctttgatttttattgagtat

SEQ ID NO: 3102 - protein, 120 aa, Streptococcus pneumoniae
  box element
MLHSLLFPFCYSSKISSNHVSVALPYVWLLTLSVSSTTSKQCFELTSSVSSTTSKLCFELTSSVSSTTSKPCFEPTSSVSSTTSKLCFELTSSVLSTTSKQCFEQPAASFLVCSLIFIEY

SEQ ID NO: 3103 - DNA, 480 bp, Streptococcus pneumoniae
atggcagaaaaaacatatcctatgacccttgaggaaaaggaaaaacttgaaaaagaattagaagaattgaaattggttcgtcgaccagaagtggtagaacgcattaagattgcccgttcatacggtgacctttcagaaaacagtgagtacgaagcagctaaggatgaacaagcctttgtcgaaggacaaatctctagcttagaaacaaaaatccgctatgctgaaatcgtcaatagcgacgcagttgcccaggacgaagtagcgattggtaaaacagtcaccatccaagaaattggtgaggacgaagaagaagtttatattatcgtaggttcagctggtgcagatgcctttgtaggtaaggtttcaaatgaaagcccaattgggcaggccttgattggcaagaaaacaggtgatacagcaaccattgaaacgcctgttggtagctatgatgtaaaaatcttgaaggttgaaaaaacagcc

SEQ ID NO: 3104 - protein, 160 aa, Streptococcus pneumoniae
  transcription elongation factor GreA (greA); Cellular location: cytoplasm; Similar to strain R6 sequence 15903412 (2.E-84)
MAEKTYPMTLEEKEKLEKELEELKLVRRPEVVERIKIARSYGDLSENSEYEAAKDEQAFVEGQISSLETKIRYAEIVNSDAVAQDEVAIGKTVTIQEIGEDEEEVYIIVGSAGADAFVGKVSNESPIGQALIGKKTGDTATIETPVGSYDVKILKVEKTA

SEQ ID NO: 3105 - DNA, 1653 bp, Streptococcus pneumoniae
ttgagtgaaaagtcaagagaagaagagaaattaagctttaaagagcagattctgagagatttagaaaaagtaaaaggctatgatgaagttctgaaagaagatgaggcagtagttcgcactcctgcaaatgaaccttcaactgaagaactcatggctgattccttgtcaacggtagaggagattatgagaaaagctcctaccgtgcctactcacccaagtcaaggtgtaccagcttctccagcagatgagattcaaagagaaactcctggtgttccaagtcatccaagtcaagatgtaccttcttctccagcggaagaaagtggatcaagaccaggtccaggtcctgttagacctaagaaacttgaaagagaatacaatgaaaccccaacaagggtagctgtttcctatacgacggcagagaaaaaagcagaacaagcaggtccagaaacacctacgcctgctacagaaacagtggatatcatcagagatacatcacgtcgtagccgtagagaaggagcaaaacccgttaagcctaagaaagagaagaagtcacatgtgaaagcttttgtgatttcattccttgtattccttgccttgctctcagcaggtggttactttggttaccagtacgtgctagattccttattacctatcgatgctaattctaagaaatatgtgacggttggaattccagaaggttcaaacgttcaagaaatcggtacgacgcttgaaaaagctggtttggtaaagcatggtctgatttttagtttttatgccaagtataaaaattataccgacttgaaagcaggttactacaatttgcaaaagagtatgagtacagaagacttactcaaagagttgcaaaaaggtggaacagatgaaccgcaagaacctgtacttgcgactttgacaattccagaaggttataccttggatcagattgctcaagctgtgggtcaattgcaaggtgacttcaaagagtctttgacagcggaggctttcttggctaaagttcaagatgagacgtttatcagtcaagcagtagcgaaatatcctactttactggaaagtttgcctgtaaaagacagcggtgcgcgttatcgtttggaaggataccttttcccagctacatactctatcaaggaaagcacaactattgagagcttgattgatgagatgttagctgctatggataagaacctatctccttactatagtactatcaaatctaaaaacttgactgtcaatgagttgttgaccattgcttccttggtcgaaaaagaaggtgccaagacagaagatcgtaagctcattgcaggtgtattctacaatcgtttgaatcgtgatatgccacttcaaagtaatattgcaatcttgtatgcccaaggaaaactggggcaaaatatcagtctagctgaggatgttgcgattgataccaacattgattcaccttataatgtttataaaaatgtaggtctcatgcctggtccagtcgatagtccaagtctggatgcgattgagtcaagcatcaatcaaactaagagcgataacctctactttgtagcagatgtcacagaaggcaaggtctactatgctaacaatcaagaagaccacgaccgcaatgtcgctgaacatgtcaacagcaaattaaac

SEQ ID NO: 3106 - protein, 551 aa, Streptococcus pneumoniae
  conserved hypothetical protein; Cellular location: membrane; Similar to strain R6 sequence 15903413 (0.E+01)
MSEKSREEEKLSFKEQILRDLEKVKGYDEVLKEDEAVVRTPANEPSTEELMADSLSTVEEIMRKAPTVPTHPSQGVPASPADEIQRETPGVPSHPSQDVPSSPAEESGSRPGPGPVRPKKLEREYNETPTRVAVSYTTAEKKAEQAGPETPTPATETVDIIRDTSRRSRREGAKPVKPKKEKKSHVKAFVISFLVFLALLSAGGYFGYQYVLDSLLPIDANSKKYVTVGIPEGSNVQEIGTTLEKAGLVKHGLIFSFYAKYKNYTDLKAGYYNLQKSMSTEDLLKELQKGGTDEPQEPVLATLTIPEGYTLDQIAQAVGQLQGDFKESLTAEAFLAKVQDETFISQAVAKYPTLLESLPVKDSGARYRLEGYLFPATYSIKESTTIESLIDEMLAAMDKNLSPYYSTIKSKNLTVNELLTIASLVEKEGAKTEDRKLIAGVFYNRLNRDMPLQSNIAILYAQGKLGQNISLAEDVAIDTNIDSPYNVYKNVGLMPGPVDSPSLDAIESSINQTKSDNLYFVADVTEGKVYYANNQEDHDRNVAEHVNSKLN

SEQ ID NO: 3107 - DNA, 492 bp, Streptococcus pneumoniae
atgaaaatcagacaagcaagattagaagatttggatcggattgttgaacttgaatttgaaaatttttcggtcgaagaagccattcctccttctgtctttgaagcacatttgagagaaattcagacctcttttctggttgctgaaaaagaaggaagaatcatgggttatatcgaaggaccagttggcctgcaccgccatctgcaagaccagtcttttacagaagaaataaaagactatagtcatgagcctggtggttatatctctgtgacctgtctgtctattgccaaggaggcacagggactcggactgggccagaaattgctgacagccttgaaagaagttgctcttgaagatgagagagatggcattaatctaacctgtcatgactatctcatcgcctactatgaaaaacatggatttgtcaacgaaggccagtcccagtcaacctttgcaggggaaacatggtatgatatggtctgggaaatgaaaaaa

SEQ ID NO: 3108 - protein, 164 aa, Streptococcus pneumoniae
  acetyltransferase, GNAT family; Cellular location: cytoplasm; Similar to strain R6 sequence 15903414 (1.E-93)
MKIRQARLEDLDRIVELEFENFSVEEAIPPSVFEAHLREIQTSFLVAEKEGRIMGYIEGPVGLHRHLQDQSFTEEIKDYSHEPGGYISVTCLSIAKEAQGLGLGQKLLTALKEVALEDERDGINLTCHDYLIAYYEKHGFVNEGQSQSTFAGETWYDMVWEMKK

SEQ ID NO: 3109 - DNA, 462 bp, Streptococcus pneumoniae
atggaaattccaattaagatcattcaggcaagcaagtctgatttgcctgagataggggcacttcagacctcgtcttttccagctgaaaagcagcaactttcccatattttagaagaaagtatccgtaagtgtgcggatacctttcttctagctagggatgaaaatcaacttttaggctatattttatcaagtccccagtcagacaatccgcaatgtctaaaagtacattctttagtcatcgagtttgaccatcagagacagggcctgggaacacttcttcttgcagccttgaaagaggtggcagttgagctggattacaaagggattcgtttggagagtcctgatgagctgctttcctattttgaaatgaacggttttgttgatgaagaagcaactttgctctatgcaactagccagggctatagtatgatttggtttaatcccttttatctggaggaacaa

SEQ ID NO: 3110 - protein, 154 aa, Streptococcus pneumoniae
  acetyltransferase, GNAT family; Cellular location: cytoplasm; Similar to strain R6 sequence 15903415 (4.E-84)
MEIPIKIIQASKSDLPEIGALQTSSFPAEKQQLSHILEESIRKCADTFLLARDENQLLGYILSSPQSDNPQCLKVHSLVIEFDHQRQGLGTLLLAALKEVAVELDYKGIRLESPDELLSYFEMNGFVDEEATLLYATSQGYSMIWFNPFYLEEQ

SEQ ID NO: 3111 - DNA, 1332 bp, Streptococcus pneumoniae
atgtcaaagacatatcattttatcggaattaagggatcagggatgagtgccttggccttgatgttgcaccagatggggcacaaggttcagggatcagatgttgaaaagtactactttacccaacgcggtcttgagcaggcaggaattaccattcttccttttgatgaaaaaaatctagacggtgatatggaaattatcgctggaaatgcctttcgtccagataacaacgtcgaaattgcctatgcggaccaaaatggtatcagctacaaacgttaccatgagtttctaggtagctttatgcgtgactttgttagcatgggagtagcaggagcacatggaaaaacttcaacgacaggtatgttgtctcatgtcttgtctcacattacagataccagcttcttgattggagatgggacaggtcgtggttcggccaatgccaaatattttgtctttgaatctgacgaatatgagcgtcacttcatgccttaccacccagaatactctattatcaccaacattgactttgaccatccagattatttcacaagtctcgaggatgtttttaatgcctttaacgactatgccaaacaaatcaccaagggtctttttgtctatggtgaagatgctgaattgcgtaagattacgtctgatgcaccaatttattattatggttttgaagctgaaggcaatgactttgtagctagtgatcttcttcgttcaataactggttcaaccttcaccgttcatttccgtggacaaaacttggggcaattccacattccaacctttggtcgtcacaatatcatgaatgcgacagccgttattggtcttctttacacagcaggatttgatttgaacttggtgcgtgagcacttgaaaacatttgccggtgttaaacgtcgtttcactgagaaaattgtcaatgatacagtgattatcgatgactttgcccaccatccaacagaaattattgcgaccttggatgcggctcgtcagaaatacccaagcaaggaaattgtagcagtctttcaaccgcatacctttacaagaaccattgccttgttggacgactttgcccatgctttaaaccaagcagatgctgtttatctagcgcaaatttatggctcggctcgtgaagtagatcatggtgacgttaaggtagaagacctagccaacaaaatcaacaaaaaacaccaagtgattactgttgaaaatgtttctccactcctagaccatgacaatgctgtttacgtctttatgggagcaggagacatccaaacctatgaatactcatttgagcgtctcttgtctaacttgacaagcaatgttcaa

SEQ ID NO: 3112 - protein, 444 aa, Streptococcus pneumoniae
  UDP-N-acetylmuramate--alanine ligase (murC); Cellular location: outside; Similar to strain R6 sequence 15903416 (0.E+01)
MSKTYHFIGIKGSGMSALALMLHQMGHKVQGSDVEKYYFTQRGLEQAGITILPFDEKNLDGDMEIIAGNAFRPDNNVEIAYADQNGISYKRYHEFLGSFMRDFVSMGVAGAHGKTSTTGMLSHVLSHITDTSFLIGDGTGRGSANAKYFVFESDEYERHFMPYHPEYSIITNIDFDHPDYFTSLEDVFNAFNDYAKQITKGLFVYGEDAELRKITSDAPIYYYGFEAEGNDFVASDLLRSITGSTFTVHFRGQNLGQFHIPTFGRHNIMNATAVIGLLYTAGFDLNLVREHLKTFAGVKRRFTEKIVNDTVIIDDFAHHPTEIIATLDAARQKYPSKEIVAVFQPHTFTRTIALLDDFAHALNQADAVYLAQIYGSAREVDHGDVKVEDLANKINKKHQVITVENVSPLLDHDNAVYVFMGAGDIQTYEYSFERLLSNLTSNVQ

SEQ ID NO: 3113 - DNA, 615 bp, Streptococcus pneumoniae
atgaaacaagaacgatttccattggtgtcagatgacgaggtcatgttgactgaaatgccagtcatgaatctctatgatgagtctgatctgatcagtaatatcaagggtgagtatcgagataaaaattatttagaatgggctcctattgctgaagaaaaaccagtaaaaccgattgaaaagcaagtcgaaaaacctaaaaaggctcctttaggggttaaaaaagaaggaaagagctatgcggaggtggcgcgtgaagaagcgcgtgcggacttgaaaaagaaacgctctgctaactacctaactcaggatttcagccttgcgagacgtcattctcagcccagtctagttagacagggcaatcaaccgacagctcctttccaaaaggaaaatcctggtgaatttgtcaaatatagccaaaaattgacccagtctcattatatcttggcggaagaagttcattctatccctaccaagaatgaagaagtgtcagcacctgctccaaagaaaaacaattatgattttctaaagaagagccaaatctacaataaaaaaagtaaacaaacagaacaagaacgtcgggttgcccaagagttgaatctgaccagaatgacagaa

SEQ ID NO: 3114 - protein, 205 aa, Streptococcus pneumoniae
  conserved domain protein; Cellular location: cytoplasm; Similar to strain R6 sequence 15903417 (e-116)
MKQERFPLVSDDEVMLTEMPVMNLYDESDLISNIKGEYRDKNYLEWAPIAEEKPVKPIEKQVEKPKKAPLGVKKEGKSYAEVAREEARADLKKKRSANYLTQDFSLARRHSQPSLVRQGNQPTAPFQKENPGEFVKYSQKLTQSHYILAEEVHSIPTKNEEVSAPAPKKNNYDFLKKSQIYNKKSKQTEQERRVAQELNLTRMTE

SEQ ID NO: 3115 - DNA, 3096 bp, Streptococcus pneumoniae
atggctaaattgattccggggaaaattcgtatcgaaggtgttgccctttatgaaactggtaaggttgatatcatcaaggaaaagaacaatcggctctacgctcgcgttgcagaagaagaactgcgctatagtttagaggatgatttggttttttgtgcctgtgatttttttcaaaagaggggctactgtgtgcatttggcagcgctagagcattttctgaaaaatgatgagcgtggtcaggaaatcttgtggagtctggaagaaggtcatgaagaaaaagaggctgttgaaaccaaggtgaccttgggtggcaagtttttggatcgaattttatctccaaaatcagaatgcgcctatgagttatcagctgtgggtcaggtggaagcaggaaccaatcatatcttgtggactctgagaatcggccaaatcaatagccaaaaatactatgtcattcgggatattccactttttttaaggattgtcgagcagagaaagtcgtatatgattggcaagatttatgaggagtctctttcttgggaagcctttgatgatgccagccaagaacttttgactttcttgcacggactaacggaggaagggctggttccagacctctttttccaaaaccaaggtcggcacctctttttccctctgaccttttttgagcagggtgtgaatttactgatggccttgccccattttcaatttgaccatcaagtggatagctaccaaaccctgctttttcaggatatgcatgctgatgccaatctatttgcctttacagtaacagaatactcggattattttgaaatggaaatcagtgagagtcctagggtcaatgtcttttatcagggagcagtacttttccataaaggtcaggtttattttttaacagaccagcagatgcgtcttctcaaggaaattaaagcgttacctgtgggtcaacaaggaaagaaatacctgcaatttgatagcagtgatcgagacaaattggcctcctgtctgactctttttatccagatgggcaccgtttcagctccagaacgtctacaaatcaaaacttttgcgccctctttttactttgacagggaagaagataatcggattcgtttagaaattcagtttgattatggaaatagacaggtatctagccgacaagagctagaagaattacccttttcaagtgacgcagacttagaagaaagaattttccaagtctgtttggctgcgggctttgaggccgattttcaatcttggcgtcaggccttaaaagcggagtctgtctatcatttttttcatgatatcattccagtctttgaaaaactcgggcatgttgacctatcagataaactagaagagctttatagcctagcgagtcctcaggtgcagattgcctccaagggaggtctcttggaaatccagtttgattttcaaaatattgtccaggaggaaatcgaccaagccatgcaggccttggttgccaatcaggatttttatattgattcgtctaatcaagtttactttttcgatgaagaaaccaagaaaattcgccaaaatctacaggaactggggcaatttgaattaaaagatgggaccttgcaggctcggaaatccttggcctacagtttagctcatctctttgaagggcgagaccgtgtttctttttcacaagaattccagaatctggcccaggatttgacgcatccagaggactttcctttgcaagcaactcaggtcaaggctgacttgcgagattatcaggaaaagggaattggctggttgcagatgctccatcattatggttttggtgggattttggctgatgatatgggacttgggaaaacccttcagaccattgcttttttgactagtcaagtgacaaaagaaagtcgggttttgattctcgctccgtcgggtttgatttacaactgggcagatgagtttcagaaatttgctccacagttggatgtgactgttgttcatggtttgaaagcaagtcgtgaggagattcttgccgagagccatcaaatctatgtgactagctatgccaccttccgtcaggacagtgagttttatcaagggatggcctttgacttccttttcttagatgaggctcaggtcatgaaaaatgcccagaccaagattgcccagaccttgagacaatttgtggtgccgtcggtctttgccttgtcaggaactccgattgaaaaccatctgggtgagttgtggtctattttccaaatcgtcatgcctggacttttgccaagcaagaaagaatttatgaaattgccagcagagcgagtggctcagtttatcaagcctttcgtgatgcgacgcaagaaagaagaagttctgactgaattgccagacttgattgaggtggtttataaaaatgaactggaagaccagcaaaaggctatttaccttgcccagttacaacagatgcgagaccatctggctcaagtgtcagaacaggaatttcagcgaagtcgtgtggaaattttatctggtttgatgcgcttgcgtcaaatatgtgacactcctgccctgtttatggaagattatcagggagccagcggcaaactagatagtctccgagacctactggtacaggtggcagacggcggacaccgtgtcttgattttctctcagttcaagggaatgttggaaaaaattgaacaagaactgccagacttgggcctgacttcctttaaaattacgggttcaaccccagccaaggaaagacaagacatgaccaaggcctttaaccaaggagaaagagatgcctttctgatttccctcaaggctggtggggtcggtctgaacctgacaggtgcagatacagtgatcttggttgacctttggtggaatcctgcggtggaagcgcaagccattggccgtgcccatcggatgggtcaggaagaaacggttgaggtctatcgcttggtgaccaagggaaccattgaagaaaaaattcaggaactccaagaacaaaagaaacatctggtgtcacaagtattggacggcacagagtcacgtggtagtctgaccctagcagaaattagagaaattttgggaatttctgaagccagcact

SEQ ID NO: 3116 - protein, 1032 aa, Streptococcus pneumoniae
  Snf2 family protein; Cellular location: cytoplasm; Similar to strain R6 sequence 15903418 (0.E+01)
MAKLIPGKIRIEGVALYETGKVDIIKEKNNRLYARVAEEELRYSLEDDLVFCACDFFQKRGYCVHLAALEHFLKNDERGQEILWSLEEGHEEKEAVETKVTLGGKFLDRILSPKSECAYELSAVGQVEAGTNHILWTLRIGQINSQKYYVIRDIPLFLRIVEQRKSYMIGKIYEESLSWEAFDDASQELLTFLHGLTEEGLVPDLFFQNQGRHLFFPLTFFEQGVNLLMALPHFQFDHQVDSYQTLLFQDMHADANLFAFTVTEYSDYFEMEISESPRVNVFYQGAVLFHKGQVYFLTDQQMRLLKEIKALPVGQQGKKYLQFDSSDRDKLASCLTLFIQMGTVSAPERLQIKTFAPSFYFDREEDNRIRLEIQFDYGNRQVSSRQELEELPFSSDADLEERIFQVCLAAGFEADFQSWRQALKAESVYHFFHDIIPVFEKLGHVDLSDKLEELYSLASPQVQIASKGGLLEIQFDFQNIVQEEIDQAMQALVANQDFYIDSSNQVYFFDEETKKIRQNLQELGQFELKDGTLQARKSLAYSLAHLFEGRDRVSFSQEFQNLAQDLTHPEDFPLQATQVKADLRDYQEKGIGWLQMLHHYGFGGILADDMGLGKTLQTIAFLTSQVTKESRVLILAPSGLIYNWADEFQKFAPQLDVTVVHGLKASREEILAESHQIYVTSYATFRQDSEFYQGMAFDFLFLDEAQVMKNAQTKIAQTLRQFVVPSVFALSGTPIENHLGELWSIFQIVMPGLLPSKKEFMKLPAERVAQFIKPFVMRRKKEEVLTELPDLIEVVYKNELEDQQKAIYLAQLQQMRDHLAQVSEQEFQRSRVEILSGLMRLRQICDTPALFMEDYQGASGKLDSLRDLLVQVADGGHRVLIFSQFKGMLEKIEQELPDLGLTSFKITGSTPAKERQDMTKAFNQGERDAFLISLKAGGVGLNLTGADTVILVDLWWNPAVEAQAIGRAHRMGQEETVEVYRLVTKGTIEEKIQELQEQKKHLVSQVLDGTESRGSLTLAEIREILGISEAST

SEQ ID NO: 3117 - DNA, 1164 bp, Streptococcus pneumoniae
atgggaaaatatgattttacaagcctgcccaaccgtttagggcaccatacctataaatggaaagaaacagaaacggatagtgaagttctaccagcttggatagcggatatggactttgtggtcttgcctgaaatccgccaagccgtgcaaacttacgcagaccaactggtttatggttatacctatgccagtgaagacttaattaaggaagttcaaaagtgggaagctacacaatacggttacaactttgacaaagaggctcttgtctttatcgagggtgtggtaccagccatctcaacagctattcaaacctttacaaaagaaggcgaggcggttttaattaacacgcctgtctacccaccctttgctcgcagtgtcaagttgaataatcgtagattgattactaattccttagtggaaaaggatagtctgtttgagattgactttgaccaacttgaaaaggatttggtggaagaggaggttaaactctatgttctttgcaaccctcacaatcctggtggacgtgtttgggaaaaagaagtgttggagaagattggccaactctgccaaaaacacggtgttttgttagtttcggatgagattcaccaagatttgaccctctttggtcacaaacaccagtctttcaataccatcaatcctgccttcaaaaattttgctatcgtcttgagcagtgccactaaaacatttaatattgctggaacaaaaaattcctatgcagtcattgaaaatcctaagttgagactggctttccagaaacgcctgttggccaataatcagcatgaaatttcaggcttgggttatttggcgacagaagctgcctatcgatacggtaaagattggctagaggaactcaagcaagtctttgaagaccacatcaattatgtgatggatctatttggaaaagagactaaaatcaaggtcatgaaaccgcaaggtacctacttgatttggcttgacttttcagcttatgacctgactgatgaaacattgcaagagttgttgagaaatgaagccaaggttatcctcaaccgtggtttggattttggagaggaaggaagtctccatgcccgcatcaatatagctatgcccaaatctctgttgcaagaagtctgtcagcggattgtggctacttttgccaaacgt

SEQ ID NO: 3118 - protein, 388 aa, Streptococcus pneumoniae
  aminotransferase, class II; Cellular location: membrane; Similar to strain R6 sequence 15903419 (0.E+01)
MGKYDFTSLPNRLGHHTYKWKETETDSEVLPAWIADMDFVVLPEIRQAVQTYADQLVYGYTYASEDLIKEVQKWEATQYGYNFDKEALVFIEGVVPAISTAIQTFTKEGEAVLINTPVYPPFARSVKLNNRRLITNSLVEKDSLFEIDFDQLEKDLVEEEVKLYVLCNPHNPGGRVWEKEVLEKIGQLCQKHGVLLVSDEIHQDLTLFGHKHQSFNTINPAFKNFAIVLSSATKTFNIAGTKNSYAVIENPKLRLAFQKRLLANNQHEISGLGYLATEAAYRYGKDWLEELKQVFEDHINYVMDLFGKETKIKVMKPQGTYLIWLDFSAYDLTDETLQELLRNEAKVILNRGLDFGEEGSLHARINIAMPKSLLQEVCQRIVATFAKR

SEQ ID NO: 3119 - DNA, 1092 bp, Streptococcus pneumoniae
atgagcaaggaattacacattaacacaattttagcacaagcagggatcaagtctgatgaggcaacaggtgctttggtgacaccacttcatttttcaacgacctatcagcatccagagtttggtcgatctactgggtttgactatacgcgcactaaaaatccaactcgtagtaaggctgaggaagtcttggcggctattgagtcagcagactatgccctagcgactagctcagggatgtcagctattgtactggcctttagcgtctttccagtaggaagtaaggtcttggcagtgcgtgatctttacggtggttcttttcgctggtttaaccaagtggagcaggaaggtcatttccattttacctatgccaatacagaagaagagttgattgccgagttagaaaaggatgtggatgttctctatatcgaaaccccaaccaatcccttgatgttggaatttgatatcgaaaaactagcaaaattggctcatgctaagggtgccaaagtggtggtggacaataccttctatagccctatctaccaacgtccgattgaagatggagcagatatcgttctccattcagcaaccaagtatctagcaggccacaatgatgtcttggctggagtggttgtgaccaatagtttagaactatacgagaagcttttttacaatcttaatacaacaggggcagtcttgtctccatttgacagctaccagttgcttcgtggtctcaagaccttgtctcttcgtatggagcgctcaacagctaacgcccaagaagtggttgcctttttgaaggattctccagcagttaaggaagttctctacactggtcgtggaggcatgatttcctttaaagtagccgatgaaacacgcattcctcatattttgaacagtctcaaggtcttctcttttgcggaaagtttgggtggagtggaaagtcttattacttatccaacgactcaaactcatgctgatattccagcagaggtacgccattcttatggtttgacagatgacctcttgcgtttgtctattgggattgaggatgctagagatttgattgcagatttgcgccaagccatagaagga

SEQ ID NO: 3120 - protein, 364 aa, Streptococcus pneumoniae
  transulfuration enzyme family protein; Cellular location: membrane; Similar to strain R6 sequence 15903420 (0.E+01)
MSKELHINTILAQAGIKSDEATGALVTPLHFSTTYQHPEFGRSTGFDYTRTKNPTRSKAEEVLAAIESADYALATSSGMSAIVLAFSVFPVGSKVLAVRDLYGGSFRWFNQVEQEGHFHFTYANTEEELIAELEKDVDVLYIETPTNPLMLEFDIEKLAKLAHAKGAKVVVDNTFYSPIYQRPIEDGADIVLHSATKYLAGHNDVLAGVVVTNSLELYEKLFYNLNTTGAVLSPFDSYQLLRGLKTLSLRMERSTANAQEVVAFLKDSPAVKEVLYTGRGGMISFKVADETRIPHILNSLKVFSFAESLGGVESLITYPTTQTHADIPAEVRHSYGLTDDLLRLSIGIEDARDLIADLRQAIEG

SEQ ID NO: 3121 - DNA, 150 bp, Streptococcus pneumoniae
gtgattatagcgcatcgtttgtcaacggtaaaagatgtggattgtattttcttcttagaggaggggaaaatcactggctcaggaactcataaggaactactggaaaatcatgagcgttatgctcgttttgtgcaggagcaaatgatagag

SEQ ID NO: 3122 - protein, 50 aa, Streptococcus pneumoniae
  penicillin binding protein, putative
MIIAHRLSTVKDVDCIFFLEEGKITGSGTHKELLENHERYARFVQEQMIE

SEQ ID NO: 3123 - DNA, 1397 bp, Streptococcus pneumoniae
atgaaattaaaattattaagagtagatactaaggtgattatggggagtttcttacttgttctgtctagtctacttgctttgttgcttccccttatcttaaaggatttaatagatgggagttctattgaaaatataggctccaaagtatttcaatcgtttttgatttttattggtcaagccttgttttcttctattggttactatctgtttagtcaatcgggtgaaaaaaagatagcaaaaatcaggaaaaaagtgatagaggggttgatttatgtagagaaatccttctttgataagagccaaagtggggagttgacttctgccattgtcaatgacacgagtgtcattcgtgagtttttaattacgactttcccaaatattattctgagtttagttatggtacttggttccattgtagtcttatttagtcttgattggaatctttctctacttttattcatcactcttccttgtatgatgtttattatcttgcccctttccaatatcagtgaaaagtatagtcgtcgtttacaggaggaaatttaacagggcaattgactgaaaagattcaagaacatgaattaattaagactaaccaagcagagaaaagtgtacaggatgttttggataattgtattgaaagggtacaaaacaattcactgaaatcagatagggttacttcttttgagaccccgtttgctctcttatttatctttgcgactatagctgtgatgctaacctatgggggttatcgggtcagcgcaggatatatatctgtgggaaccttggtttcgtttttgatttacctctttcaattacttaatcctattagtaatatagctaattttgtaactgtttattctaggagcaagggatcttcagttgcactggagaacttgcttgcagttcctaaagaaaaatttgagggaggaaaatcggtatcaggacgagggttgaattttaaccatgtctattttggttatgatgaaaatcgacctgtcttaaaggatattacttgttcaattttcaaggggcaaaaaattgcttttgttggaccatctggatcaggaaaatcaacgattgtgcgtttgttagagcggttttataaaccgctttcaggagatattctaatggagcaatcaagtatatatgattttaacttaaaagaatggagaagtaaaatcgcttgggtttcacaaaataatgcagtcttatctggcagtattcgtgacaatctttgtctcggtttgaatcgcttagtaactgatgatgaattgatgaaagtgctagacttagtatcactaggtgatgagattcgctccatgaaagagggactagatactgaagttggtgaacgcggacgactcttgtcaggggggcgaacgaaagacttcaaa

SEQ ID NO: 3124 - protein, 281 aa, Streptococcus pneumoniae
  ABC transporter, ATP-binding protein FRAMESHIFT
MTEKIQEHELIKTNQAEKSVQDVLDNCIERVQNNSLKSDRVTSFETPFALLFIFATIAVMLTYGGYRVSAGYISVGTLVSFLIYLFQLLNPISNIANFVTVYSRSKGSSVALENLLAVPKEKFEGGKSVSGRGLNFNHVYFGYDENRPVLKDITCSIFKGQKIAFVGPSGSGKSTIVRLLERFYKPLSGDILMEQSSIYDFNLKEWRSKIAWVSQNNAVLSGSIRDNLCLGLNRLVTDDELMKVLDLVSLGDEIRSMKEGLDTEVGERGRLLSGGRTKDFK

SEQ ID NO: 3125 - DNA, 543 bp, Streptococcus pneumoniae
atgaaattaaaattattaagagtagatactaaggtgattatggggagtttcttacttgttctgtctagtctacttgctttgttgcttccccttatcttaaaggatttaatagatgggagttctattgaaaatataggctccaaagtatttcaatcgtttttgatttttattggtcaagccttgttttcttctattggttactatctgtttagtcaatcgggtgaaaaaaagatagcaaaaatcaggaaaaaagtgatagaggggttgatttatgtagagaaatccttctttgataagagccaaagtggggagttgacttctgccattgtcaatgacacgagtgtcattcgtgagtttttaattacgactttcccaaatattattctgagtttagttatggtacttggttccattgtagtcttatttagtcttgattggaatctttctctacttttattcatcactcttccttgtatgatgtttattatcttgcccctttccaatatcagtgaaaagtatagtcgtcgtttacaggaggaaatt

SEQ ID NO: 3126 - protein, 181 aa, Streptococcus pneumoniae
  multidrug resistance protein, putative FRAMESHIFT
MKLKLLRVDTKVIMGSFLLVLSSLLALLLPLILKDLIDGSSIENIGSKVFQSFLIFIGQALFSSIGYYLFSQSGEKKIAKIRKKVIEGLIYVEKSFFDKSQSGELTSAIVNDTSVIREFLITTFPNIILSLVMVLGSIVVLFSLDWNLSLLLFITLPCMMFIILPLSNISEKYSRRLQEEI

SEQ ID NO: 3127 - DNA, 1956 bp, Streptococcus pneumoniae
atgaaaaagtctaagagcaaatatctaaccttggcaggtcttgtcctgggtacaggagttttattgagcgcgtgtggaaattctagcacggcgtcaaaaacctacaactatgtttattcaagtgatccatctagcttgaactatctagcagaaaaccgcgcagcaacatccgatattgttgcaaatttggtagacgggttattagaaaatgaccaatatgggaatattattccatcattagcagaggattggactgtttctcaggacggtttgacctatacctacaaacttcgtaaggatgccaagtggtttacttctgagggagaagaatatgcgcctgtaactgcccaggattttgtgacaggtttgcaatatgcagctgataaaaaatcagaagccttgtatctagtgcaggactctgttgctggtttggatgactatatcactggtaaaacaagcgacttttcaactgtcggtgtcaaggcacttgatgaccaaacggttcaatatactttggttaaaccagaactttactggaattcaaaaacacttgcaacgatactttttcctgttaatgcagatttcctgaaatcaaaaggggatgattttgggaaggcggatccatctagtattttgtacaatggacctttcttgatgaaagcacttgtctcaaaatctgctattgaatataagaaaaaccctaattactgggatgctaagaatgtctttgtagacgatgtgaaattgacctactatgatggtagcgaccaagaatcactggaacgtaattttacagctggtgcttatactacggctcgtctttttcctaacagctccagctatgaagggattaaagaaaaatacaaaaacaatatcatctatagtatgcaaaattcaacttcatatttctttaattttaacctagataggaagtcttacaattatacttctaaaacaagtgacattgaaaagaaatcgactcaggaagcagttctcaataaaaacttccgtcaggctatcaattttgcttttgacagaacatcttatggggctcagtctgaagggaaagaaggtgcaacaaagattttgcgtaacctagtggttcctccaaactttgtcagtatcaagggaaaagactttggtgaagttgtagcctctaagatggtcaactatggtaaggaatggcaaggtatcaactttgcggatggtcaagacccttactacaatcctgagaaagccaaggctaagtttgcggaagctaagaaagaactcgaagcaaagggtgttcaattcccaatccacttggataagactgtggaagtaacagataaagtaggcatacaaggagttagttctatcaaacaatcaattgaatctgttttaggttctgataatgtagtgattgacattcagcaattaacatcagatgagtttgacagttcaggctactttgctcaaacagctgctcagaaagattatgatttatatcatggcggttggggacctgattatcaagacccgtcaacctatctcgatatttttaatactaatagtggaggatttctgcaaaatcttggactagagcctggtgaggccaatgacaaggctaaggcagttggactggatgtctatactcaaatgttggaagaagctaataaagagcaagatccggccaaacgttatgagaaatatgctgatattcaagcttggttgattgatagttctttagttcttccaagtgtttcgcgtgggggaacaccatcattgagaagaaccgtaccatttgctgctgcctatggtttaaccggtacaaaaggggttgaatcatataaatacctcaaagtacaagataagattgtcacaacagacgaatatgcaaaagccagagaaaaatggttgaaagaaaaagaagaatccaataaaaaagcccaagaagaattggcaaaacatgtcaaa

SEQ ID NO: 3128 - protein, 652 aa, Streptococcus pneumoniae
  oligopeptide ABC transporter, oligopeptide-binding protein AliB (aliB); Cellular location: lipoprotein; Similar to strain R6 sequence 15903425 (0.E+01)
MKKSKSKYLTLAGLVLGTGVLLSACGNSSTASKTYNYVYSSDPSSLNYLAENRAATSDIVANLVDGLLENDQYGNIIPSLAEDWTVSQDGLTYTYKLRKDAKWFTSEGEEYAPVTAQDFVTGLQYAADKKSEALYLVQDSVAGLDDYITGKTSDFSTVGVKALDDQTVQYTLVKPELYWNSKTLATILFPVNADFLKSKGDDFGKADPSSILYNGPFLMKALVSKSAIEYKKNPNYWDAKNVFVDDVKLTYYDGSDQESLERNFTAGAYTTARLFPNSSSYEGIKEKYKNNIIYSMQNSTSYFFNFNLDRKSYNYTSKTSDIEKKSTQEAVLNKNFRQAINFAFDRTSYGAQSEGKEGATKILRNLVVPPNFVSIKGKDFGEVVASKMVNYGKEWQGINFADGQDPYYNPEKAKAKFAEAKKELEAKGVQFPIHLDKTVEVTDKVGIQGVSSIKQSIESVLGSDNVVIDIQQLTSDEFDSSGYFAQTAAQKDYDLYHGGWGPDYQDPSTYLDIFNTNSGGFLQNLGLEPGEANDKAKAVGLDVYTQMLEEANKEQDPAKRYEKYADIQAWLIDSSLVLPSVSRGGTPSLRRTVPFAAAYGLTGTKGVESYKYLKVQDKIVTTDEYAKAREKWLKEKEESNKKAQEELAKHVK

SEQ ID NO: 3129 - DNA, 93 bp, Streptococcus pneumoniae
ttgattttttggaaaaaacaattgactaaacaaaccaagagttgtataataaaacaaatatttaaagcaggaggttccggaaatgaaaaagtc

SEQ ID NO: 3130 - protein, 31 aa, Streptococcus pneumoniae
  hypothetical protein; Cellular location: cytoplasm
MIFWKKQLTKQTKSCIIKQIFKAGGSGNEKV

SEQ ID NO: 3131 - DNA, 1635 bp, Streptococcus pneumoniae
ttgaatgaggaatctatgtcgcacgaaaacaatcaccagcaggcccagatgttacgggggactgcttggctaacggctagtaactttatcagtcgcctactcggggctgtttacattatcccttggtacatctggatgggggcttatgcagctaaggcaaatggtctctttaccatgggttacaatatctatgcttggttcttgttggtttcaacagcggggattccagttgcggtggccaagcaagttgccaagtataataccatgcgagaagaagagcatagctttgccctgattcggagcttcttaggctttatgacaggactaggcctggtttttgctttagtcttgtatgtctttgctccttggctagcagacttgtctggcgtgggcaaagacttgatcccaatcatgcaaagcttggcttggggagtcttgattttcccgtctatgagtgttatccgaggatttttccaagggatgaataacctcaaaccctatgccatgagccaaattgctgagcaggtcattcgtgttatctggatgctcctagcaacctttatcattatgaagctcggttcaggagattatctagcagccgttacccaatcaacctttgctgcctttgtcggtatggtagccagttttgcagtcttgatttatttccttgcccaagaaggttcactcaaaagaatctttgaaacaggagataagattaacagtaagcgtctcttggttgataccattaaggaagccattccttttatcctgacagggtctgccatccagctcttccagattttggatcagctgacctttatcaatagtatgagctggtttaccaactacagcaatgaggacttggttgtcatgttttcttatttctcagccaatcctaataaaatcacgatgattttgatttctgtaggggtttcgattgggagtgttggtttgccacttttgacggaaaactatgtcaagggggacttgaaagcagcttctcgtctcgttcaggacagtctcaccctactctttatgttcttgctaccagcaacggttggagtggttatggtaggagaacctctttatacggtcttctatggtaagccagatagtttggctctgggcttatttgtctttgcagttttgcagtctattattttaggcttgtacatggtcttgtctccaatgcttcaggccatgttccgcaaccgcaaggccgttctctattttatctatggttctattgccaagctagtcttgcaactacctaccatcgccctcttccacagttatggtcctttgatttcaacaaccattgctctcatcattcctaacgtcttgatgtatcgggatatttgtaaagtaactggtgtcaagcgcaaggtgattttgaagcgaaccattttaatcagtttgctgaccctagtcatgtttctgttaataggaaccatccagtggctgttaggatttttcttccaaccaagtggacgtttgtggagcttcttttatgtagctcttgtcggtgccatggggggtggactttatatggttatgagtctgcgtacctatttattagataaggtaataggaaaagcccaagcagatcgcctgcgagcaaaatttaagctttcg

SEQ ID NO: 3132 - protein, 545 aa, Streptococcus pneumoniae
  polysaccharide biosynthesis protein, putative; Cellular location: membrane; Similar to strain R6 sequence 15903426 (0.E+01)
MNEESMSHENNHQQAQMLRGTAWLTASNFISRLLGAVYIIPWYIWMGAYAAKANGLFTMGYNIYAWFLLVSTAGIPVAVAKQVAKYNTMREEEHSFALIRSFLGFMTGLGLVFALVLYVFAPWLADLSGVGKDLIPIMQSLAWGVLIFPSMSVIRGFFQGMNNLKPYAMSQIAEQVIRVIWMLLATFIIMKLGSGDYLAAVTQSTFAAFVGMVASFAVLIYFLAQEGSLKRIFETGDKINSKRLLVDTIKEAIPFILTGSAIQLFQILDQLTFINSMSWFTNYSNEDLVVMFSYFSANPNKITMILISVGVSIGSVGLPLLTENYVKGDLKAASRLVQDSLTLLFMFLLPATVGVVMVGEPLYTVFYGKPDSLALGLFVFAVLQSIILGLYMVLSPMLQAMFRNRKAVLYFIYGSIAKLVLQLPTIALFHSYGPLISTTIALIIPNVLMYRDICKVTGVKRKVILKRTILISLLTLVMFLLIGTIQWLLGFFFQPSGRLWSFFYVALVGAMGGGLYMVMSLRTYLLDKVIGKAQADRLRAKFKLS

SEQ ID NO: 3133 - DNA, 1443 bp, Streptococcus pneumoniae
atgattaagattgaaaccgtattagatattttaaagaaagatggcctttttcgcgaaattattgaccaaggtcattaccactacaactacagcaaagttatttttgatagcatcagctacgacagccgaaaagtaacagaagacactctttttttcgcaaaaggcgctgcctttaaaaaagaataccttctttctgctataacacaaggattagcttggtatgtagctgaaaaggactacgaagtcggtatccctgtcatcattgtgaacgatataaagaaagccatgagtttgattgccatggagttctatggtaatccacaggaaaaactcaaactccttgcctttactggtactaagggtaagacaacagcagcctatttcgcctataacatcttatctcaagggcatagacctgctatgttgtcgaccatgaacacaactcttgatggcgagactttctttaagtcagcgttgacaacccctgagagtattgacctctttgacatgatgaatcaggctgtgcaaaatgaccgtacccacctcatcatggaagtctccagtcaagcctatctggtcaaacgtgtctatggtctaacctttgatgtgggagttttcctaaatatcagcccagaccatatcggcccgattgaacaccctagctttgaagactatttctaccacaagcgtctcttgatggaaaagagccgagcagtcatcattaacagtgacatggaccacttctcagtcttgaaagaacaggttgaagatcaagaccatgatttctatggtagccaatttgataaccaaatcgagaattccaaagcctttagcttttcagctacgggtaaactcgctggagattatgatattcaactcattggcaacttcaaccaagaaaatgcagttgctgctggacttgcttgtctccgtctcggagcaagtcttgaggacatcaaaaaaggcatcgctgcaacccgcgttcctggtcgtatggaagtcctcactcagaaaaatggagccaaggtcttcatcgactatgcccacaatggggatagtctgaaaaaactcatcaatgtggttgaaactcatcaaaccggaaagattgctctggttctgggatcaacaggaaacaagggagaaagtcgtcgtaaggactttggcctcctcctcaatcaacaccctgagattcaagtctttctgactgctgatgaccctaactatgaagacccaatggccattgcagatgaaattagtagctacatcaatcatcctgttgaaaagattgcggatcgccaagaagccatcaaggcggcaatggctatcacaaatcacgaattagatgcagttattattgcgggtaagggagccgattgttaccaaatcatccagggcaagaaagaatcctacccaggagatacagccgtcgcagaaaattattta

SEQ ID NO: 3134 - protein, 481 aa, Streptococcus pneumoniae
  UDP-N-acetylmuramoylalanyl-D-glutamate--2,6-diaminopimelate ligase (mur; Cellular location: cytoplasm; Similar to strain R6 sequence 15903427 (0.E+01)
MIKIETVLDILKKDGLFREIIDQGHYHYNYSKVIFDSISYDSRKVTEDTLFFAKGAAFKKEYLLSAITQGLAWYVAEKDYEVGIPVIIVNDIKKAMSLIAMEFYGNPQEKLKLLAFTGTKGKTTAAYFAYNILSQGHRPAMLSTMNTTLDGETFFKSALTTPESIDLFDMMNQAVQNDRTHLIMEVSSQAYLVKRVYGLTFDVGVFLNISPDHIGPIEHPSFEDYFYHKRLLMEKSRAVIINSDMDHFSVLKEQVEDQDHDFYGSQFDNQIENSKAFSFSATGKLAGDYDIQLIGNFNQENAVAAGLACLRLGASLEDIKKGIAATRVPGRMEVLTQKNGAKVFIDYAHNGDSLKKLINVVETHQTGKIALVLGSTGNKGESRRKDFGLLLNQHPEIQVFLTADDPNYEDPMAIADEISSYINHPVEKIADRQEAIKAAMAITNHELDAVIIAGKGADCYQIIQGKKESYPGDTAVAENYL

SEQ ID NO: 3135 - DNA, 195 bp, Streptococcus pneumoniae
atgtcacttgaaaacaaattggaacaagcaacaggcgctgtcaaagaaggttttggtaaagttactggagacagcaagacagaacttgaaggagctgttgaaaaaacagttgctaaggcaaaagacgttgtagaagacgcaaaaggtgctgtagaaggtgccgttgaaggtttgaaaaacgtttttactaaagaa

SEQ ID NO: 3136 - protein, 65 aa, Streptococcus pneumoniae
  hypothetical protein; Cellular location: cytoplasm; Similar to strain R6 sequence 15903428 (3.E-31)
MSLENKLEQATGAVKEGFGKVTGDSKTELEGAVEKTVAKAKDVVEDAKGAVEGAVEGLKNVFTKE

SEQ ID NO: 3137 - DNA, 501 bp, Streptococcus pneumoniae
ttgatccgctatctggatcagtatgaggatgtgattctacgggaaattaaggctcaatttccagatgttgcagttgataaactcatggaagagtatataaaggcaggcttgattctacgtgaaaataagcgctattacctcaattttcctacgcttgaatcacttgatagtcttgaactggatcaagagatttttgtcagagaagctagtccggtctatcaagccttgttggagcagagttttgagacggaattgcgcaatcaaatcaatgcagctattttagttgaaaagacggactttgcgcgcattaaaatgaccctgtccaattatttttacaaggtcaaacagcagtatcctttgacagaaaaacagcaggagctctatgacattttaggagatgttaatcctgagtatgccctcaagtatatgacggcttttttgttgaaatttctcaaaaaagaccagcttatgcagaaatgccgtgatatctttgtggacagt

SEQ ID NO: 3138 - protein, 167 aa, Streptococcus pneumoniae
  conserved hypothetical protein, FRAMESHIFT; Cellular location: cytoplasm; Similar to strain R6 sequence 15903430 (4.E-49)
MIRYLDQYEDVILREIKAQFPDVAVDKLMEEYIKAGLILRENKRYYLNFPTLESLDSLELDQEIFVREASPVYQALLEQSFETELRNQINAAILVEKTDFARIKMTLSNYFYKVKQQYPLTEKQQELYDILGDVNPEYALKYMTAFLLKFLKKDQLMQKCRDIFVDS

SEQ ID NO: 3139 - DNA, 510 bp, Streptococcus pneumoniae
atgttagaaaatggcgatttgatttttgtgagagatgggtcagacatgggacaggccatccagacttccacaggtaactatagccatgttgccatttatttggatgggatgatttatcatgctagtggacaggctggtgttgtctgtcaagaaccggcagacttctttgagtccaatcatttatacgacctctatgtttacccagaaatggatatccagtcggtgaaggaaagagcttgcaaacatcttggagcaccctacaatgcttctttctatccagatgcagctggtttttactgctcccagtatatagcagaaatcctacctatttttgaaactattcctatgaaatttggagatggggagcaggagattagtgatttttggagggagtattacatagaactaggtctgcctgttcctctgaaccaagctggtaccaatcctagtcagttggcagcatcgcctctgttacaatgtaaagaaaggaatcttcatgattcagatttt

SEQ ID NO: 3140 - protein, 170 aa, Streptococcus pneumoniae
  conserved domain protein; Cellular location: cytoplasm; Similar to strain R6 sequence 15903431 (e-100)
MLENGDLIFVRDGSDMGQAIQTSTGNYSHVAIYLDGMIYHASGQAGVVCQEPADFFESNHLYDLYVYPEMDIQSVKERACKHLGAPYNASFYPDAAGFYCSQYIAEILPIFETIPMKFGDGEQEISDFWREYYIELGLPVPLNQAGTNPSQLAASPLLQCKERNLHDSDF

SEQ ID NO: 3141 - DNA, 933 bp, Streptococcus pneumoniae
atgtccaagattctagtatttggtcaccaaaatccagactcagatgccatcggatcatctgtagcttttgcctaccttgcaaaagaagcttacggtttggatacggaagctgttgcccttggaactccaaatgaagaaacagcctttgtcttgaactattttggtgtggaagcaccacgtgttatcacttctgccaaagcagagggggcagagcaagttatcttgactgaccacaatgaattccaacaatctgtatcagatatcgctgaagtagaagtttacggtgttgtagaccaccaccgtgtggctaactttgaaactgcaagcccactttacatgcgtttggagccagttggatcagcgtcttcaatcgtttaccgtatgttcaaagaacatggtgtagctgtgcctaaagagattgcaggtttgatgctttcaggtttgatttcagatacccttcttttgaaatcaccaacaacacacccaacagataaaatcattgctcctgaattggctgaattggctggtgtgaacttggaagaatatggtttggcaatgttgaaagctggtaccaacttggctagcaaatctgctgaagaattgattgatatcgatgctaagacttttgaactcaacggaaataatgtccgtgttgcccaagtgaacacagttgacatcgctgaagttttggaacgccaagcagaaattgaagctgcaatgcaagctgccaacgaatcaaacggctactctgactttgtcttgatgattacagatatcgtcaactcaaactcagaaatcttggctcttggtgccaatatggacaaggtcgaagcggctttcaacttcaaacttgaaaacaatcatgccttccttgctggtgccgtttcacgtaagaaacaagtggtacctcaattgactgaaagctttaatgcg

SEQ ID NO: 3142 - protein, 311 aa, Streptococcus pneumoniae
  inorganic pyrophosphatase, manganese-dependent (ppaC); Cellular location: cytoplasm; Similar to strain R6 sequence 15903432 (e-172)
MSKILVFGHQNPDSDAIGSSVAFAYLAKEAYGLDTEAVALGTPNEETAFVLNYFGVEAPRVITSAKAEGAEQVILTDHNEFQQSVSDIAEVEVYGVVDHHRVANFETASPLYMRLEPVGSASSIVYRMFKEHGVAVPKEIAGLMLSGLISDTLLLKSPTTHPTDKIIAPELAELAGVNLEEYGLAMLKAGTNLASKSAEELIDIDAKTFELNGNNVRVAQVNTVDIAEVLERQAEIEAAMQAANESNGYSDFVLMITDIVNSNSEILALGANMDKVEAAFNFKLENNHAFLAGAVSRKKQVVPQLTESFNA

SEQ ID NO: 3143 - DNA, 297 bp, Streptococcus pneumoniae
atggatcataaggcttatatgtacgttctggagtgtcgtgatggatcctactatataggctatacgactgatatgagaagacgcctcgctatccacaatagtgggaagggagccaaatatacacgagcacgcttgccagtcaaacttatctatgctcaaggttttgccagtaaggaagaagccatgtcggctgaagctcttctcaagcgtaagaagaggccacagaaggaagaatttttatctgaaaatcaagatagaaatttactcagttattttgaagaatcgtggggagtcctt

SEQ ID NO: 3144 - protein, 99 aa, Streptococcus pneumoniae
  conserved hypothetical protein; Cellular location: cytoplasm; Similar to strain R6 sequence 15903433 (7.E-54)
MDHKAYMYVLECRDGSYYIGYTTDMRRRLAIHNSGKGAKYTRARLPVKLIYAQGFASKEEAMSAEALLKRKKRPQKEEFLSENQDRNLLSYFEESWGVL

SEQ ID NO: 3145 - DNA, 747 bp, Streptococcus pneumoniae
atggaagaagaacaattattaaaatcaggagagcgcattaaccagctcttttcgacagatatcaaaatcattcaaaatagagaggtttttagctattcggtggatagtgttctcttatcacgatttccacgttttcctaagaaggggttgattgtggatttctgtgctgggaatggagcagtggggctttttgctagcactcgtactcaagcacagatattgtctgttgagattcaggagcgtttggcggatatggctgaacgctctgtccgtttgaatggattagaggagcaaatgcaggtcatctgcgatgatttgaaaaatatgcctgctcacattcaggggagtaaggtggatatgattttgtgtaatccaccctatttcaaggtgaatccttattctaatctgaacgagagtgaacattatctcttggctcgacacgaaatcacgactaatttggaagaaatctgtcgtagtgcccagagtattctcaagtctaatgggcgtttggccatggttcatcgtcctgatcgacttctggatattttggatacgttaaaacgacataatctagcccctaagcgcctgcagtttgtttatccaaaaagagaaaaggaagccaatatgcttttgattgaggcgatcaaggatggctcaacaagtggctttaaggtcttacctcctttgattgtccacaatgatgatggctcttatacgcccgaaatcgaagagatttattatggatca

SEQ ID NO: 3146 - protein, 249 aa, Streptococcus pneumoniae
  conserved hypothetical protein; Cellular location: cytoplasm; Similar to strain R6 sequence 15903434 (e-140)
MEEEQLLKSGERINQLFSTDIKIIQNREVFSYSVDSVLLSRFPRFPKKGLIVDFCAGNGAVGLFASTRTQAQILSVEIQERLADMAERSVRLNGLEEQMQVICDDLKNMPAHIQGSKVDMILCNPPYFKVNPYSNLNESEHYLLARHEITTNLEEICRSAQSILKSNGRLAMVHRPDRLLDILDTLKRHNLAPKRLQFVYPKREKEANMLLIEAIKDGSTSGFKVLPPLIVHNDDGSYTPEIEEIYYGS

SEQ ID NO: 3147 - DNA, 384 bp, Streptococcus pneumoniae
ttgaaactattgaaatcgaggactaagatgaaaatcggtgataagctaaaggggcgtattacagggattcagccctacggtgcctttgttgagttagagacgggtgatacggggctgattcacatttcagagattcggacaggatttattgaaaatattcatgaaaccttgaaagtcgatgaagaggttcaagttcaggtagtggatttagatgaatttacagggaaagccagtctttctatccgcactttggaggaagaaaagtaccagtttcctagacggagacgcttttcaagcgaccgctttaactacggctttgctccctttcgacgaatgctaccaatctggactggagaagccctgcaccatttaaaaaagaagaag

SEQ ID NO: 3148 - protein, 128 aa, Streptococcus pneumoniae
  general stress protein 13, putative; Cellular location: cytoplasm; Similar to strain R6 sequence 15903435 (4.E-66)
MKLLKSRTKMKIGDKLKGRITGIQPYGAFVELETGDTGLIHISEIRTGFIENIHETLKVDEEVQVQVVDLDEFTGKASLSIRTLEEEKYQFPRRRRFSSDRFNYGFAPFRRMLPIWTGEALHHLKKKK

SEQ ID NO: 3149 - DNA, 1398 bp, Streptococcus pneumoniae
atggacgcgaaattaagatacaaggcaaagaagatcaagattgtcttttttgatattgatgatacattgcggaattcaaagacagggtttattccaactacaattcccactgtttttaaacagttgcgtgaaaaaggaattttaacaggaatcgcctctggacgtggcatttttggtgttgttccagagattcgtgatctcaagcctgacttttttgtaactttgaatggggcttatatcgaagataaaaaaggtcaggtcatttatcagcatcagattgaaaagtcagatgttgaggagtatatctcttgggctaagcaagaaggaattgagtatggcttggttgggagtcatgatgccaagttgtcgactcgcaccgatatgatgagtgaagctatcaatccaatttatcccgacttagatgtagatcccgatttccatgaaaaagaagatatctatcagatgtggacttttgaagataagggagatgacttgcacttgcctgacagtctctcagacaaacttcgcatggttcgttggcatcaacattcgtctgatattgtgccgatttcaggctccaaagcgacgggggtggaaaaggttgtggaacaccttggcttgaaaccagagaaggtcatggtttttggagatggtctcaacgacttggaactctttgattatgctggaatcagcgttgccatgggaatttctcatgataaaatcaaagaaaaagcagattatattacaaaaacattagaagaagatggcatttttgctgccttagaagtatttggtatggtagaaaaagaattgcattttccacaagtagacattgaaacagtagaaggtcctcttgcgactattaagaccaatcacggagacttacgtatcaagcttttccctgaacatgctcctaaaacagtggctaactttgtatctctttcaaaagatggctactatgatggtgtcattttccaccgtattatcaaggactttatgatccaaggtggagacccaactggaactggtatgggtggcgagtcaatctacggcgaatcttttgaggatgaattctcagaagagctttacaatatccgtggtgctctttccatggcaaatgctggtccaaataccaacggcagccagttctttatcgtgcaaaaccaacacctaccttattctaagaaagaaattactcgtggtggttggccagaaccgattgcagaaatctatgccaatcaaggtgggacacctcacctagaccgccgtcacacggtttttggtcagttagctgatgaagcatcttacgctgtcttggatgccattgctgctgttgagacaggagctatggacaagccagttgaagatgttgtaattgaaactattgaaatcgaggac

SEQ ID NO: 3150 - protein, 466 aa, Streptococcus pneumoniae
  cof family protein/peptidyl-prolyl cis-trans isomerase, cyclophilin typ; Cellular location: cytoplasm; Similar to strain R6 sequence 15903436 (0.E+01)
MDAKLRYKAKKIKIVFFDIDDTLRNSKTGFIPTTIPTVFKQLREKGILTGIASGRGIFGVVPEIRDLKPDFFVTLNGAYIEDKKGQVIYQHQIEKSDVEEYISWAKQEGIEYGLVGSHDAKLSTRTDMMSEAINPIYPDLDVDPDFHEKEDIYQMWTFEDKGDDLHLPDSLSDKLRMVRWHQHSSDIVPISGSKATGVEKVVEHLGLKPEKVMVFGDGLNDLELFDYAGISVAMGISHDKIKEKADYITKTLEEDGIFAALEVFGMVEKELHFPQVDIETVEGPLATIKTNHGDLRIKLFPEHAPKTVANFVSLSKDGYYDGVIFHRIIKDFMIQGGDPTGTGMGGESIYGESFEDEFSEELYNIRGALSMANAGPNTNGSQFFIVQNQHLPYSKKEITRGGWPEPIAEIYANQGGTPHLDRRHTVFGQLADEASYAVLDAIAAVETGAMDKPVEDVVIETIEIED

SEQ ID NO: 3151 - DNA, 237 bp, Streptococcus pneumoniae
atggctcaacaacgtcgtggcggattcaaacgccgtaaaaaagttgattacatcgcagcaaacaaaattgaatatgttgattacaaagatactgagcttcttagccgtttcgtttcagaacgtgggaaaatccttcctcgtcgtgtaacaggaacttcagctaaaaaccaacgtaaagtaacaacagctatcaaacgcgctcgcgtaatggctttgatgcctttcgtaaacgaagat

SEQ ID NO: 3152 - protein, 79 aa, Streptococcus pneumoniae
  ribosomal protein S18 (rpsR); Cellular location: cytoplasm; Similar to strain R6 sequence 15903437 (2.E-40)
MAQQRRGGFKRRKKVDYIAANKIEYVDYKDTELLSRFVSERGKILPRRVTGTSAKNQRKVTTAIKRARVMALMPFVNED

SEQ ID NO: 3153 - DNA, 468 bp, Streptococcus pneumoniae
atgattaacaatgttgtacttgtagggcgtatgacacgtgacgctgagttgcgttataccccatcaaatgtagcagttgcgacttttactcttgcagtaaaccgtacatttaagagtcaaaatggtgaacgtgaggctgattttatcaatgtcgttatgtggcgccaacaggctgaaaatcttgctaactgggctaaaaaaggctcacttatcggggtgacaggtcgtatccagactcgtagttacgataaccagcaaggacaacgtgtctacgtgacagaggtcgtggctgagaatttccaaatgttggaaagccgtagtgtgcgtgagggtcacacaggtggagcttactctgcaccaactgcaaactattcagcacctacaaattcagtaccagacttttcacgtaatgaaaatccatttggagcaacaaacccattggatatttcagatgatgatttaccattc

SEQ ID NO: 3154 - protein, 156 aa, Streptococcus pneumoniae
  single-strand binding protein (ssb); Cellular location: cytoplasm; Similar to strain R6 sequence 15903438 (8.E-88)
MINNVVLVGRMTRDAELRYTPSNVAVATFTLAVNRTFKSQNGEREADFINVVMWRQQAENLANWAKKGSLIGVTGRIQTRSYDNQQGQRVYVTEVVAENFQMLESRSVREGHTGGAYSAPTANYSAPTNSVPDFSRNENPFGATNPLDISDDDLPF

SEQ ID NO: 3155 - DNA, 288 bp, Streptococcus pneumoniae
atggctaaatacgaaattctttatatcattcgtccaaacattgaagaagaagctaaaaacgctttggtagcacgttttgactctattttgactgacaacggtgcaactgttgttgaatcaaaaacttgggaaaaacgtcgtcttgcatacgaaatccaagatttccgtgaaggactttaccacatcgttaacgttgaagcaaatgacgatgcagctcttaaagagtttgaccgtctttcaaaaatcaacgctgacattcttcgtcacatgatcgtcaaaattgacgcg

SEQ ID NO: 3156 - protein, 96 aa, Streptococcus pneumoniae
  ribosomal protein S6 (rpsF); Cellular location: cytoplasm; Similar to strain R6 sequence 15903439 (1.E-50)
MAKYEILYIIRPNIEEEAKNALVARFDSILTDNGATVVESKTWEKRRLAYEIQDFREGLYHIVNVEANDDAALKEFDRLSKINADILRHMIVKIDA

SEQ ID NO: 3157 - DNA, 1341 bp, Streptococcus pneumoniae
atgacaaaacgtgtaacgattattgacgtaaaagactatgttggtcaggaagtgacgattggcgcttgggttgccaacaaatcaggaaaaggaaaaatcgctttcttacaattgcgtgatggaacagccttctttcaaggtgtggcttttaaaccaaactttgtcgaaaaatttggtgaagaagtgggacttgagaagtttgatgttatcaaacgcttgagccaagaaacgtctgtttatgtgacaggtattgtcaaagaggacgaacgttctaaatttggctatgagttggacatcacagacatcgaagtgatcggtgaatctcaagactacccaatcacaccaaaagaacacggaacagactttttgatggataaccgtcacttgtggctacgctctcgtaagcaagtagctgtgttgcaaatccgtaacgctattatctatgcaacttatgagttctttgacaagaacggttttatgaagtttgacagcccaattctttcaggaaatgcggcagaagattctacagaactctttgaaactgactacttcggaacgccagcctacttgagccaatcaggtcagctttacctagaagcaggggctatggctcttggtcgtgtctttgactttggtccagttttccgtgctgaaaaatcaaaaacacgccgtcacttgactgagttctggatgatggatgctgagtactcatacttgacacatgatgagtcgcttgacttgcaagaagcttatgtgaaagctcttctacaaggtgttcttgaccgcgcgcctcaagccttggaaaccttggaacgtgatacagaactcttgaaacgctacattgcagagccattcaaacgtatcacttacgatcaagccattgacctcttgcaagagcatgaaaatgatgaagatgctgactacgagcatcttgagcatggtgatgactttgggtcaccacacgaaacttggatttcaaaccactttggtgtgccaacatttgtcatgaactatccagcagccatcaaggccttctacatgaaaccagttcctggaaatccagagcgcgtgctttgtgcagacttgcttgctccagaaggctatggagaaattatcggtgggtctatgcgtgaggaagattacgatgcccttgtcgctaagatggatgaacttggcatggatcgtacagaatatgaattctaccttgaccttcgtaaatacggtacagttccacacggaggatttggtatcggtatcgaacgtatggtaaccttcgcagcaggaacaaaacatatccgtgaagctattccattcccacgtatgttgcaccgtatcaaacca

SEQ ID NO: 3158 - protein, 447 aa, Streptococcus pneumoniae
  asparaginyl-tRNA synthetase (asnS); Cellular location: cytoplasm; Similar to strain R6 sequence 15903440 (0.E+01)
MTKRVTIIDVKDYVGQEVTIGAWVANKSGKGKIAFLQLRDGTAFFQGVAFKPNFVEKFGEEVGLEKFDVIKRLSQETSVYVTGIVKEDERSKFGYELDITDIEVIGESQDYPITPKEHGTDFLMDNRHLWLRSRKQVAVLQIRNAIIYATYEFFDKNGFMKFDSPILSGNAAEDSTELFETDYFGTPAYLSQSGQLYLEAGAMALGRVFDFGPVFRAEKSKTRRHLTEFWMMDAEYSYLTHDESLDLQEAYVKALLQGVLDRAPQALETLERDTELLKRYIAEPFKRITYDQAIDLLQEHENDEDADYEHLEHGDDFGSPHETWISNHFGVPTFVMNYPAAIKAFYMKPVPGNPERVLCADLLAPEGYGEIIGGSMREEDYDALVAKMDELGMDRTEYEFYLDLRKYGTVPHGGFGIGIERMVTFAAGTKHIREAIPFPRMLHRIKP

SEQ ID NO: 3159 - DNA, 288 bp, Streptococcus pneumoniae
ttggactataaattggcttttaagactagttctctaattagttttctatccccgaacagccctcatcctggtggtgatttttggctgactcagggaacacaagatcctgttcattttgcttttttagcagaaaataaggaagaagttcaggcttgttatgaggctggcttagaggcaggtgggcgagacaatggggctcctggttatcgaagtgagcatccgatttactatgctgcttttatgattgacctggatgggaacaatatagaggtggtttgccataaagaa

SEQ ID NO: 3160 - protein, 96 aa, Streptococcus pneumoniae
  conserved hypothetical protein, POINT MUTATION; Cellular location: cytoplasm; Similar to strain R6 sequence 15903441 (1.E-54)
MDYKLAFKTSSLISFLSPNSPHPGGDFWLTQGTQDPVHFAFLAENKEEVQACYEAGLEAGGRDNGAPGYRSEHPIYYAAFMIDLDGNNIEVVCHKE

SEQ ID NO: 3161 - DNA, 1185 bp, Streptococcus pneumoniae
atgaaactatccaaccgtgttttagaaatggaagaaagtgtgactttggctgctggagcccgtgccaaagcactgaaggctgagggtagagatattttgtctctaaccttgggtgagccagatttcactactcccaaaaatatccaagatgccgccattgcatcgattcgagatgggcgtgcttctttttatacagtaacctcaggtctgccagagcttaaggcggcggtcaatagctactttgagcgcttttacggctattctgtagcgtcaaatcaagtgacagtcgctgcgggagccaaatattctctctataccttctttatggctgtggtcaatccaggtgatgaagtcatcatcccaaccccatactgggttagctatggagatcaggtcaagatggcagaaggcgttcccgtctttgtttctgctaaggaagacaatcactttaaggtgaccgtagagcagttagaagcagctcgcactgacaagaccaaggttttggtgctgaattcgccatctaatcccacaggtatgatttacacccgtgaggaactcttggcaattggaaactgggctgtagaaaatgatattctcatcctagcagacgatatctatggccgcttggtttataatggtcatgagttcacaccgatttctagcctatcggaagcgattcgcaagcaaacagtggtcatcaatggtgtgtctaaaacttatgccatgactggttggcggattggttatgccgttggagaagcagacattatcgctgccatgtccaagattgcaggtcaaacaacttcgaatccgtcagcagtagcccaatatgcagcagttgaggctctatcaggtgagcaagatactgtagaaagcatgcgtcaggcctttgaggaacgtcttaataccatctatcccctccttgcagaggtaccaggatttgaagtggtcaaaccgcaaggggccttctatctcttcccaaatgtcaaaaaggccatggagatgaaaggctacacggatgtgacagactttacaactgttatcttagaagaagccgaagtggccttggtaacaggagctggatttggagcaccagaaaatgtccgcctcagctatgcgacagacctagacacgcttaaagaagcagtcgaacgcttgaaagcatttatgggtagtgagaatgat

SEQ ID NO: 3162 - protein, 395 aa, Streptococcus pneumoniae
  aspartate aminotransferase (aspC); Cellular location: cytoplasm; Similar to strain R6 sequence 15903442 (0.E+01)
MKLSNRVLEMEESVTLAAGARAKALKAEGRDILSLTLGEPDFTTPKNIQDAAIASIRDGRASFYTVTSGLPELKAAVNSYFERFYGYSVASNQVTVAAGAKYSLYTFFMAVVNPGDEVIIPTPYWVSYGDQVKMAEGVPVFVSAKEDNHFKVTVEQLEAARTDKTKVLVLNSPSNPTGMIYTREELLAIGNWAVENDILILADDIYGRLVYNGHEFTPISSLSEAIRKQTVVINGVSKTYAMTGWRIGYAVGEADIIAAMSKIAGQTTSNPSAVAQYAAVEALSGEQDTVESMRQAFEERLNTIYPLLAEVPGFEVVKPQGAFYLFPNVKKAMEMKGYTDVTDFTTVILEEAEVALVTGAGFGAPENVRLSYATDLDTLKEAVERLKAFMGSEND

SEQ ID NO: 3163 - DNA, 486 bp, Streptococcus pneumoniae
gtgaaaaaaagacaaaacaaagcaaaaaataatctactgtggcagtatggtctagggatgacgattttgtttgtggttatcagtggttcctttctgtatatggtttctcttagcatgaaaccctatcaaacagctaaaagtgaaggagaaaaattagctcagcagtatgcaggattagagcaggctgatcaggttgatttatacaatggcttggaatcttattacagcgttcttggtcgtaacaaacagcaagaagcgcttgctgtcctgattggtaaagatgaccataagatttacgtttatcagctaaatcagggtgtttcacaagaaaaagcagaaacggtttctaaggaaaagggagctggcgagattgacaagataacctttggccgttatcaagataagccaatctgggaagttaagtcaggatctgatttttatctagtagattttgaaacaggagcattggtcaacaaggagggccta

SEQ ID NO: 3164 - protein, 162 aa, Streptococcus pneumoniae
  conserved hypothetical protein; Cellular location: outside; Similar to strain R6 sequence 15903443 (1.E-77)
MKKRQNKAKNNLLWQYGLGMTILFVVISGSFLYMVSLSMKPYQTAKSEGEKLAQQYAGLEQADQVDLYNGLESYYSVLGRNKQQEALAVLIGKDDHKIYVYQLNQGVSQEKAETVSKEKGAGEIDKITFGRYQDKPIWEVKSGSDFYLVDFETGALVNKEGL

SEQ ID NO: 3165 - DNA, 627 bp, Streptococcus pneumoniae
ttgcaagttcttttgttttgttgtaatatattttataacaacgagagagttctcgaaattttaagaaaaaggagacacatcatgtctaaaaaagtattatttatcgtcggatcactacgtcaaggttctttcaaccaccaaatggcgctcgaagctgagaaagcacttgctggtaaagcggaagttagctaccttgattattcagcccttcctctcttcagccaagatttggaagttccaacacatccagctgtagctgctgctcgtgaagcagttctcgttgcggatgctatctggattttctctccagtctacaacttctctatccctggtacagtgaaaaacttgcttgactggctatctcgtgcccttgacttgtctgatacacgtggcgtttctgcccttcaagacaagtttgtcacagtatcatctgtagccaatgcagggcacgatcaacttttcgctatctacaaagacctcttgccatttatccgtacacaaggcgttggtgatttcactgctgcacgtgttaatgactctgcctgggcagacggaaaattggttcttgaagaaacagtcctaaactcacttgaaaaacaagctcaagacttggtcgaagctatcaag

SEQ ID NO: 3166 - protein, 209 aa, Streptococcus pneumoniae
  conserved domain protein; Cellular location: cytoplasm; Similar to strain R6 sequence 15903445 (e-114)
MQVLLFCCNIFYNNERVLEILRKRRHIMSKKVLFIVGSLRQGSFNHQMALEAEKALAGKAEVSYLDYSALPLFSQDLEVPTHPAVAAAREAVLVADAIWIFSPVYNFSIPGTVKNLLDWLSRALDLSDTRGVSALQDKFVTVSSVANAGHDQLFAIYKDLLPFIRTQGVGDFTAARVNDSAWADGKLVLEETVLNSLEKQAQDLVEAIK

SEQ ID NO: 3167 - DNA, 639 bp, Streptococcus pneumoniae
gtgcttgatgccttggctctctattctgccagtcaattggagagtttctacaaggtatcagctgagaaagcggcggaagaatttcaaaatatccaagctttgaaaaggcaaactgctcaacactatccagccttgaaactttttgatgggcttatgtaccgcaacattaagagagataagctgaccgaggcggaacaagattatcttgaaaatcatgttttcattacctcggctttgtacggtgttgttccagtcttgtcacccatggctcctcaccgtttggattttttgatgaaattaaaagtcgctggtaagactttgaagagccattggaaggcagcctatgatgaaactctgaagaaggaagaagtgattttctctctcttgtcatcagagtttgagactgtattttctaaggaaatcagagcaaagatggtgaccttcaaattcatggaggatagaggcggtcagctgaagattcactcaactatctccaagaaagcgcgcggggcctttctaacagctttaatagaaaatcaagtacaaactgtgggggaagcacgtcgcttgaactttgctggatttgtttaccgagaagatttgtcacaaccacagggattggtttttgtaaaggaagta

SEQ ID NO: 3168 - protein, 213 aa, Streptococcus pneumoniae
  conserved hypothetical protein; Cellular location: membrane; Similar to strain R6 sequence 15903448 (e-131)
MLDALALYSASQLESFYKVSAEKAAEEFQNIQALKRQTAQHYPALKLFDGLMYRNIKRDKLTEAEQDYLENHVFITSALYGVVPVLSPMAPHRLDFLMKLKVAGKTLKSHWKAAYDETLKKEEVIFSLLSSEFETVFSKEIRAKMVTFKFMEDRGGQLKIHSTISKKARGAFLTALIENQVQTVGEARRLNFAGFVYREDLSQPQGLVFVKEV

SEQ ID NO: 3169 - DNA, 1593 bp, Streptococcus pneumoniae
atgaaacgaatagtctttgaacttatttttatcgcaacgacctggtatatctttttaccgccccttaacctgaccagctgggaatttctcttcttcctctgtgggcatttgttagttgtggcaatattatttggctttggcaaggggataaaccttgtcaaaacggttcatgtgcgccacggtaaggcggaagctgccttaaatcttgagggtttcaaaatcaatcggttagggaaaattctgttagcttcgattggaggaattcttctcttggcagctttggtttccttggtaacttccagcatgtttcaggctaaaaattatgccaatgtagtcacggttacggaaaaagactttactgaatttcctaagagtgacaccagtaaggttcctatcctagatagaagtactgctgaaaaaattggagaccgctacttgggttccctaaccgataaggtgtcgcaatacgtagcggcagatacctatacccaattgacaattgatgggaaaccttatcgggtcacaccactagaatatgcagaccctatcaaatggtttaacaatcaagccaagggaatcggtgagtatattaaggtggacatggtaactggaaatgcggatttggtggacttgaagacaccaatcaagtattcagactcggagtattttaaccgtgatgtcaaacgtcacctgcgcttgaagtacccgaccaaaatctttaaaactccatcttttgaggtggacgatgagggcaatcctttctatgtagcaacggtttaccaaaagcaatttggacttgctgttcctcgtcctgcttcagtcattatcttggatgctacaaatggagaaaccaaggaatacagcttatcagatgttccagaatgggtggacaggatctatccagcagaggaaaccattgagcaaatcaactacaacggcaagtacaaggacggtttcttgaatgccatgatttccaagaaaaacgtgacccagactaccaatggctataattacttgtctatcggtaatgacatctatctctacacaggtgtgacgtcggctaatgcggatgagagtaatcttggtttcatccttgaaaatatgcgaacaggagaaatcactaagtatagcttggcttctgcgacagaagaatcagcccgtgaatcagcagaaggtgctgttcaggagaaatcctacaaagcaaccttcccaatcctcatcaacctcaatgacaagcctctctacatcatgggcttgaaggacaatgctggcttggtcaaagagtacgccctggtagacgcagtcgagtaccaaaatgttatcgttgctactacagtggaagagatgctcagcaagtatgccaataaaaacgaccttgaaattgacaatgcaacgacagaaagcatcaatggagtagtagcagacctcaaatcagctgttatcaagggagacactgtctacttctttaaagttgatggcaagatatacaaggtcaaggcttcagtatccgatgaccttccttaccttgaaaatggtaaaaccttcgaaggtcaagtaggaaaagacaattatctcaagacctttaagctacgg

SEQ ID NO: 3170 - protein, 531 aa, Streptococcus pneumoniae
  hypothetical protein; Cellular location: membrane; Similar to strain R6 sequence 15903450 (0.E+01)
MKRIVFELIFIATTWYIFLPPLNLTSWEFLFFLCGHLLVVAILFGFGKGINLVKTVHVRHGKAEAALNLEGFKINRLGKILLASIGGILLLAALVSLVTSSMFQAKNYANVVTVTEKDFTEFPKSDTSKVPILDRSTAEKIGDRYLGSLTDKVSQYVAADTYTQLTIDGKPYRVTPLEYADPIKWFNNQAKGIGEYIKVDMVTGNADLVDLKTPIKYSDSEYFNRDVKRHLRLKYPTKIFKTPSFEVDDEGNPFYVATVYQKQFGLAVPRPASVIILDATNGETKEYSLSDVPEWVDRIYPAEETIEQINYNGKYKDGFLNAMISKKNVTQTTNGYNYLSIGNDIYLYTGVTSANADESNLGFILENMRTGEITKYSLASATEESARESAEGAVQEKSYKATFPILINLNDKPLYIMGLKDNAGLVKEYALVDAVEYQNVIVATTVEEMLSKYANKNDLEIDNATTESINGVVADLKSAVIKGDTVYFFKVDGKIYKVKASVSDDLPYLENGKTFEGQVGKDNYLKTFKLR

SEQ ID NO: 3171 - DNA, 408 bp, Streptococcus pneumoniae
gtggaaaagaaaattgtgaaggatatcttatttttatctcaagtgtctcagccggcaagtcaggaggacctttatcttgccagagatttgcaggatacactcttagcaaatcgtgatacctgtgttggtctagctgccaatatgattggggtgcagaagcgcgtgattatctttaatcttggcttggttcctgtggtcatgtttaacccagtgcttctgtcctttgaaggatcctatgaggcagaagaaggctgtttgtccttggtaggtgtgagatcaactaagcgttatgaaaccataaggcttgcctatcgtgacagcaagtggcaggaacagaccattaccttgacaggcttcccagctcagatttgccagcatgagctggatcacttggaaggacgaatcatt

SEQ ID NO: 3172 - protein, 136 aa, Streptococcus pneumoniae
  polypeptide deformylase (def); Cellular location: membrane; Similar to strain R6 sequence 15903451 (3.E-74)
MEKKIVKDILFLSQVSQPASQEDLYLARDLQDTLLANRDTCVGLAANMIGVQKRVIIFNLGLVPVVMFNPVLLSFEGSYEAEEGCLSLVGVRSTKRYETIRLAYRDSKWQEQTITLTGFPAQICQHELDHLEGRII

SEQ ID NO: 3173 - DNA, 789 bp, Streptococcus pneumoniae
atgtcagcatatcaattaccgaccgtatggcaggatgaagctagtaatcaaggagcttttacggggctaaacagaccaacagcaggtgcccgtttcgaacaaaacttgccaaaaggagaacaagcttttcagctttattcactgggaacaccaaatggtgtgaaggttactatcttattggaagaattactagaagctggttttaaggaagcggcttacgacttgtataagattgctatcatggatggggatcaattcggatcagactttgtgaagctcaatccaaattccaagattccagccttattggaccagtcaggtactgaaaacgtaagagtctttgagtctgctcatattcttctttaccttgctgagaaatttggagcctttttaccaagtaatcctgtggaaaaggtagaagttttgaattggctattctggcaagcaggtgcagcaccttttctaggtgggggatttggacatttcttcaattatgctcctgaaaaattggaatatcctattaaccgttttacgatggaagtgaaacgccagttggatttattggataaggaattggctcagaaaccttatattgcaggcaatgactatacgattgcagatattgctatctggtcttggtatggacagttagttcaaggaaatctttaccaaggttctgcaaaattcttggatgcctcaagttatcaaaatctagtaaaatgggcagaaaaaattgccaatcgtccagctgttaagcgtggcttggaagtaacttatacagaaattaaa

SEQ ID NO: 3174 - protein, 263 aa, Streptococcus pneumoniae
  glutathione S-transferase family protein; Cellular location: cytoplasm; Similar to strain R6 sequence 15903452 (e-153)
MSAYQLPTVWQDEASNQGAFTGLNRPTAGARFEQNLPKGEQAFQLYSLGTPNGVKVTILLEELLEAGFKEAAYDLYKIAIMDGDQFGSDFVKLNPNSKIPALLDQSGTENVRVFESAHILLYLAEKFGAFLPSNPVEKVEVLNWLFWQAGAAPFLGGGFGHFFNYAPEKLEYPINRFTMEVKRQLDLLDKELAQKPYIAGNDYTIADIAIWSWYGQLVQGNLYQGSAKFLDASSYQNLVKWAEKIANRPAVKRGLEVTYTEIK

SEQ ID NO: 3175 - DNA, 2694 bp, Streptococcus pneumoniae
atgtcaaaagaacaaaaacgccaagcgttttatactcagagccctgaagaggtcttgcaggctgtggatgcgaccgagcaaggtttgtcatcaagtgaggcggaaaagcgccttgccgaatttgggcacaatgaactcgaagaaggcgagaaacgatcaatcttggtcaaattcatcgagcaatttaaggatttgatgattatcatcctagttgcggcagcaatcttgtcagtcgtgacttctggtggggaagatatcgcagatgccattatcatcctagctgtggttatcatcaacgctgcctttggtgtttaccaagaaggaaaagctgaagaagctattgaagccctcaaatccatgtctagtccagttgcccgcgttcttcgtgatggacacatggcagagattgactctaaagaattggtaccaggcgatatcgttgcccttgaagcaggtgacgtggtaccagcggacctacgtttgatagaagccaactctcttaaaattgaagaagcagccttgacaggtgaatctgtaccagtcgaaaaagacttgtcagtcgagcttgcgacagatgctggtattggtgaccgtgtcaacatggccttccaaaactcaaacgtaacctatggtcgtgggatgggtgttgttgtcaatacaggtatgtacactgaagttggtcatattgctggtatgcttcaagatgcggatgagactgatacaccactcaaacaaaatttgaacaacctttctaaggtcttgacctatgctatcttggtcattgcccttgttacttttgtagtgggtgtcttcattcaagggaaaaatccacttggtgagttgttgacttctgttgcccttgccgttgcagccattccagaaggacttcctgctatcgttaccatcgttctttctcttggtactcaagttttggccaaacgacattccatcgttcgtaagttgccagcagttgaaacacttggttcaactgaaatcatcgcttctgataagactggtacgctgactatgaacaagatgacagtcgaaaaagtcttctacgatgcggttctacatgactcagctgatgatattgaactaggtcttgaaatgccactacttcgttcagttgtcttggccaatgatacgaaaatcgatgtggaaggtaacttgattggtgacccaaccgaaacagcctttatccaatatgccttggacaagggctatgatgtcaaaggtttcttagagaaatatcctcgtgtagctgaattgccatttgactctgaccgtaagctcatgtcaacagttcacccattgccagatggtcgtttccttgtagcagtcaagggtgcgccagaccaactcttaaaacgttgtcttcttcgtgataaggctggggatattgctccgattgatgagaaggttacaaatctcattcgtacaaacaattctgaaatggctcatcaagccttgcgtgtccttgcaggtgcttataagattatcgatagtattccagaaaatctcacttctgaagagcttgaaaatgatttaatttttactggtttgattgggatgattgaccctgaacgtcctgaagccgctgaggctgttcgtgtggctaaggaagcgggaatccgtccaattatgattacaggtgaccaccaagacacagcggaagccattgccaaacgtttgggaatcattgacgcaaacgatacagaaggtcacgttttaactggtgctgaactcaatgaactgtcagatgaagaatttgaaaaagtcgttggtcaatactctgtttatgcccgtgtgtctccagaacacaaggttcgtatcgtcaaggcttggcaaaaacaaggtaaagtcgttgccatgacaggtgacggtgtcaatgacgcgccagctctgaaaacagccgatatcggtatcggtatgggaatcactggtacagaggtttctaagggggcttctgatatgattcttgcagatgataactttgcgactattatcgtcgcagtggaagaaggacgtaaggtcttctcaaacattcaaaagactattcagtacctactttctgctaatactgctgaagtattaaccatcttcctatcaaccttgtttggttgggatgtcttacagccggttcatcttttgtggatcaacttggtaacggataccttcccagctatcgctcttggtgttgaacctgcggaacctggtgtcatgaatcataaaccacgtggacgcaaggcaagcttcttctcaggtggtgttttgagttctatcatttatcaaggtgtactccaagcagctcttgttatgagtgtttatggccttgcgattgcttacccagttcatgtgggtgacaatcatgctattcatgcagatgccctaacgatggcctttgcaacccttggtttgattcagctcttccatgcctacaatgtcaagtctgtctaccaatccatcttgacagttggcccattcaagtctaagacctttaactggtccatcttggtatcctttatccttctcatggcaacaatcgttgtagaaccgcttgaaggaatcttccacgtaaccaaactagacttgtcacaatggggaattgttatggctggaagcttctcaatgattatcatcgtcgaaatcgttaagtttattcaacgcaaactcggttttgacaagaatgcgatt

SEQ ID NO: 3176 - protein, 898 aa, Streptococcus pneumoniae
  cation-transporting ATPase, E1-E2 family; Cellular location: membrane; Similar to strain R6 sequence 15903453 (0.E+01)
MSKEQKRQAFYTQSPEEVLQAVDATEQGLSSSEAEKRLAEFGHNELEEGEKRSILVKFIEQFKDLMIIILVAAAILSVVTSGGEDIADAIIILAVVIINAAFGVYQEGKAEEAIEALKSMSSPVARVLRDGHMAEIDSKELVPGDIVALEAGDVVPADLRLIEANSLKIEEAALTGESVPVEKDLSVELATDAGIGDRVNMAFQNSNVTYGRGMGVVVNTGMYTEVGHIAGMLQDADETDTPLKQNLNNLSKVLTYAILVIALVTFVVGVFIQGKNPLGELLTSVALAVAAIPEGLPAIVTIVLSLGTQVLAKRHSIVRKLPAVETLGSTEIIASDKTGTLTMNKMTVEKVFYDAVLHDSADDIELGLEMPLLRSVVLANDTKIDVEGNLIGDPTETAFIQYALDKGYDVKGFLEKYPRVAELPFDSDRKLMSTVHPLPDGRFLVAVKGAPDQLLKRCLLRDKAGDIAPIDEKVTNLIRTNNSEMAHQALRVLAGAYKIIDSIPENLTSEELENDLIFTGLIGMIDPERPEAAEAVRVAKEAGIRPIMITGDHQDTAEAIAKRLGIIDANDTEGHVLTGAELNELSDEEFEKVVGQYSVYARVSPEHKVRIVKAWQKQGKVVAMTGDGVNDAPALKTADIGIGMGITGTEVSKGASDMILADDNFATIIVAVEEGRKVFSNIQKTIQYLLSANTAEVLTIFLSTLFGWDVLQPVHLLWINLVTDTFPAIALGVEPAEPGVMNHKPRGRKASFFSGGVLSSIIYQGVLQAALVMSVYGLAIAYPVHVGDNHAIHADALTMAFATLGLIQLFHAYNVKSVYQSILTVGPFKSKTFNWSILVSFILLMATIVVEPLEGIFHVTKLDLSQWGIVMAGSFSMIIIVEIVKFIQRKLGFDKNAI

SEQ ID NO: 3177 - DNA, 1182 bp, Streptococcus pneumoniae
atgaagcaatctatctcaaatctcaagttagctgagcgtggagccattatcagtatttcgacctatttgatcttgtctgcagccaaattagcagctggtcatctccttcattcatccagtttggtggccgatggttttaataacgtatcggacatcattggaaatgtggccctcttaatcgggattcggatggcgcgccagcctgcagaccgtgaccaccgttttggtcattggaagattgaagatttggcaagcttgatcacttctatcatcatgttctatgtcggtttcgatgttctaagagataccattcaaaagattctcagtcgggaagaaacggtcattgatcctcttggtgcaactctaggaatcatttctgcagcgattatgtttgtggtctatctctacaatactcgcctcagtaagaaatccaactccaatgcgctgaaggcagctgctaaggacaatctttctgacgctgttacctcacttggaaccgccattgccatcctagctagtagtttcaattatccgattgtggataaactggttgctatcatcatcactttctttatcttgaagactgcctatgatatcttcatcgagtcttcctttagtctttcagatggctttgacgaccgcctgctcgaggactaccaaaaggctatcatggaaattcccaaaatcagcaaggtcaaatcgcaaagaggtcgcacctacggtagcaacatctacctggatattacactagagatgaatcctgacttgtctgtttttgaaagccatgaaatcgcggatcaggtcgagtctatgctggaggagcgttttggcgtctttgataccgatgtccatatcgaaccagcacctatccctgaggatgaaattttagacaatgtctataaaaaattgcttatgcgtgaacaattgattgaccaaggaaaccaactagaagaactcttgactgatgattttgtctatattcgccaagatggagagcagatggataaagaggcttataagaccaaaaaagagttaaattctgctatcaaggacattcaaattacttccatcagtcaaaaaaccaaactcatctgctatgagttagatggtatcatccataccagtatctggcgtcgccacgaaacctggcaaaatatctttcatcaagaaaccaaaaaagaa

SEQ ID NO: 3178 - protein, 394 aa, Streptococcus pneumoniae
  cation efflux family protein; Cellular location: membrane; Similar to strain R6 sequence 15903454 (0.E+01)
MKQSISNLKLAERGAIISISTYLILSAAKLAAGHLLHSSSLVADGFNNVSDIIGNVALLIGIRMARQPADRDHRFGHWKIEDLASLITSIIMFYVGFDVLRDTIQKILSREETVIDPLGATLGIISAAIMFVVYLYNTRLSKKSNSNALKAAAKDNLSDAVTSLGTAIAILASSFNYPIVDKLVAIIITFFILKTAYDIFIESSFSLSDGFDDRLLEDYQKAIMEIPKISKVKSQRGRTYGSNIYLDITLEMNPDLSVFESHEIADQVESMLEERFGVFDTDVHIEPAPIPEDEILDNVYKKLLMREQLIDQGNQLEELLTDDFVYIRQDGEQMDKEAYKTKKELNSAIKDIQITSISQKTKLICYELDGIIHTSIWRRHETWQNIFHQETKKE

SEQ ID NO: 3179 - DNA, 1869 bp, Streptococcus pneumoniae
atgagtgattttatcgttgaaaaactaagtaaatccgttggtgacaagaccgtttttagggatatttcctttattatccatgacttagacagaattggtttaatcggtgtcaatgggactggcaagaccacccttttggacgtcctttctggtgtttctggatttgatggggatgtcagtcctttttcagctaaaaatgattaccagattggttacttgactcaggatcctgattttgatgatagaaagacagttttggatacggttctatctagtgaactcaaggaaatccagctcattcgtgagtatgaattgattatgctcgactatagtgaggacaagcaggcgcgtttggaacgtgtcatggcagagatggactctctccaagcttgggaaatcgaaagtcaggtcaagaccgttcttagcaaattgggcattcaagacttatctactcctgttggggaattgtcaggtggtctgagaagacgggtacagttggcacaagtcttacttggcaaccacgacctcttgcttttggatgagccgaccaaccatctggatattgcgattattgagtggctgaccctctttttgaaaaattctaagaagaccgtcctttttatcactcacgatcgttatttcttagacgctttgtcaacacggattttcgagttggatcgtgcaggcttgaccgagtaccagggaaattaccaggactatgttcgcctaaaggcggaacaggatgagcgcgacgcggctcttcttcacaaaaaagaacaactctacaaacaagaattggcctggatgcgcagacaaccgcaggcgcgtgcgaccaagcaacaagctcgtatcaatcgtttccatgatctgaaaaaggaagtttcaggcagtagtgctgagacagacttgactatgaactttgaaaccagtcggattgggaagaaagtcatcgagtttcaggatgtttcctttgcctatgaaaataagcccattttgcaaaattttaatctcttagttcaggctaaagaccgtattggaattgttggggacaatggtgttggaaaatcaaccctacttaacctgattgcaggaagtcttgagccgacagcaggacaagttgtgattggggaaactgttcgcatcgcctatttctctcaacaaattgagggtttggatgaaagcaagcgtgtgatcaattacctgcaggaagtggcagaggaggtcaagaccagtggtggttctacgacttccatcgctgagttgctggagcaattcctcttcccacgttcgacgcatgggactttgattgagaaattgtcagggggtgagaaaaaacgtctttatctcctcaaactgcttttggaaaaaccaaatgttcttcttttagacgagccaaccaatgacctagatattgcaactttgacagtcttagagaatttcttgcaaggttttgcaggtcccgttttaacagtcagtcacgaccgctatttcttggataaggtagcgaccaagattctcgcttttgaggatggcaagattcgtcctttctttggtcattacaccgactatcttgatgaaaaagcttttgaaacagatatggccaatcaagtgcaaaaggccgaaaaggaaaaagtggtcaaggttcgagaagacaagaaacgcatgacctaccaagaaaagcaggagtgggcaagtattgaaggtgatattgaaaccttggaaaaacgtatcgctgctattgaagaggaaatgcaggctaacggctctgactttggtaagctggctactctccaaaaagaattggatgagaaaaatgaagcactccttgaaaaatacgaacgctatgagtatctcagtgaatttgatagt

SEQ ID NO: 3180 - protein, 623 aa, Streptococcus pneumoniae
  ABC transporter, ATP-binding protein; Cellular location: cytoplasm; Similar to strain R6 sequence 15903455 (0.E+01)
MSDFIVEKLSKSVGDKTVFRDISFIIHDLDRIGLIGVNGTGKTTLLDVLSGVSGFDGDVSPFSAKNDYQIGYLTQDPDFDDRKTVLDTVLSSELKEIQLIREYELIMLDYSEDKQARLERVMAEMDSLQAWEIESQVKTVLSKLGIQDLSTPVGELSGGLRRRVQLAQVLLGNHDLLLLDEPTNHLDIAIIEWLTLFLKNSKKTVLFITHDRYFLDALSTRIFELDRAGLTEYQGNYQDYVRLKAEQDERDAALLHKKEQLYKQELAWMRRQPQARATKQQARINRFHDLKKEVSGSSAETDLTMNFETSRIGKKVIEFQDVSFAYENKPILQNFNLLVQAKDRIGIVGDNGVGKSTLLNLIAGSLEPTAGQVVIGETVRIAYFSQQIEGLDESKRVINYLQEVAEEVKTSGGSTTSIAELLEQFLFPRSTHGTLIEKLSGGEKKRLYLLKLLLEKPNVLLLDEPTNDLDIATLTVLENFLQGFAGPVLTVSHDRYFLDKVATKILAFEDGKIRPFFGHYTDYLDEKAFETDMANQVQKAEKEKVVKVREDKKRMTYQEKQEWASIEGDIETLEKRIAAIEEEMQANGSDFGKLATLQKELDEKNEALLEKYERYEYLSEFDS

SEQ ID NO: 3181 - DNA, 1182 bp, Streptococcus pneumoniae
atgccttctgaatttcagaaggctttaccagtattagaaaaaattaaagaagcaggctttgaggcttattttgttgggggctctgttcgagatgcccttctccatagccctatccacgatgtggatattgcgacgtcttcttatccagaagagaccaagcagatttttccgcgaacagccgatatcggaatcgagcatggaaccgtcttggtcttagatggggatgaggagtatgaggtaacaacctttcggacagaggatgtctatgtggactatcgcagacccagtgcggtttcctttgtacgatcgctagaagaagacctcaaacgccgtgatttcacagtcaacgcctttgccttggatgagacaggagaaatcgttgacttgttccatggtttagaagatttggaaaagcaagtcttgcgagcagttggagtggctagtgagcgtttcaacgaagatgctttacggattatgcgtggtttccgttttcaggctagtcttggttttgcacttgagccagaaacatttaaagctatgaagaccttgacgccgcttttggagaaaatttctgtagagcgtaccttcgtcgagtttgataaactcttgctggctccattttggagaaggggcttggcttccatgattgagagtcaagcttatgactatctccctgatatggcatctagccaggacaagctcaacagactgtttgatttggagactgattttacttttgaatcctctgaacaagcctgggcggctttactatgggctttggagattgaaaatgcgcagtcatttttgaaatcttggaagacctcacgccagtttgccaagcaagttcaggatttgctgattattttggctctgcgtgaaaatggagaattgagcaagcgagattgttatcgctttgacatagatttgcttttacaggctgaaaatcttcgtcaagctcaaggaaaagaagtcaacccacaagccatcacagaaaaataccaaagcttgactatccatgacaagaaagagattcagattaatggcggtattttgatcaaggaatatggctatcagccaggcccagacttgggagagattttaacagagattgagtttgccattgtcgatggagaattggagaataatcgtgaagccatccatgcttacctgagggagaaaaaa

SEQ ID NO: 3182 - protein, 394 aa, Streptococcus pneumoniae
  polyA polymerase family protein; Cellular location: cytoplasm; Similar to strain R6 sequence 15903456 (0.E+01)
MPSEFQKALPVLEKIKEAGFEAYFVGGSVRDALLHSPIHDVDIATSSYPEETKQIFPRTADIGIEHGTVLVLDGDEEYEVTTFRTEDVYVDYRRPSAVSFVRSLEEDLKRRDFTVNAFALDETGEIVDLFHGLEDLEKQVLRAVGVASERFNEDALRIMRGFRFQASLGFALEPETFKAMKTLTPLLEKISVERTFVEFDKLLLAPFWRRGLASMIESQAYDYLPDMASSQDKLNRLFDLETDFTFESSEQAWAALLWALEIENAQSFLKSWKTSRQFAKQVQDLLIILALRENGELSKRDCYRFDIDLLLQAENLRQAQGKEVNPQAITEKYQSLTIHDKKEIQINGGILIKEYGYQPGPDLGEILTEIEFAIVDGELENNREAIHAYLREKK

SEQ ID NO: 3183 - DNA, 765 bp, Streptococcus pneumoniae
atgagtattcgagtaattattgccggttttaagggaaagatgggccaggctgcttgtcagatggtattgactgatccagacttggacttggtggcagttttggatccttttgagtctgagtcagaatggcagggtattcctgttttcaaggataaggctgatttagctggttttgaagcggatgtctgggtagattttactactccagctgttgcctacgaaaatacacgttttgctcttgaaaatggctttgctccagtagttggaacgactggtttcacgagtgaagaaattgcagagctaaaagaattttctcgtgcccaagacttgggtggcctgattgcccctaactttgccttgggtgctgtcttactcatgcaatttgcgacgcaggctgccaaatatttcccaaatgtggagattattgagctccatcatgacaagaaaaaggatgctccgagtggaacagccattaaaacagctgagttgatggcagaggttcgagagtcaattcagcaaggtgcagcagatgaggaagagctgattgctggtgctcgtggtgctgactttgatggtatgcgcatccactcagttcgtttgccaggcttggtagctcatcaggaagtcatctttggcaatcagggagaagggttgaccctccgtcatgactcctatgatcgcatctccttcatgacaggagtcaatttgggaattaaagaagttgtcaagcgtcatgagcttgtctatggattagaacacttatta

SEQ ID NO: 3184 - protein, 255 aa, Streptococcus pneumoniae
  dihydrodipicolinate reductase (dapB); Cellular location: membrane; Similar to strain R6 sequence 15903457 (e-145)
MSIRVIIAGFKGKMGQAACQMVLTDPDLDLVAVLDPFESESEWQGIPVFKDKADLAGFEADVWVDFTTPAVAYENTRFALENGFAPVVGTTGFTSEEIAELKEFSRAQDLGGLIAPNFALGAVLLMQFATQAAKYFPNVEIIELHHDKKKDAPSGTAIKTAELMAEVRESIQQGAADEEELIAGARGADFDGMRIHSVRLPGLVAHQEVIFGNQGEGLTLRHDSYDRISFMTGVNLGIKEVVKRHELVYGLEHLL

SEQ ID NO: 3185 - DNA, 135 bp, Streptococcus pneumoniae
ttgaacacggactacctgcctcttgaaaaaagatgcctgtcttgcctttcgtggaaagtcagtgccattccctatttttcagaggcagctaaggtcctttgtatcttgataattgaacacgcctggaaccctgtg

SEQ ID NO: 3186 - protein, 45 aa, Streptococcus pneumoniae
  hypothetical protein; Cellular location: membrane
MNTDYLPLEKRCLSCLSWKVSAIPYFSEAAKVLCILIIEHAWNPV

SEQ ID NO: 3187 - DNA, 846 bp, Streptococcus pneumoniae
atgaaattagctgttttcacagattcctctgcttatctcagtgcagagatcttgcaaagagaagacttgtttgtcttggatattcctgtcaatattgatggtgaggaatatgtcgaaggcatcaatctgtctgctgaggaattttaccaaaaaatggctcaggcttctgaattgcctaagaccagtcaaccaagtattgccaagttagatgagatcttaacttcgctcaaagaacaaggctatacacatgccttggggcttttcctatcttctggaatttcaggtttttaccaaaatatccagtatatggtcgatgactatgagggcttaaccattgctttcccagacactttgattacaagtgctcccctaggcatcatggttgaaagcgtctttaattggcgtgatcagggcgatgattttgccagcattcaggataagctagccattcaaatcagccgtacgtcagcctttatcatggtagatgacttggatcatttggtaaaaggtggacgcctttcaaatggggctgccattttgggcaatttgcttagcattaagccaatcctttattttaacgatcaaggtgtgattgaagtttacgaaaaagttcgtactgaaaagaaggccaccaagcgcttaattgaaattatcaaggaaacaacggcttcaggtcaataccgggtcattgtcattcatgggaatgctcctgaaaaggctgaagaattgcgtcagcacttgcttgattttggcttgggttcggatgtttcacttgctacatttggtagtgtcattggaacgcacctaggagcaggaagtattgctctgggttatattccagtgatt

SEQ ID NO: 3188 - protein, 282 aa, Streptococcus pneumoniae
  degV family protein; Cellular location: cytoplasm; Similar to strain R6 sequence 15903458 (e-156)
MKLAVFTDSSAYLSAEILQREDLFVLDIPVNIDGEEYVEGINLSAEEFYQKMAQASELPKTSQPSIAKLDEILTSLKEQGYTHALGLFLSSGISGFYQNIQYMVDDYEGLTIAFPDTLITSAPLGIMVESVFNWRDQGDDFASIQDKLAIQISRTSAFIMVDDLDHLVKGGRLSNGAAILGNLLSIKPILYFNDQGVIEVYEKVRTEKKATKRLIEIIKETTASGQYRVIVIHGNAPEKAEELRQHLLDFGLGSDVSLATFGSVIGTHLGAGSIALGYIPVI

SEQ ID NO: 3189 - DNA, 384 bp, Streptococcus pneumoniae
atggagaaagacatgaatcttaaacgtgaacaagaatttgttagtcagtatcattttgatgcgcgtaattttgaatgggaaaatgaaaatggagctcctgaaaccaaggtggatgtgaatttccaattgctccaacatgaccaagaaaatcaagtgacttccttgattgtcatcttgagctttatgattgtatttgataagtttgtcattagtggaacaatctcacaagtaaaccatatcgatggccgtattgtcaatgaaccaagtgaattgaaccaagaagaggtggaaaccttggctcgtccatgtttgaacatgctcaatcgtttgacttacgaagtgactgaaattgcattagacttaccaggaattaatttggagttc

SEQ ID NO: 3190 - protein, 128 aa, Streptococcus pneumoniae
  hypothetical protein; Cellular location: membrane; Similar to strain R6 sequence 15903459 (2.E-70)
MEKDMNLKREQEFVSQYHFDARNFEWENENGAPETKVDVNFQLLQHDQENQVTSLIVILSFMIVFDKFVISGTISQVNHIDGRIVNEPSELNQEEVETLARPCLNMLNRLTYEVTEIALDLPGINLEF

SEQ ID NO: 3191 - DNA, 1350 bp, Streptococcus pneumoniae
atgggtaaatattttgggactgatggagtccgtggagaagctaacctagaactaacaccagaattagcctttaaactaggacgttttggaggctatgttcttagtcaacatgaaacggaagcgccgaaagtctttgtaggacgtgacacacgtatttcaggggaaatgttggaatcggccttggtggcaggtctcctttcagtagggattcacgtatacaaacttggtgtccttgcaacaccagcagtagcttacttggttgaaactgaaggagcaagtgccggtgtcatgatttctgctagccacaacccagcccttgataacggaatcaagttctttggcggtgatggcttcaaactagatgatgaaaaagaagcagaaattgaagccttgctagatgctgaggaagacactcttcctcgtccaagtgcagaaggcttaggaattttggtagattatccagaaggcttgcgtaagtatgaaggataccttgtttcaactggaactcctcttgatggaatgaaggttgccttggatacagctaatggagcagcttctaccagtgcccgtcaaatctttgcagaccttggtgcccaattgacggttatcggggaaacaccagacggtcttaacatcaaccttaatgttggttcaacacatccagaagcccttcaagaagtggtcaaagaaagtgggtcagctattggtttggcctttgatggagacagtgaccgcttgattgctgttgatgagaatggtgacatcgttgatggtgacaagattatgtacatcatcggaaaatacctttctgaaaaaggacaattggctcaaaatacaattgtgacaactgttatgtctaaccttggtttccacaaggccttgaatcgcgaaggtattaacaaggcagttactgcagttggtgaccgctacgttgttgaagaaatgagaaaatcaggctacaaccttggtggtgaacagtctggtcacgttatcttgatggattacaataccacaggtgatggtcaattatcagcagttcaattgactaaaatcatgaaggaaactggtaagagcttatcagagttggcggcagaagtaacgatttatccacaaaaattagttaatatccgagtggaaaacgtcatgaaggaaaaggccatggaagtgccagctatcaaggccatcatcgagaagatggaagaagaaatggcggggaacggccgtatccttgttcgtccaagtggaacagaacccctcttgcgtgttatggcagaagcgcctacaacagaagaagtaaactactatgttgataccatcacagatgtagttcgtgctgaaattgggattgac

SEQ ID NO: 3192 - protein, 450 aa, Streptococcus pneumoniae
  phosphoglucomutase/phosphomannomutase family protein; Cellular location: membrane; Similar to strain R6 sequence 15903460 (0.E+01)
MGKYFGTDGVRGEANLELTPELAFKLGRFGGYVLSQHETEAPKVFVGRDTRISGEMLESALVAGLLSVGIHVYKLGVLATPAVAYLVETEGASAGVMISASHNPALDNGIKFFGGDGFKLDDEKEAEIEALLDAEEDTLPRPSAEGLGILVDYPEGLRKYEGYLVSTGTPLDGMKVALDTANGAASTSARQIFADLGAQLTVIGETPDGLNINLNVGSTHPEALQEVVKESGSAIGLAFDGDSDRLIAVDENGDIVDGDKIMYIIGKYLSEKGQLAQNTIVTTVMSNLGFHKALNREGINKAVTAVGDRYVVEEMRKSGYNLGGEQSGHVILMDYNTTGDGQLSAVQLTKIMKETGKSLSELAAEVTIYPQKLVNIRVENVMKEKAMEVPAIKAIIEKMEEEMAGNGRILVRPSGTEPLLRVMAEAPTTEEVNYYVDTITDVVRAEIGID

SEQ ID NO: 3193 - DNA, 777 bp, Streptococcus pneumoniae
atgaaaaaaaatagtttatatatcatatcctcactcttttttgcttgtgtcttatttgtctatgctacggcgacgaattttcaaaacagtaccagtgctaggcaggtaaaaacggaaacctatactaatacagtaacaaatgtccctattgacatacgctataatagtgataagtattttattagcggttttgcttcagaagtatcagtggtcttgactggtgcaaatcgcctatcgctagctagtgaaatgcaagaaagtacacgtaaattcaaggttactgctgacctaacagatgccggtgttggaacgattgaagttcctttgagcattgaagatttacccaatgggctgaccgctgtggcgactccgcaaaaaattacagtcaagattggtaagaaggctcagaaggataaggtaaagattgtaccagagattgaccctagtcaaattgatagtcgggtacaaattgaaaatgtcatggtgtcagataaagaagtgtctattacgagtgaccaagagacattggatagaattgataagattatcgctgttttgccaactagcgaacgtataacaggtaattacagtggttcagtacctttgcaggcaatcgaccgcaatggtgttgtcttaccggcagttatcactccgtttgatacaataatgaaggtgactacaaaaccagtagcaccaagttcaagcacatcaaattcaagtacaagcagttcatcggagacatcttcgtcaacgaaagcaactagttcaaaaacgaat

SEQ ID NO: 3194 - protein, 259 aa, Streptococcus pneumoniae
  conserved hypothetical protein; Cellular location: outside; Similar to strain R6 sequence 15903461 (e-141)
MKKNSLYIISSLFFACVLFVYATATNFQNSTSARQVKTETYTNTVTNVPIDIRYNSDKYFISGFASEVSVVLTGANRLSLASEMQESTRKFKVTADLTDAGVGTIEVPLSIEDLPNGLTAVATPQKITVKIGKKAQKDKVKIVPEIDPSQIDSRVQIENVMVSDKEVSITSDQETLDRIDKIIAVLPTSERITGNYSGSVPLQAIDRNGVVLPAVITPFDTIMKVTTKPVAPSSSTSNSSTSSSSETSSSTKATSSKTN

SEQ ID NO: 3195 - DNA, 768 bp, Streptococcus pneumoniae
ttgattgttgcttatattttataccattttacaaaagctattgcaggaaccaagattatgattttggtacgtggagttttggtgtttattttagctcaaatccttgcaaatatgattggtttgactacgatttcttggttaatcaatcaaattattacttatggggttattgcggcggttgttatcttctctccagagattcggactggtttggaacgtttgggaagagcgacagatttcttttccaatgcccctattagtgctgaggaacagatgattcgtgcctttgttaagtctgttgaatacatgagtcctcgtaaaatcggggccttggttgctattcagcgtgtacgtaccttgcaggagtatatttcgacaggaattcccttggatgctaagatttctgcagaacttctcattaacatttttattcccaacactcccctacatgatggtgcggtgattatcaaagaagaacgtatcgctgtgacgtctgcctatctgcccttgacaaaaaacacagggatttccaaggaatttgggaccagacaccgggcggctatcggtttatcagaagtctcagatgccttgacttttgtcgtatcagaggaaacgggaggaatttcgataacctataatggaaggtttaagcacaacctaacacttgatgaatttgaaacagaattacgtgaaatcttacttccaaaagaggaagtgggtcttagttttaaagaacgattgctaggaggatggaaacatgaaaaaaaa

SEQ ID NO: 3196 - protein, 256 aa, Streptococcus pneumoniae
  conserved hypothetical protein; Cellular location: membrane; Similar to strain R6 sequence 15903462 (e-140)
MIVAYILYHFTKAIAGTKIMILVRGVLVFILAQILANMIGLTTISWLINQIITYGVIAAVVIFSPEIRTGLERLGRATDFFSNAPISAEEQMIRAFVKSVEYMSPRKIGALVAIQRVRTLQEYISTGIPLDAKISAELLINIFIPNTPLHDGAVIIKEERIAVTSAYLPLTKNTGISKEFGTRHRAAIGLSEVSDALTFVVSEETGGISITYNGRFKHNLTLDEFETELREILLPKEEVGLSFKERLLGGWKHEKK

SEQ ID NO: 3197 - DNA, 171 bp, Streptococcus pneumoniae
ttgttcaatgtaaaatggactaggatagggaaaaaaatgccagaaaatggtataataggacgaaagtgttttgatagggaggatatcagggatgaattttcaacaattatccaatctgcaatattggaccagtttgtttgcaagtccatggacgatagctatcaatctgat

SEQ ID NO: 3198 - protein, 57 aa, Streptococcus pneumoniae
  hypothetical protein; Cellular location: cytoplasm; Similar to strain R6 sequence 15903463 (2.E-29)
MFNVKWTRIGKKMPENGIIGRKCFDREDIRDEFSTIIQSAILDQFVCKSMDDSYQSD

SEQ ID NO: 3199 - DNA, 963 bp, Streptococcus pneumoniae
atgtctcaactctatgatattaccattgtgggtggtggtcctgtcgggctttttgcagccttttatgcccacctacgccaagccaaggttcaaatcatcgactctcttccccagctaggtggacaacctgctattctctaccctgaaaaggaaatcctagacgtaccaggcttcccaaacctgactggagaagagttgactaaccgcttgattgaacagctaaatggatttgatacccctattcatctcaatgaaacggttcttgagattgacaaacaagaagaatttgccatcacaacttctaaaggaagtcacctgactaaaacagttatcatcgctatgggtggcggtgccttcaaaccacgtccgctggaacttgaaggggttgagggctatgaaaatatccactaccacgtttctaacattcagcaatacgctggtaagaaagtgacgattcttggtgggggagactcggctgtggattgggctttggcttttgaaaaaatcgcaccaactacccttgttcaccgcagagataatttccgtgccttggaacacagtgttcaagccttgcaagaatcatctgtaaccatcaagacaccattcgcccctagccaactccttggaaatggaaaaacacttgataaacttgaaatcacaaaagtcaaatctgatgaaactgaaaccattgacctagaccacctctttgtcaactatggtttcaaatcttctgtcggtaaccttaaaaactgggggctcgacctcaaccgtcacaagattatcgtcaacagcaaacaggaatccagccaagcaggtatctatgctatcggtgactgctgctactatgacggaaaaattgatctgattgcgacaggcctcggagaagctccaactgctgtcaacaacgctatcaactacattgaccctgaacaaaaagtacaaccaaaacactctactagttta

SEQ ID NO: 3200 - protein, 321 aa, Streptococcus pneumoniae
  pyridine nucleotide-disulphide oxidoreductase family protein; Cellular location: membrane; Similar to strain R6 sequence 15903464 (0.E+01)
MSQLYDITIVGGGPVGLFAAFYAHLRQAKVQIIDSLPQLGGQPAILYPEKEILDVPGFPNLTGEELTNRLIEQLNGFDTPIHLNETVLEIDKQEEFAITTSKGSHLTKTVIIAMGGGAFKPRPLELEGVEGYENIHYHVSNIQQYAGKKVTILGGGDSAVDWALAFEKIAPTTLVHRRDNFRALEHSVQALQESSVTIKTPFAPSQLLGNGKTLDKLEITKVKSDETETIDLDHLFVNYGFKSSVGNLKNWGLDLNRHKIIVNSKQESSQAGIYAIGDCCYYDGKIDLIATGLGEAPTAVNNAINYIDPEQKVQPKHSTSL

SEQ ID NO: 3201 - DNA, 909 bp, Streptococcus pneumoniae
atgagtttcacagtagcagtaaaagaagaaatcctgggccaacaccatctgagctggcatgaattatctgccattatcaaaatgtctggtagcatcggtctctcgacttcgggcttgactttgtcagttgtgacagaaaatgccaaactggcccgtcacctctatgagtcctttctccatctctatgaaatcaaatctgaaattcgtcaccaccaacggagcaatcttcgcaagaatcgcgtctataccgtttttacagatgaaaaggtgcaggatttgttaagtgatttgcacttggcagactctttctttggcctggaaacaggtattgatgaggcgattttatcggatgaggaagcaggtcgtgcctatctctgtggcgctttcttggcaaatgggagcattcgtgaccctgagtcaggcaagtaccagttggaaatcagttctgtttatctggaccacgcgcaaggaattgcctcccttctccaacagtttttactggatgccaaggtgcttgagcgcaagaagggggctgtgacctatctccagcgagcagaagacattatggacttcttgatagtaataggagccatgcaggcacgtgatgattttgagcgggttaagattttgcgagaaacccgtaacgacctcaatcgggctaataatgccgagacagctaatatcgctcggacagtttctgccagcatgaagaccattaacaatatcagtaaaatcaaagatatcatgggcttagaaaatttgccagtagatttgcaggaagtggcgcaactgaggattcagcacccagactactctatccagcagttagcagatagtctcagcacccctctgaccaaaagtggtgtcaatcacagactcagaaaaatcaataagatagcggatgaatta

SEQ ID NO: 3202 - protein, 303 aa, Streptococcus pneumoniae
  conserved hypothetical protein; Cellular location: cytoplasm; Similar to strain R6 sequence 15903465 (e-168)
MSFTVAVKEEILGQHHLSWHELSAIIKMSGSIGLSTSGLTLSVVTENAKLARHLYESFLHLYEIKSEIRHHQRSNLRKNRVYTVFTDEKVQDLLSDLHLADSFFGLETGIDEAILSDEEAGRAYLCGAFLANGSIRDPESGKYQLEISSVYLDHAQGIASLLQQFLLDAKVLERKKGAVTYLQRAEDIMDFLIVIGAMQARDDFERVKILRETRNDLNRANNAETANIARTVSASMKTINNISKIKDIMGLENLPVDLQEVAQLRIQHPDYSIQQLADSLSTPLTKSGVNHRLRKINKIADEL

SEQ ID NO: 3203 - DNA, 975 bp, Streptococcus pneumoniae
atgagaaaaccaaagataacggtgattggtggagggactggaagtcccgtcattctaaaaagtctgcgggaaaaagatgtggaaatcgcagctatcgtgacggtggcagatgatggtggttcttcaggtgaactccgaaaaaatatgcaacagttgacaccgccaggtgatcttcgtaatgtccttgtggccatgtcggatatgcctaagttttatgagaaggtctttcagtatcggttctctgaggatgccggagcctttgctggccatccattgggaaatctcatcattgctggcttgtcagaaatgcagggttcaacctataatgccatgcagttattgagcaaatttttccatacaacagggaaaatttatccttccagtgaccatcctttgacccttcatgcagtctttcaggatgggacagaagtggctggagagagtcatattgtagaccatcgaggcataattgacaatgtctatgtgaccaatgccctaaacgatgatacgcctctggccagccgtcgagtagtgcagaccatccttgaaagtgacatgattgtcctagggccaggttccctctttacctctattttgcccaatatcgtgattaaggaaattgggcgggctcttttggaaaccaaggcagaaattgcctatgtctgcaatatcatgacccaacgtggggagacggaacactttacagatagcgaccacgtggaagtcttgcatcgtcaccttggtcgcccttttatcgacactgtcttggtgaatattgaaaaagtgcctcaggaatacatgaattccaaccgttttgatgaatacttagtgcaagtggaacacgattttgtaggtctttgtaagcaagtttcgcgcgtgatttcatctaacttccttcgtctggaaaatggcggtgccttccacgatggagatttgattgtggacgagttgatgcgcattatacaggtgaaaaaa

SEQ ID NO: 3204 - protein, 325 aa, Streptococcus pneumoniae
  conserved hypothetical protein; Cellular location: cytoplasm; Similar to strain R6 sequence 15903466 (0.E+01)
MRKPKITVIGGGTGSPVILKSLREKDVEIAAIVTVADDGGSSGELRKNMQQLTPPGDLRNVLVAMSDMPKFYEKVFQYRFSEDAGAFAGHPLGNLIIAGLSEMQGSTYNAMQLLSKFFHTTGKIYPSSDHPLTLHAVFQDGTEVAGESHIVDHRGIIDNVYVTNALNDDTPLASRRVVQTILESDMIVLGPGSLFTSILPNIVIKEIGRALLETKAEIAYVCNIMTQRGETEHFTDSDHVEVLHRHLGRPFIDTVLVNIEKVPQEYMNSNRFDEYLVQVEHDFVGLCKQVSRVISSNFLRLENGGAFHDGDLIVDELMRIIQVKK

SEQ ID NO: 3205 - DNA, 888 bp, Streptococcus pneumoniae
atgacaaagaaacaacttcacttggtgattgtgacagggatgagtggcgcagggaaaactgtagccattcagtccttcgaggatctaggttatttcaccattgataatatgccgccagctctcttgcctaagtttttgcagctggttgaaattaaggaagacaatcctaagttggccttggtagtggatatgcgtagccgttctttcttttcagagattcaagctgttttggatgagttggaaaatcaagatggtttggatttcaaaatcctctttttggatgcggctgataaggaattggtcgctcgttacaaggaaaccagacggagtcacccactagcagcagacggtcgtattttagatggaatcaagttggaacgtgaactcttggcacctttgaaaaatatgagccaaaatgtggtggatacgactgaactcactccacgtgagctgcgcaaaacccttgcagagcagttttcagaccaagaacaagcccagtctttccgtatcgaagtcatgtctttcggatttaagtatggaatcccgattgatgcggacttggtctttgatgtccgtttcttgccaaatccctattatttaccagaactgagaaaccaaacgggtgtggatgaacctgtttatgattatgtcatgaaccatcctgagtcagaagacttttatcaacatttattggccttgattgagccgattctgccaagttaccaaaaggaaggtaagtccgttttgaccattgccatgggatgtacgggtggacaacaccgtagtgtggcatttgctaaacgcttggcgcaggacttatccaagaattggtctgttaatgaagggcatcgcgacaaagaccgcagaaaggaaacggtaaaccgttca

SEQ ID NO: 3206 - protein, 296 aa, Streptococcus pneumoniae
  conserved hypothetical protein; Cellular location: outside; Similar to strain R6 sequence 15903467 (e-168)
MTKKQLHLVIVTGMSGAGKTVAIQSFEDLGYFTIDNMPPALLPKFLQLVEIKEDNPKLALVVDMRSRSFFSEIQAVLDELENQDGLDFKILFLDAADKELVARYKETRRSHPLAADGRILDGIKLERELLAPLKNMSQNVVDTTELTPRELRKTLAEQFSDQEQAQSFRIEVMSFGFKYGIPIDADLVFDVRFLPNPYYLPELRNQTGVDEPVYDYVMNHPESEDFYQHLLALIEPILPSYQKEGKSVLTIAMGCTGGQHRSVAFAKRLAQDLSKNWSVNEGHRDKDRRKETVNRS

SEQ ID NO: 3207 - DNA, 378 bp, Streptococcus pneumoniae
atggcaaaaacaattcatacagataaggccccaaaggctatcggaccctatgttcaaggaaaaatcgttggcaaccttttgtttgctagcggtcaagttcccctatcccctgaaactggggaaattgtaggagagaatatccaagaacagacagagcaagtcttgaaaaacatcggtgctattttggcagaagcaggaacagactttgaccatgttgtcaaaacaacttgcttcttgagcgatatgaacgactttgttccttttaatgaggtttaccaaacggccttcaaagaggaattcccagctcgttcagctgtggaggtagctcgtcttcctcgtgatgtaaaagtcgaaattgaagtcatcgcagagattgga

SEQ ID NO: 3208 - protein, 126 aa, Streptococcus pneumoniae
  endoribonuclease L-PSP; Cellular location: cytoplasm; Similar to strain R6 sequence 15903468 (2.E-68)
MAKTIHTDKAPKAIGPYVQGKIVGNLLFASGQVPLSPETGEIVGENIQEQTEQVLKNIGAILAEAGTDFDHVVKTTCFLSDMNDFVPFNEVYQTAFKEEFPARSAVEVARLPRDVKVEIEVIAEIG

SEQ ID NO: 3209 - DNA, 591 bp, Streptococcus pneumoniae
gtgactatggaacttaatacacacaatgctgaaatcttgctcagtgcagctaataagtcccactatccgcaggatgaactgccagagattgccctagcagggcgttcaaatgttggtaaatccagctttatcaacactatgttgaaccgtaagaatctcgcccgtacatcaggaaaacctggtaaaacccagctcctgaacttttttaacattgatgacaagatgcgctttgtggatgtgcctggttatggctatgctcgtgtttctaaaaaggaacgtgaaaagtgggggtgcatgattgaggagtacttaacgactcgggaaaatctccgtgcggttgtcagtctagttgaccttcgtcatgacccgtcagcagatgatgtgcagatgtacgaatttctcaagtattatgagattccagtcatcattgtggcgaccaaggcggacaagattcctcgtggtaaatggaacaagcatgaatcagcaatcaaaaagaaattaaactttgacccgagtgacgatttcatcctcttttcatctgtcagtaaggcagggatggatgaggcttgggatgcaatcttagaaaaattg

SEQ ID NO: 3210 - protein, 197 aa, Streptococcus pneumoniae
  GTP-binding protein; Cellular location: cytoplasm; Similar to strain R6 sequence 15903469 (e-111)
MTMELNTHNAEILLSAANKSHYPQDELPEIALAGRSNVGKSSFINTMLNRKNLARTSGKPGKTQLLNFFNIDDKMRFVDVPGYGYARVSKKEREKWGCMIEEYLTTRENLRAVVSLVDLRHDPSADDVQMYEFLKYYEIPVIIVATKADKIPRGKWNKHESAIKKKLNFDPSDDFILFSSVSKAGMDEAWDAILEKL

SEQ ID NO: 3211 - DNA, 1230 bp, Streptococcus pneumoniae
atgtctacaaatagaaaaaatgatatgatggtttattgctcattttgtggcaaaaaccaagaagaagtacaaaaaataattgctggcaacaatgcttttatttgtaatgaatgcgtggagttagctcaggaaatcattcgagaagaattggttgaggaagtcttggcagacttgtctgaggtgccaaaaccaattgaactcctccatatcttgaaccactatgtaattggtcaagatcgtgccaagcgtgccttggcagtggcggtttataaccactacaaacgcatcaatttccacgatacacgcgaagagtcagaagatgtggatttgcagaagtcaaacattttgatgattggcccaactggttcagggaaaactttccttgcccagaccttggctaagagcttgaatgtaccttttgctattgcggatgcgacagctctgacggaggctggttatgtgggtgaggatgtggaaaatatcctcctcaaactcttgcaggttgctgactttaacatcgaacgtgcagagcgtggcattatctatgtggatgaaattgacaagattgccaagaagagtgagaatgtgtctatcacacgtgatgtttctggtgaaggggtgcaacaagcccttctcaagattattgagggaactgttgctagcgtaccgcctcaaggtggacgcaaacatccacaacaagagatgattcaagtggatacaaaaaatatcctcttcatcgtgggtggtgcttttgatggtattgaagaaattgtcaaacaacgtctgggtgaaaaagtcatcggatttggtcaaaataataaggcgattgacgaaaacagctcatacatgcaagaaatcatcgctgaagacattcaaaaatttggtattatccctgagttgattggacgcttgcctgtttttgcggctcttgagcaattgaccgttgatgacttggttcgcatcttgaaagagccaagaaatgccttggtgaaacaataccaaaccttgctttcttatgatgatgttgagttggaatttgacgacgaagcccttcaagagattgctaataaagcaatcgaacggaagacaggggcgcgtggacttcgctccatcatcgaagaaaccatgctagatgtcatgtttgaggtgccgagtcaggaaaatgtgaaattggttcgcatcactaaagaaactgtagatggaacggataaaccgatcctagaaacagcc

SEQ ID NO: 3212 - protein, 410 aa, Streptococcus pneumoniae
  ATP-dependent Clp protease, ATP-binding subunit ClpX (clpX); Cellular location: cytoplasm; Similar to strain R6 sequence 15903470 (0.E+01)
MSTNRKNDMMVYCSFCGKNQEEVQKIIAGNNAFICNECVELAQEIIREELVEEVLADLSEVPKPIELLHILNHYVIGQDRAKRALAVAVYNHYKRINFHDTREESEDVDLQKSNILMIGPTGSGKTFLAQTLAKSLNVPFAIADATALTEAGYVGEDVENILLKLLQVADFNIERAERGIIYVDEIDKIAKKSENVSITRDVSGEGVQQALLKIIEGTVASVPPQGGRKHPQQEMIQVDTKNILFIVGGAFDGIEEIVKQRLGEKVIGFGQNNKAIDENSSYMQEIIAEDIQKFGIIPELIGRLPVFAALEQLTVDDLVRILKEPRNALVKQYQTLLSYDDVELEFDDEALQEIANKAIERKTGARGLRSIIEETMLDVMFEVPSQENVKLVRITKETVDGTDKPILETA

SEQ ID NO: 3213 - DNA, 168 bp, Streptococcus pneumoniae
atggaacggagtttatttggtctattcacggcttttctgtgtttcatctgctttctggcaggagcacaagcttttcgtaaaaagcgttacgggctttctatcctcctttggttaaatgcctttaccaatctggtcaatagtattcatgctttttacatgaccttattt

SEQ ID NO: 3214 - protein, 56 aa, Streptococcus pneumoniae
  hypothetical protein; Cellular location: outside; Similar to strain R6 sequence 15903471 (6.E-29)
MERSLFGLFTAFLCFICFLAGAQAFRKKRYGLSILLWLNAFTNLVNSIHAFYMTLF

SEQ ID NO: 3215 - DNA, 504 bp, Streptococcus pneumoniae
atgactaagaaaatcgtagctatttgggcccaggatgaagagggtgtgattggtaaggaaaatcgtctgccttggcatttgccagcagaattgcagcactttaaagaaacaactctgaatcatgctatcttgatggggcgtgtgacctttgatgggatggggcgtcgcttgcttccaaaacgggaaaccttgattttgacgcgtaatccggaagaaaagatagatggggttgctacttttcaggacgtccagtctgttcttgactggtatcaggctcaagaaaagaatctctacattatcggtgggaagcaaatttttcaggcttttgaaccttaccttgatgaagtgattgtcactcacattcatgctcgggtggaaggagatacctatttccctgaagaacttgacttgtctctttttgagacagtttcaagcaaattttacgccaaagatgagaagaatccttatgattttaccatccaataccgcaagagaaaggaagtc

SEQ ID NO: 3216 - protein, 168 aa, Streptococcus pneumoniae
  dihydrofolate reductase (folA); Cellular location: cytoplasm; Similar to strain R6 sequence 15903472 (1.E-95)
MTKKIVAIWAQDEEGVIGKENRLPWHLPAELQHFKETTLNHAILMGRVTFDGMGRRLLPKRETLILTRNPEEKIDGVATFQDVQSVLDWYQAQEKNLYIIGGKQIFQAFEPYLDEVIVTHIHARVEGDTYFPEELDLSLFETVSSKFYAKDEKNPYDFTIQYRKRKEV

SEQ ID NO: 3217 - DNA, 636 bp, Streptococcus pneumoniae
atgaatgtgagtgacaatcacttcatcaaggtaaggttcaaaagcctgaaaaatttgcttcccaccgataatgtagagattcttttcttgagcctgataccagtcaagaacagactggacgtcctgaaaagtagcaaccccatctatcttttcttccggattacgcgtcaaaatcaaggtttcccgttttggaagcaagcgacgccccatcccatcaaaggtcacacgccccatcaagatagcatgattcagagttgtttctttaaagtgctgcaattctgctggcaaatgccaaggcagacgattttccttaccaatcacaccctcttcatcctgggcccaaatagctacgattttcttagtcatgcttccatccttttcactgatagtactattttatcaaaaaactcaaaaaaagactggtttggaatagcttacaaaatagaaaaaatctgtaagaaatttcctacagatttatctatgtttccttatttcttacaaaccaggtgcttgtccaagttcggctgcaagcatccaaattgttttatctgtttcagttttagcgcctgcaaagataccgtttgtcacatcgtcaccttcttcatcagtgacatccaaacctttttggaaaagttc

SEQ ID NO: 3218 - protein, 212 aa, Streptococcus pneumoniae
  hypothetical protein
MNVSDNHFIKVRFKSLKNLLPTDNVEILFLSLIPVKNRLDVLKSSNPIYLFFRITRQNQGFPFWKQATPHPIKGHTPHQDSMIQSCFFKVLQFCWQMPRQTIFLTNHTLFILGPNSYDFLSHASILFTDSTILSKNSKKDWFGIAYKIEKICKKFPTDLSMFPYFLQTRCLSKFGCKHPNCFICFSFSACKDTVCHIVTFFISDIQTFLEKF

SEQ ID NO: 3219 - DNA, 534 bp, Streptococcus pneumoniae
atgaatgaggtaaagaaaatggtagaattgaaaaaagaagcagtaaaagacgtaacatcattgacaaaagcagcgccagtagcattggcaaaaacaaaggaagtcttgaaccaagctgttgctgatttgtatgtagctcacgttgctttgcaccaagtgcactggtatatgcatggtcgtggtttccttgtatggcatccaaaaatggatgagtacatggaagctcttgacggtcaattggatgaaatcagtgaacgcttgattacactcggtggaagcccattctctacattgacagagttccttcaaaatagtgaaatcgaagaagaagctggtgaataccgtaatgttgaagaaagcttggaacgtgttcttgttatctaccgttacttgtcagaacttttccaaaaaggtttggatgtcactgatgaagaaggtgacgatgtgacaaacggtatctttgcaggcgctaaaactgaaacagataaaacaatttggatgcttgcagccgaacttggacaagcacctggtttg

SEQ ID NO: 3220 - protein, 178 aa, Streptococcus pneumoniae
  non-heme iron-containing ferritin; Cellular location: cytoplasm; Similar to strain R6 sequence 15903473 (3.E-99)
MNEVKKMVELKKEAVKDVTSLTKAAPVALAKTKEVLNQAVADLYVAHVALHQVHWYMHGRGFLVWHPKMDEYMEALDGQLDEISERLITLGGSPFSTLTEFLQNSEIEEEAGEYRNVEESLERVLVIYRYLSELFQKGLDVTDEEGDDVTNGIFAGAKTETDKTIWMLAAELGQAPGL

SEQ ID NO: 3221 - DNA, 1518 bp, Streptococcus pneumoniae
gtggaacagcattcagatgtctgttacattttttataggagagaaagattgaaaacaaaaattggattagcaagtatctgtttactaggcttggcaactagtcatgtcgctgcaaatgaaactgaagtagcaaaaacttcgcaggatacaacgacagcttcaagtagttcagagcaaaatcagtcttctaataaaacgcaaacgagcgcagaagtacagactaatgctgctgcccactgggatggggattattatgtaaaggatgatggttctaaagctcaaagtgaatggatttttgacaactactataaggcttggttttatattaattcagatggtcgttactcgcagaatgaatggcatggaaattactacctgaaatcaggtggatatatggcccaaaacgagtggatctatgacagtaattacaagagttggttttatctcaagtcagatggggcttatgctcatcaagaatggcaattgattggaaataagtggtactacttcaagaagtggggttacatggctaaaagccaatggcaaggaagttatttcttgaatggtcaaggagctatgatgcaaaatgaatggctctatgatccagcctattctgcttatttttatctaaaatccgatggaacttatgctaaccaagagtggcaaaaagtgggcggcaaatggtactatttcaagaagtggggctatatggctcggaatgagtggcaaggcaactactatttgactggaagtggtgccatggcgactgacgaagtgattatggatggtactcgctatatctttgcggcctctggtgagctcaaagaaaaaaaagatttgaatgtcggctgggttcacagagatggtaagcgctatttctttaataatagagaagaacaagtgggaaccgaacatgctaagaaagtcattgatattagtgagcacaatggtcgtatcaatgattggaaaaaggttattgatgagaacgaagtggatggtgtcattgttcgtctaggttatagcggtaaagaagacaaggaattggcgcataacattaaggagttaaaccgtctgggaattccttatggtgtctatctctatacctatgctgaaaatgagaccgatgctgagagtgacgctaaacagaccattgaacttataaagaaatacaatatgaacctgtcttaccctatctattatgatgttgagaattgggaatatgtaaataagagcaagagagctccaagtgatacaggcacttgggttaaaatcatcaacaagtacatggacacgatgaagcaggcgggttatcaaaatgtgtatgtctatagctatcgtagtttattacagacgcgtttaaaacacccagatattttaaaacatgtaaactgggtagcggcctatacgaatgctttagaatgggaaaaccctcattattcaggaaaaaaaggttggcaatatacctcttctgaatacatgaaaggaatccaagggcgcgtagatgtcagcgtttggtat

SEQ ID NO: 3222 - protein, 506 aa, Streptococcus pneumoniae
  lysozyme, FRAMESHIFT (lytC); Cellular location: outside; Feature of note: WYY motif; Similar to strain R6 sequence 15903474 (0.E+01)
MEQHSDVCYIFYRRERLKTKIGLASICLLGLATSHVAANETEVAKTSQDTTTASSSSEQNQSSNKTQTSAEVQTNAAAHWDGDYYVKDDGSKAQSEWIFDNYYKAWFYINSDGRYSQNEWHGNYYLKSGGYMAQNEWIYDSNYKSWFYLKSDGAYAHQEWQLIGNKWYYFKKWGYMAKSQWQGSYFLNGQGAMMQNEWLYDPAYSAYFYLKSDGTYANQEWQKVGGKWYYFKKWGYMARNEWQGNYYLTGSGAMATDEVIMDGTRYIFAASGELKEKKDLNVGWVHRDGKRYFFNNREEQVGTEHAKKVIDISEHNGRINDWKKVIDENEVDGVIVRLGYSGKEDKELAHNIKELNRLGIPYGVYLYTYAENETDAESDAKQTIELIKKYNMNLSYPIYYDVENWEYVNKSKRAPSDTGTWVKIINKYMDTMKQAGYQNVYVYSYRSLLQTRLKHPDILKHVNWVAAYTNALEWENPHYSGKKGWQYTSSEYMKGIQGRVDVSVWY

SEQ ID NO: 3223 - DNA, 756 bp, Streptococcus pneumoniae
atgtcacgtaaaccatttatcgctggtaactggaaaatgaacaaaaatccagaagaagctaaagcattcgttgaagcagttgcatcaaaacttccttcatcagatcttgttgaagcaggtatcgctgctccagctcttgatttgacaactgttcttgctgttgcaaaaggctcaaaccttaaagttgctgctcaaaactgctactttgaaaatgcaggtgctttcactggtgaaactagcccacaagttttgaaagaaatcggtactgactacgttgttatcggtcactcagaacgccgtgactacttccatgaaactgatgaagatatcaacaaaaaagcaaaagcaatctttgcgaacggtatgcttccaatcatctgttgtggtgaatcacttgaaacttacgaagctggtaaagctgctgaattcgtaggtgctcaagtatctgctgcattggctggattgactgctgaacaagttgctgcctcagttatcgcttatgagccaatctgggctatcggtactggtaaatcagcttcacaagacgatgcacaaaaaatgtgtaaagttgttcgtgacgttgtagctgctgactttggtcaagaagtcgcagacaaagttcgtgttcaatacggtggttctgttaaacctgaaaatgttgcttcatacatggcttgcccagacgttgacggtgcccttgtaggtggtgcgtcacttgaagctgaaagcttcttggctttgcttgactttgtaaaa

SEQ ID NO: 3224 - protein, 252 aa, Streptococcus pneumoniae
  triosephosphate isomerase (tpi); Cellular location: membrane; Similar to strain R6 sequence 15903475 (e-142)
MSRKPFIAGNWKMNKNPEEAKAFVEAVASKLPSSDLVEAGIAAPALDLTTVLAVAKGSNLKVAAQNCYFENAGAFTGETSPQVLKEIGTDYVVIGHSERRDYFHETDEDINKKAKAIFANGMLPIICCGESLETYEAGKAAEFVGAQVSAALAGLTAEQVAASVIAYEPIWAIGTGKSASQDDAQKMCKVVRDVVAADFGQEVADKVRVQYGGSVKPENVASYMACPDVDGALVGGASLEAESFLALLDFVK

SEQ ID NO: 3225 - DNA, 675 bp, Streptococcus pneumoniae
atgacatatttagacgcttttaaatcaggtaccttggttttaccgagtgccctgctcttgcattttaaggaactctttccttctagcgacgattttctggtttggcaatttttctatttgcaaaatacgacaggcttagaagaaatgtcgccaagccagattgctgaaaggattggcaaggaaatttcggatgtcaaccagtccatttctaatctgacggaaaggggactgctccagtatcgtactatcgaattaaatggcgaaattgaattgctctttgatgctagtttggccttggaacgtttggatgacctgtttggagcagttcattcaagttcagaccagctaacacctcaaaaccagctcaaggatttggtggaaaccttccagcaggagttgggacgattgttgacgccttttgagattgaggatttgaccaagacactaaaggaagatggaaccagtgctgacttgattaaggaggctcttcgtgaagctgttttgaatggaaaaccaaactggaagtacattcaggcgattttgagaaactggcgccatgaaggaatcaagagtgtggctcaaattgaggccaagagagcagaaagagaagcaagcaatcctcagttgacacaggtatctgcagatttcataaatgccatggatctctggaaggat

SEQ ID NO: 3226 - protein, 225 aa, Streptococcus pneumoniae
  conserved hypothetical protein; Cellular location: outside; Similar to strain R6 sequence 15903476 (e-124)
MTYLDAFKSGTLVLPSALLLHFKELFPSSDDFLVWQFFYLQNTTGLEEMSPSQIAERIGKEISDVNQSISNLTERGLLQYRTIELNGEIELLFDASLALERLDDLFGAVHSSSDQLTPQNQLKDLVETFQQELGRLLTPFEIEDLTKTLKEDGTSADLIKEALREAVLNGKPNWKYIQAILRNWRHEGIKSVAQIEAKRAEREASNPQLTQVSADFINAMDLWKD

SEQ ID NO: 3227 - DNA, 942 bp, Streptococcus pneumoniae
atgccgattcgaattgataaaaaattgccagctgttgagattttacggacagagaatatctttgtcatggatgatcaacgtgctgcccaccaagatatccgtcctttgaagattttaattttaaatctcatgccacagaaaatggtcacagagacccagttgttgcgccacttggctaatacacccctacaactggatattgattttctctatatggagagccaccgttctaaaacaactcgttcagagcacatggagaccttctataaaacttttcctgaagtcaaggatgagtattttgatgggatgatcatcacgggtgctccagttgagcatttaccatttgaggaagtggactattgggaggaatttagacagatgcttgagtggtctaagactcatgtctattcgacccttcatatctgttggggggctcaggctgggctttatctgcgctatggtgtagaaaaataccagatggacagtaagctatcaggtatttatcctcaggacaccctaaaagagggtcaccttctatttagaggctttgatgatagctatgtatcccctcattcacggcacacggagatttctaaggaagaggtcttaaacaagaccaatctcgagattttatcagaaggacctcaggttggggtttctattttggccagtcgtgatttacgagaaatttatagttttggtcatttggagtatgaccgtgataccttggcaaaagagtattttcgagatcgtgatgcaggtttcgacccacatattccagaaaattactttaaagatgatgatgttaatcaggtaccttgtctttgttggtcttcatctgcagccctctttttcagtaattgggtagaccatgcggtctatcaggagacgccttttgattggagaaagatagaagatgatgcatctgcatatgggtattta

SEQ ID NO: 3228 - protein, 314 aa, Streptococcus pneumoniae
  homoserine O-succinyltransferase (metA); Cellular location: cytoplasm; Similar to strain R6 sequence 15903477 (0.E+01)
MPIRIDKKLPAVEILRTENIFVMDDQRAAHQDIRPLKILILNLMPQKMVTETQLLRHLANTPLQLDIDFLYMESHRSKTTRSEHMETFYKTFPEVKDEYFDGMIITGAPVEHLPFEEVDYWEEFRQMLEWSKTHVYSTLHICWGAQAGLYLRYGVEKYQMDSKLSGIYPQDTLKEGHLLFRGFDDSYVSPHSRHTEISKEEVLNKTNLEILSEGPQVGVSILASRDLREIYSFGHLEYDRDTLAKEYFRDRDAGFDPHIPENYFKDDDVNQVPCLCWSSSAALFFSNWVDHAVYQETPFDWRKIEDDASAYGYL

SEQ ID NO: 3229 - DNA, 510 bp, Streptococcus pneumoniae
atgaatttaaaagattacattgcaacaattgaaaattatccaaaggaaggcattaccttccgtgatattagtcctttgatggctgatggaaatgcttatagctacgctgttcgtgaaatcgttcagtatgctactgacaagaaagtcgacatgatcgtgggacctgaagctcgtggatttatcgtgggttgtccagttgcctttgagttgggaattggttttgcgcctgttcgtaagccaggtaaattgccacgcgaagttatttctgctgactatgaaaaagagtacggtgtcgataccttgactatgcacgcggatgccattaagccaggtcaacgtgttcttattgtagatgaccttttggcgacaggtggaactgttaaggcaactatcgagatgattgaaaaacttggtggtgttatggcaggttgtgccttccttgttgaattggatgaattgaacggccgtgaaaaaattggtgactacgactacaaagttcttatgcattat

SEQ ID NO: 3230 - protein, 170 aa, Streptococcus pneumoniae
  adenine phosphoribosyltransferase (apt); Cellular location: membrane; Similar to strain R6 sequence 15903478 (3.E-96)
MNLKDYIATIENYPKEGITFRDISPLMADGNAYSYAVREIVQYATDKKVDMIVGPEARGFIVGCPVAFELGIGFAPVRKPGKLPREVISADYEKEYGVDTLTMHADAIKPGQRVLIVDDLLATGGTVKATIEMIEKLGGVMAGCAFLVELDELNGREKIGDYDYKVLMHY

SEQ ID NO: 3231 - DNA, 756 bp, Streptococcus pneumoniae
atgtcagaagcaggtcataagtttttagcaaaattggggaaaaaacgcttacgtccaggtggaaagcgtgccacagattggttaattgcagaaggaggattttcaaaagaaaagagaatactagaggttgcgtgtaataggggaactacagcaattgagttggcacagcgttttggttgcaagataactgctgttgatatggatgctcaagctttagaagtggctaaaaaatctgctggaacggcaggtgttgctcatttaatcagttttgaaagagcaaatgcaatgaaacttccttatcaagatgctagttttgatattgttataaatgaagctatgctgactatgcaagccgatcaagctaagaaaaaatgtgtaatggaatatctaagggtattaaaacctggaggtcttctcttgacacatgatgtgcttcttaaggaagctaaagagtctatcagacaggaattatcacaagcaattcatgtaaatgtaggtcctttaactcaagatggttgggaacaggtgatgatagaatcaggttattgtgatgtgaaagcattgactggtgaaatgacattaatgaaattatcgggtatgatttatgacgaaggtttgctaggaactttgaaaatttgtgtaaatgcttgtaaaaaggagaatagaaagcagtttttaactatgtataaaatgtttgctaagaataaacagaaattgggctttattgcgatggctagttataaatcgtcaaaacgt

SEQ ID NO: 3232 - protein, 252 aa, Streptococcus pneumoniae
  methyltransferase, putative; Cellular location: cytoplasm; Similar to strain R6 sequence 15903479 (e-142)
MSEAGHKFLAKLGKKRLRPGGKRATDWLIAEGGFSKEKRILEVACNRGTTAIELAQRFGCKITAVDMDAQALEVAKKSAGTAGVAHLISFERANAMKLPYQDASFDIVINEAMLTMQADQAKKKCVMEYLRVLKPGGLLLTHDVLLKEAKESIRQELSQAIHVNVGPLTQDGWEQVMIESGYCDVKALTGEMTLMKLSGMIYDEGLLGTLKICVNACKKENRKQFLTMYKMFAKNKQKLGFIAMASYKSSKR

SEQ ID NO: 3233 - DNA, 120 bp, Streptococcus pneumoniae
ttgtatgcttttgattctagtttatcaaataatagattagaattgtcagataatatcattttgtgttataatgaagaaaaaacagaggtgttcaaatgtcagaagcaggtcataagtttt

SEQ ID NO: 3234 - protein, 40 aa, Streptococcus pneumoniae
  hypothetical protein; Cellular location: cytoplasm
MYAFDSSLSNNRLELSDNIILCYNEEKTEVFKCQKQVISF

SEQ ID NO: 3235 - DNA, 1128 bp, Streptococcus pneumoniae
atggtagaattgaatcttaaaaatatttacaaaaaatatccaaacagcgaacactattcagttgaagatttcaacttgaacatcaaagataaagaatttatcgttttcgtaggaccttcaggatgtggtaaatcaactacactccgtatgattgctggtcttgaagacattacagaaggtactgcatctatcgatggcgtagttgtcaacgacgtagctccaaaagaccgtgatatcgccatggtattccaaaactacgctctttacccacacatgactgtttatgacaacatggctttcggtttgaaattgcgtaaatacagcaaagaagacattaacaaacgtgttcaagaagcagctgaaatacttggattgaaagaattcttggaacgtaaaccagctgacctttcaggtggtcaacgtcaacgtgttgccatggggcgtgcgattgtccgtgatgcgaaagtattcttgatggacgaacctttgtcaaacttggatgccaaacttcgtgtatcaatgcgtgctgaaatcgctaaaattcaccgtcgtatcggagctacaactatctatgtaactcacgaccaaacagaagcgatgacacttgcagaccgtatcgttattatgtcagctactaagaaccctgctggtacaggtactatcggacgtgtagaacaaatcggtactcctcaagaagtttacaaaaatccagttaacaaattcgttgcaggattcatcggaagcccagctatgaacttcatcaccgtgaaattggttggtagcgaaattgtttctgacggtttccgtttgaaagtgccagaaggagcattgaaagttcttcgtgaaaaaggctacgaaggaaaagaattgatctttggtatccgtccagaagacgtgaatgcagaacctgctttccttgaaacattcccagactgtgttgtaaaagcgactatctctgtatcagaactgcttggttcagaatctcacctttactgtcaagttggtaaagacgagtttgttgcaaaagttgatgctcgtgactacttgcaaacaggtgcaacagttgagcttggatttgacttgaacaaagcacacttcttcgatgtagaaactgaaaaaacaatctac

SEQ ID NO: 3236 - protein, 376 aa, Streptococcus pneumoniae
  sugar ABC transporter, ATP-binding protein (msmK); Cellular location: cytoplasm; Similar to strain R6 sequence 15903480 (0.E+01)
MVELNLKNIYKKYPNSEHYSVEDFNLNIKDKEFIVFVGPSGCGKSTTLRMIAGLEDITEGTASIDGVVVNDVAPKDRDIAMVFQNYALYPHMTVYDNMAFGLKLRKYSKEDINKRVQEAAEILGLKEFLERKPADLSGGQRQRVAMGRAIVRDAKVFLMDEPLSNLDAKLRVSMRAEIAKIHRRIGATTIYVTHDQTEAMTLADRIVIMSATKNPAGTGTIGRVEQIGTPQEVYKNPVNKFVAGFIGSPAMNFITVKLVGSEIVSDGFRLKVPEGALKVLREKGYEGKELIFGIRPEDVNAEPAFLETFPDCVVKATISVSELLGSESHLYCQVGKDEFVAKVDARDYLQTGATVELGFDLNKAHFFDVETEKTIY

SEQ ID NO: 3237 - DNA, 126 bp, Streptococcus pneumoniae
ttgcacaaaactttagagaatatcggagaatttgaagaagataatctttattattcttctatagacaaaagcagaaacaaggatcagttttcccatattttcgggctctataatatttgtagtggg

SEQ ID NO: 3238 - protein, 42 aa, Streptococcus pneumoniae
  hypothetical protein; Cellular location: cytoplasm
MHKTLENIGEFEEDNLYYSSIDKSRNKDQFSHIFGLYNICSG

SEQ ID NO: 3239 - DNA, 1254 bp, Streptococcus pneumoniae
atggaacaattacattttatcacaaaactgctcgatattaaagacccaaacatcaagattctagatatcatcaatatggatacccacaaagaaattatcgctaagctggattatgaggctccatcttgccctgattgtggaagtctaatgaagaaatatgactttcaaaaaccgtctaagatcccttacctcgaaacaactggtatgccttctagaattctccttagaaaacgccgtttcaagtgctatcactgttcaaaaatgatggttgctgagactcccctggtaaagaaaaatcaccaaatccctcgtatcatcaaccaaaaaattgctcaaaagttaattgaaaaaatttctatgactgatattgcccatcagctggccatttcaacttcaactgtcattcgcaagctcaatgactttcactttgagcatgatttttctcggcttccaaagattatgtcttgggatgagtatgccttcactaagggaaagatgagtttcattgcgcaagattttgataatcttaatattatcactgttcttgaaggcagaacacaagctgtcatccgaaatcactttcttcgctacgatagagccgttcgttgtcaagtgaaaatcattacgatggatatgtttagtccttactatgacttggctaaacagctttttccgtgtgctaaaatcgttctagatcgtttccatattatccaacatctcagccgtgccatgagtcgttttcgtgttcaaattatgaatcagtttgaacgaaaatctcatgaatacaaggctatcaagcgttactggaaactcatccaacaggatagtcgtaaactcagcgataaacgtttttatcgccctacttttcgcatgcacttaacaaataaagaaattcttgacaagattttaagctattcagaagacttgaaacaccactatcagatctatcaactcttactttttcactttcagaacaaagaccctgagaaatttttcggactcattgaggacaatctgaagcaggttcatcctctttttcagactgtctttaaaacctttctaaagaacaaagagaaaatcgtcaacgcccttcaactaccctattcaaacgccaaattggaagcgaccaataatctcatcaaacttatcaaacgcaatgcctttggttttcgaaactttgaaaacttcaaaaaacggatttttatcgctctgaacatcaaaaaagaaaggacgaaatttgtcctttctcaagct

SEQ ID NO: 3240 - protein, 418 aa, Streptococcus pneumoniae
  IS1167, transposase; Cellular location: cytoplasm; Similar to strain R6 sequence 15903763 (0.E+01)
MEQLHFITKLLDIKDPNIKILDIINMDTHKEIIAKLDYEAPSCPDCGSLMKKYDFQKPSKIPYLETTGMPSRILLRKRRFKCYHCSKMMVAETPLVKKNHQIPRIINQKIAQKLIEKISMTDIAHQLAISTSTVIRKLNDFHFEHDFSRLPKIMSWDEYAFTKGKMSFIAQDFDNLNIITVLEGRTQAVIRNHFLRYDRAVRCQVKIITMDMFSPYYDLAKQLFPCAKIVLDRFHIIQHLSRAMSRFRVQIMNQFERKSHEYKAIKRYWKLIQQDSRKLSDKRFYRPTFRMHLTNKEILDKILSYSEDLKHHYQIYQLLLFHFQNKDPEKFFGLIEDNLKQVHPLFQTVFKTFLKNKEKIVNALQLPYSNAKLEATNNLIKLIKRNAFGFRNFENFKKRIFIALNIKKERTKFVLSQA

SEQ ID NO: 3241 - DNA, 573 bp, Streptococcus pneumoniae
atgacaaaggctttaatttcgattgattatacagaagattttgttgctgatagtgggaaactaacagcaggtgctccagctcaggcgatttcggatgccatcagcaaggtaactcgattagcttttgaacgaggagattatatcttctttactattgatgctcatgaagaaaacgattgtttccatccggaaagtaagttatttcctcctcataatctgattgggacgagtggacggaatttatatggagatttggggatcttttatcaagagcatggttcagacagtcgtgtcttttggatggataaacgccattactcagctttttcagggactgacctagatattcgtttgagagagcgtagagtgtctaccgttatcttaacaggtgtcttgacggatatctgtgtcctacatacagctatagatgcctataatctaggatatgacatcgagattgttaaaccagctgttgcttccatctggcctgaaaatcatcaatttgccctaggtcatttcaaaaatacactcggagctaagttagtagatgaaaatctaaatgaactttttgag

SEQ ID NO: 3242 - protein, 191 aa, Streptococcus pneumoniae
  isochorismatase family protein; Cellular location: membrane; Similar to strain R6 sequence 15903481 (e-109)
MTKALISIDYTEDFVADSGKLTAGAPAQAISDAISKVTRLAFERGDYIFFTIDAHEENDCFHPESKLFPPHNLIGTSGRNLYGDLGIFYQEHGSDSRVFWMDKRHYSAFSGTDLDIRLRERRVSTVILTGVLTDICVLHTAIDAYNLGYDIEIVKPAVASIWPENHQFALGHFKNTLGAKLVDENLNELFE

SEQ ID NO: 3243 - DNA, 786 bp, Streptococcus pneumoniae
atggcacatttattagaaaaaactagaaaaattacatcaattttgaaacgctcagaggagcagttgcaggatgagctcccttacaacgctattacgcgtcagttagcggatattattcattgcaatgcctgcattatcaatagtaagggacgtctgcttggctattttatgcgttataaaacaaatacagatcgcgtagagcaattcttccaaactaagattttcccagatgactacgttcaaggggctaatatgatttacgaaacagaagcaaacttgcctgttgagcatgatatgagtattttccctattgagagtagagatgattttccagatggcttgacgactattgcaccgattcatgtatcggggattcgccttggttctttgattatttggcgtaatgataaaaaattcgaagatgaggacttggttcttgttgagattgccagtaccgttgttgggattcagcttcttaacttccaacgtgaagaagatgagaaaaatattcgtcgtcgtactgctgtcaccatggcggtcaataccctttcttactccgaactccgtgctgtttcagcaattttaggggaattaaatggaaatgaagggaagttgactgcgtcagtgattgcagatcgtatcggaatcactcgctctgtgattgtcaatgctcttcgtaaacttgagtctgcggggattattgaaagtcgctcacttggaatgaagggaacctatcttaaggtcttgatttcagatatttttgaagaagtgaagaaaagagattac

SEQ ID NO: 3244 - protein, 262 aa, Streptococcus pneumoniae
  transcriptional regulator, putative; Cellular location: membrane; Similar to strain R6 sequence 15903482 (e-145)
MAHLLEKTRKITSILKRSEEQLQDELPYNAITRQLADIIHCNACIINSKGRLLGYFMRYKTNTDRVEQFFQTKIFPDDYVQGANMIYETEANLPVEHDMSIFPIESRDDFPDGLTTIAPIHVSGIRLGSLIIWRNDKKFEDEDLVLVEIASTVVGIQLLNFQREEDEKNIRRRTAVTMAVNTLSYSELRAVSAILGELNGNEGKLTASVIADRIGITRSVIVNALRKLESAGIIESRSLGMKGTYLKVLISDIFEEVKKRDY

SEQ ID NO: 3245 - DNA, 135 bp, Streptococcus pneumoniae
ttgcctatttttgtgtatcataatattataaaagataatataataattttatttgtcttttcacattcggtctccttatataaaaaagcgattcattttgaaccgctttttcttatttatcgcctttgttacgaa

SEQ ID NO: 3246 - protein, 45 aa, Streptococcus pneumoniae
  hypothetical protein; Cellular location: cytoplasm
MPIFVYHNIIKDNIIILFVFSHSVSLYKKAIHFEPLFLIYRLCYE

SEQ ID NO: 3247 - DNA, 1572 bp, Streptococcus pneumoniae
gtgaaatttaatgaattaaacttgtctgctgatttgctagcagaaattgaaaaagctggttttgtagaagctagtcctatccaagaacaaactattcctttggcccttgaaggcaaggatgttatcggtcaagctcagactggtacaggaaaaactgcagcctttggcttgcctacccttgaaaaaatccgtacagaagaagcgactatccaagccttggtcatcgctccaactcgtgaactagctgtccaaagtcaagaagaactcttccgctttggtcgtagtaagggagtcaaagtccgttcagtatatggcggatcaagcattgaaaaacaaattaaggctcttaaatctggtgcccatattgtggtgggaactccaggtcgcctcttggacttgattaaacgcaaggccttgaaattacaagacattgaaacccttatccttgacgaagcggatgaaatgcttaacatgggcttccttgaagacatcgaagccattatttcccgtgtacctgagaaccgtcaaactttgcttttctcagcaactatgccagatgccatcaaacgtatcggtgttcagtttatgaaagcccctgaacatgtcaagattgcggctaaggaattgacaacagaattggttgaccagtactatatccgtgttaaggaacaagaaaaatttgacaccatgactcgtctcatggatgtggcacaaccagaactcgctattgtatttggtcgtaccaaacgccgtgtggatgaattgactcgtggtttgaaaattcgtggcttccgtgcagaaggaattcatggcgacctagaccaaaacaaacgtcttcgtgtccttcgtgactttaaaaatggcaatcttgatgttttggttgcgacagacgttgcagcgcgtggtttggatatttcaggtgtgacccatgtctacaactacgatattccacaagatcctgagagttatgttcaccgtatcggtcgtacaggtcgtgctggtaagtcaggtcaatctattacttttgttgctccaaacgaaatgggttaccttcaaatcattgaaaacttgactaagaaacgcatgaaaggtctcaaacctgcaagtgtagaagaatccttccaatcaaaaaaacaggtagctctcaagaaaatcgaacgtgattttgcagatgaaaccattcgtgccaactttgagaaatttggtaaggatgctcgcaaattggctgctgagtttactccagaagaattggcaatgtatatcttgagtctgacagtccaagacccagatagccttccagaagtggagattgcacgtgaaaaaccactaccgtttaaaccatcaggtaatggtttcggtggtaaagctaagggaggtcgtggaggccgtcgtggggacgaccgtcgagagcgtgatcgccgtggcaatggtcgccgtgatgagttcaaaaaaggaagtcgtggcaacgatcgttttgataaggaaaaacgttaccgtaaggataataaaaaaccacgcaatactttaagcgaaaagcaaacaggctttgttattcgtaacaaaggcgataaa

SEQ ID NO: 3248 - protein, 524 aa, Streptococcus pneumoniae
  ATP-dependent RNA helicase, putative; Cellular location: cytoplasm; Similar to strain R6 sequence 15903483 (0.E+01)
MKFNELNLSADLLAEIEKAGFVEASPIQEQTIPLALEGKDVIGQAQTGTGKTAAFGLPTLEKIRTEEATIQALVIAPTRELAVQSQEELFRFGRSKGVKVRSVYGGSSIEKQIKALKSGAHIVVGTPGRLLDLIKRKALKLQDIETLILDEADEMLNMGFLEDIEAIISRVPENRQTLLFSATMPDAIKRIGVQFMKAPEHVKIAAKELTTELVDQYYIRVKEQEKFDTMTRLMDVAQPELAIVFGRTKRRVDELTRGLKIRGFRAEGIHGDLDQNKRLRVLRDFKNGNLDVLVATDVAARGLDISGVTHVYNYDIPQDPESYVHRIGRTGRAGKSGQSITFVAPNEMGYLQIIENLTKKRMKGLKPASVEESFQSKKQVALKKIERDFADETIRANFEKFGKDARKLAAEFTPEELAMYILSLTVQDPDSLPEVEIAREKPLPFKPSGNGFGGKAKGGRGGRRGDDRRERDRRGNGRRDEFKKGSRGNDRFDKEKRYRKDNKKPRNTLSEKQTGFVIRNKGDK

SEQ ID NO: 3249 - DNA, 930 bp, Streptococcus pneumoniae
ttgttgtatctcgcttatggcattttaggtgggcttggtttgggagcaggctatattacccctgtgtcgacgattataaaatggtttcctgataaacgtggtctcgcaacaggtttagcgattatggggtttggttttgcttctttattgactagtcccatagcgcaacacctcatcgcaggggtagggcttgtagaaactttttatattttaggagcaagttactttattatcatgctcctagcttcacaattcattaagcgtccaaatgagcaagagcttgcaattttatcttcttcagggaaagaaaaaacagcctctttgacgcaaggaatggctgcaaatcaggctctaaaaagcaatcggttttatatgctttggattattttctttatcaacatagcttgtggtttaggcttaatttcagcggcatcgccaatggcacaggagatggctggcttgtctacaagtcatgcagcagtaatggtgggtgttttggggattttcaatggatttggtcgcttgctctgggcgagtttgtctgactatatcggtcgccctctaacctttagtatattactgcttgtcaatcttttcttttctctctcactttggctctttacagattccgttttatttgtagttgctatgtctattttgatgacttgctatggagctggtttttctttgattccagcttatctcagtgatatttttggaaccaaggaattggccgctctgcatggttatattttaacagcttgggcaatggctggtttagcgggacctattttattagcagagacttataaaatggctcattcgtacacacaaaccttgttcgtttttctcattttatacagtatcgccttggctttgtcttattatctaggtcgttcaatcaaaaaagaaagtcaaaaagcgcttaca

SEQ ID NO: 3250 - protein, 310 aa, Streptococcus pneumoniae
  oxalate:formate antiporter
MLYLAYGILGGLGLGAGYITPVSTIIKWFPDKRGLATGLAIMGFGFASLLTSPIAQHLIAGVGLVETFYILGASYFIIMLLASQFIKRPNEQELAILSSSGKEKTASLTQGMAANQALKSNRFYMLWIIFFINIACGLGLISAASPMAQEMAGLSTSHAAVMVGVLGIFNGFGRLLWASLSDYIGRPLTFSILLLVNLFFSLSLWLFTDSVLFVVAMSILMTCYGAGFSLIPAYLSDIFGTKELAALHGYILTAWAMAGLAGPILLAETYKMAHSYTQTLFVFLILYSIALALSYYLGRSIKKESQKALT

SEQ ID NO: 3251 - DNA, 318 bp, Streptococcus pneumoniae
atgaaatcgaatcgttatattattgcctttgctggggtcattttacacttaatgctgggttcgacttatgcttggagtgtttatcgtaaccctattattgaaaaaacgggatgggatcaggcttctgttgccttcgcctttagtctagcaatcttttgtttgggcttatcggctgcatttatggggcgtttggtagaaaaatttggtccgaaagtcatgggaagtctatctgcttttctatacgcaggtggaaatatcttaacaggatttgcaatagaccgtcagagctgtggttgttgtatctcgcttatggcattt

SEQ ID NO: 3252 - protein, 106 aa, Streptococcus pneumoniae
  oxalate:formate antiporter FRAMESHIFT; Cellular location: membrane; Similar to strain R6 sequence 15903484 (0.E+01)
MKSNRYIIAFAGVILHLMLGSTYAWSVYRNPIIEKTGWDQASVAFAFSLAIFCLGLSAAFMGRLVEKFGPKVMGSLSAFLYAGGNILTGFAIDRQSCGCCISLMAF

SEQ ID NO: 3253 - DNA, 1314 bp, Streptococcus pneumoniae
atgttaacatacgatttaattgttattggatttggtaaagctggtaaaacactagcaggtaaattggcttcagctggcaaaaaagttgccctcgttgaacgcagcaaggctatgtacggtggaacttgtatcaacattggttgtatcccaactaaaaccttgctagttgctgctgaaaaggacttgtcttttgaagaagtcattgctactaaaaacacgatcactggtcgcctcaacggtaaaaactatgcgactgttgctggtacaggcgtagatatctttgatgcggaagctcacttcctttcaaataaagtcatcgaaatccaagctggtgatgaaaagaaagaactgactgctgaaacaatcgtcatcaacactggtgctgtttcaaacgtcttgccaatccctggacttgctacaagcaaaaacatctttgactcaacaggtatccaaagcttggacaaattacctgaaaaacttggaatccttggtggcggaaatatcggtcttgaatttgccggcctttacaacaaacttggaagcaaggtcacagtcctagatgccttggatacattcctacctcgtgcagaaccttccatcgcagctcttgctaaacaatacatggaagaagatggcattgaattgcttcaaaatatccatactactgaaatcaaaaacgatggtgaccaagtgcttgtcgtaactgaagacgaaacttaccgtttcgacgcccttctctacgcaactggacgcaaaccaaatgtagaaccacttcaacttgaaaatacagatattgaactaactgaacgtggtgctattaaagtagacaaacactgtcaaacaaacgttcctggtgtctttgcagttggagatgtcaacggtggccttcaatttacttacatttcacttgatgacttccgtgttgtttacagctaccttgctggagatggcagctatacacttgaagaccgtctcaatgtgccaaatactatgttcatcacacctgcactttcacaagttggtttgactgaaagccaagcagctgatttgaaacttccatacgctgttaaggaaatccccgttgcagcaatgcctcgtggtcacgtaaatggagaccttcgcggtgccttcaaagctgttgtcaatactgaaacaaaagaaattcttggagcaagcatcttctcagaaggttctcaagaaatcatcaacatcatcactgttgctatggacaacaagattccttacacttacttcacaaaacaaatcttcactcacccaaccttggctgagaacttgaatgacttgtttgcgatt

SEQ ID NO: 3254 - protein, 438 aa, Streptococcus pneumoniae
  oxidoreductase, pyridine nucleotide-disulfide, class I; Cellular location: cytoplasm; Similar to strain R6 sequence 15903485 (0.E+01)
MLTYDLIVIGFGKAGKTLAGKLASAGKKVALVERSKAMYGGTCINIGCIPTKTLLVAAEKDLSFEEVIATKNTITGRLNGKNYATVAGTGVDIFDAEAHFLSNKVIEIQAGDEKKELTAETIVINTGAVSNVLPIPGLATSKNIFDSTGIQSLDKLPEKLGILGGGNIGLEFAGLYNKLGSKVTVLDALDTFLPRAEPSIAALAKQYMEEDGIELLQNIHTTEIKNDGDQVLVVTEDETYRFDALLYATGRKPNVEPLQLENTDIELTERGAIKVDKHCQTNVPGVFAVGDVNGGLQFTYISLDDFRVVYSYLAGDGSYTLEDRLNVPNTMFITPALSQVGLTESQAADLKLPYAVKEIPVAAMPRGHVNGDLRGAFKAVVNTETKEILGASIFSEGSQEIINIITVAMDNKIPYTYFTKQIFTHPTLAENLNDLFAI

SEQ ID NO: 3255 - DNA, 1341 bp, Streptococcus pneumoniae
atgaacttaaaaactactttgggccttcttgctgggcgttcttcccacttcgttttaagccgtcttggacgtggaagtacgctcccagggaaagtcgcccttcaatttgataaagatattttacaaaacctagctaagaactacgagattgtcgttgtcactggaacaaatggaaaaaccctgacaactgccctcactgtcggcattttaaaagaggtttatggtcaagttctaaccaacccaagcggtgccaacatgattacagggattgcaacaaccttcctaacagccaaatcttctaaaactgggaaaaatattgccgtcctcgaaattgacgaagccagtctatctcgtatctgtgactatatccagcctagtctttttgtcattactaatatcttccgtgaccagatggaccgtttcggtgaaatctatactacctataacatgatattggatgccattcggaaagttccaactgctactgttctccttaacggagacagtccacttttctacaagccaactattccaaaccctatagagtattttggttttgacttggaaaagggaccagcccaactggctcactacaataccgaagggattctctgtcctgactgccaaggcatcctcaaatatgagcataatacctatgcaaacttgggtgcctatatctgtgaaggttgtggatgtaaacgtcctgatctcgactatcgtttgacaaaactggttgagttgaccaacaatcgctctcgctttgtcatagacggccaagaatacggtatccaaatcggcgggctctataatatctataacgccctagctgctgtggccatcgcccgtttcctaggtgccgattcgcaactcatcaaacagggatttgacaagagccgtgctgtctttggacgccaagaaacctttcatatcggtgacaaggaatgtacccttgtcttgattaaaaatccagtcggtgcaacccaagctatcgaaatgatcaaactagcaccttatccatttagcctatctgtcctccttaatgccaactatgcagatggaattgacactagctggatctgggatgcagactttgaacaaatcactgacatggacattcctgaaatcaacgctggcggtgttcgtcattctgaaatcgctcgtcgcctccgagtgactggctatccagctgagaaaatcactgaaacgagtaatctggagcaagttctcaagaccattgagaatcaagactgcaagcatgcctatattctggcaacttatactgccatgctggaatttcgtgaactgctggctagtcgtcagattgttagaaaggagatgaac

SEQ ID NO: 3256 - protein, 447 aa, Streptococcus pneumoniae
  Mur ligase family protein; Cellular location: cytoplasm; Similar to strain R6 sequence 15903486 (0.E+01)
MNLKTTLGLLAGRSSHFVLSRLGRGSTLPGKVALQFDKDILQNLAKNYEIVVVTGTNGKTLTTALTVGILKEVYGQVLTNPSGANMITGIATTFLTAKSSKTGKNIAVLEIDEASLSRICDYIQPSLFVITNIFRDQMDRFGEIYTTYNMILDAIRKVPTATVLLNGDSPLFYKPTIPNPIEYFGFDLEKGPAQLAHYNTEGILCPDCQGILKYEHNTYANLGAYICEGCGCKRPDLDYRLTKLVELTNNRSRFVIDGQEYGIQIGGLYNIYNALAAVAIARFLGADSQLIKQGFDKSRAVFGRQETFHIGDKECTLVLIKNPVGATQAIEMIKLAPYPFSLSVLLNANYADGIDTSWIWDADFEQITDMDIPEINAGGVRHSEIARRLRVTGYPAEKITETSNLEQVLKTIENQDCKHAYILATYTAMLEFRELLASRQIVRKEMN

SEQ ID NO: 3257 - DNA, 780 bp, Streptococcus pneumoniae
atggtttatacttcactttcctcaaaagatggcaattacccctatcagctcaacattgcccacctctacggaaatctcatgaatacctacggggacaatggaaacatcctcatgctcaagtatgtggctgaaaaactgggagcccatgtgaccgttgacatcgtttctctccatgatgactttgatgaaaatcactacgacatcgcctttttcggtggtggtcaagactttgaacaaagtatcattgcagacgacctacctgctaaaaaagagagcattgacaactacatccaaaacgacggtgtagttctggctatctgcggtggtttccaactattgggtcaatattatgttgaagcttcaggaaaacgtatcgaagggctaggggtcatgggacactacacgctcaaccagaccaataaccgttttatcggtgacatcaagattcacaatgaagatttcgatgaaacctactatggatttgaaaatcaccaaggtcgtaccttcctctctgatgaccaaaaaccgctgggacaggttgtctatggaaatggaaacaacgaagaaaaggtcggtgaaggggttcattataagaatgtctttggttcctacttccacgggcctatcctctctcgtaatgccaatctggcttatcgcctagttactactgccctcaagaagaaatatggtcaggacatccaactccctgcctatgaggacattctcagccaagaaatcgctgaagagtacagtgacgtcaaaagcaaggctgacttttct

SEQ ID NO: 3258 - protein, 260 aa, Streptococcus pneumoniae
  conserved hypothetical protein; Cellular location: cytoplasm; Similar to strain R6 sequence 15903487 (e-154)
MVYTSLSSKDGNYPYQLNIAHLYGNLMNTYGDNGNILMLKYVAEKLGAHVTVDIVSLHDDFDENHYDIAFFGGGQDFEQSIIADDLPAKKESIDNYIQNDGVVLAICGGFQLLGQYYVEASGKRIEGLGVMGHYTLNQTNNRFIGDIKIHNEDFDETYYGFENHQGRTFLSDDQKPLGQVVYGNGNNEEKVGEGVHYKNVFGSYFHGPILSRNANLAYRLVTTALKKKYGQDIQLPAYEDILSQEIAEEYSDVKSKADFS

SEQ ID NO: 3259 - DNA, 1080 bp, Streptococcus pneumoniae
atgtctaaattacaacaaatcctaacatatcttgaatcagaaaaactagacgtcgctgtcgtatctgaccccgtcacaatcaattacctcactggtttttacagtgatccccatgaacgccaaatgttcctctttgtcctagcagatcaggaacctctcctctttgtcccagctcttgaagtagaacgtgcaagtagcaccgtttccttcccagtagtgggctatgtcgattctgaaaatccatggcaaaaaatcaaacatgctcttccacaacttgacttcaaacgtgtcgctgttgagtttgacaatctcatcttgaccaaataccatggtttgaaaacagtttttgagactgctgagtttgacaacctcactcctcgtatccaacgcatgcgcctcatcaaatcagctgatgaagtgcaaaaaatgatggttgcaggtctttatgctgacaaggctgttcatgttggttttgacaatatttctcttgataagactgagacagatatcatcgcacaaatcgactttgccatgaaacgtgaaggttatgaaatgagctttgataccatggtcttgactggtgataatgctgcgaatccacacggcattccagcagctaataaggttgaaaatgatgctcttctcctctttgacctgggtgttctggtcaatggctatgcgtcagatatgactcgtacagtcgctgtcggcaaaccagaccaattcaagaaagatatttacaacttgactcttgaagcccaacaagctgctcttgactttatcaagccaggtgtgactgctcatgaagtggaccgcgctgcccgtgaggtcatcgaaaaagctggttatggtgagtacttcaaccaccgtctcgggcatggtatcggtatggatgtccatgaattcccatctatcatggaaggaaacgacatggtcatcgaagaaggcatgtgcttctctgttgaaccaggtatctatatccctggtaaagtcggtgttcgtattgaagactgcggtgttgttaccaaggatggcttcaacctctttacaagcaccagcaaagatttgctttattttgat

SEQ ID NO: 3260 - protein, 360 aa, Streptococcus pneumoniae
  proline dipeptidase (pepQ); Cellular location: cytoplasm; Similar to strain R6 sequence 15903488 (0.E+01)
MSKLQQILTYLESEKLDVAVVSDPVTINYLTGFYSDPHERQMFLFVLADQEPLLFVPALEVERASSTVSFPVVGYVDSENPWQKIKHALPQLDFKRVAVEFDNLILTKYHGLKTVFETAEFDNLTPRIQRMRLIKSADEVQKMMVAGLYADKAVHVGFDNISLDKTETDIIAQIDFAMKREGYEMSFDTMVLTGDNAANPHGIPAANKVENDALLLFDLGVLVNGYASDMTRTVAVGKPDQFKKDIYNLTLEAQQAALDFIKPGVTAHEVDRAAREVIEKAGYGEYFNHRLGHGIGMDVHEFPSIMEGNDMVIEEGMCFSVEPGIYIPGKVGVRIEDCGVVTKDGFNLFTSTSKDLLYFD

SEQ ID NO: 3261 - DNA, 201 bp, Streptococcus pneumoniae
ttgattaaactatatagcccctatgctttcctttcaaaatatctaggggctattttattgtcatttttctgctattatgctaaagaaattggctgcaataatctaaccctaagtgtctggaatgataacgagggtgctctccgcttttatcaaagacaagggatgaaaccccaagaaacaacaatggaaatgataattgat

SEQ ID NO: 3262 - protein, 67 aa, Streptococcus pneumoniae
  conserved domain protein; Cellular location: cytoplasm
MIKLYSPYAFLSKYLGAILLSFFCYYAKEIGCNNLTLSVWNDNEGALRFYQRQGMKPQETTMEMIID

SEQ ID NO: 3263 - DNA, 339 bp, Streptococcus pneumoniae
atgttggaacaggcattcaaagagaagcactacgagaatacgattctccatagtgaccaaggctggcaataccaacacgattcttatcatcggttcctagagaataagggaattcaagcatctatgtcacgcaagggaaacagccaagacaacggtatgatggaatctttctttggcattttaaaatccgaaatgttttatggctatgagaaaacatttaaatcacttaaccaattggaacaagtcattatagactatattgattactacaacaacaaacgaattaaggtaaaactaaaaggacttagtcctgtgcagtacagaactaaatccttcgga

SEQ ID NO: 3264 - protein, 113 aa, Streptococcus pneumoniae
  DNA transposase
MLEQAFKEKHYENTILHSDQGWQYQHDSYHRFLENKGIQASMSRKGNSQDNGMMESFFGILKSEMFYGYEKTFKSLNQLEQVIIDYIDYYNNKRIKVKLKGLSPVQYRTKSFG

SEQ ID NO: 3265 - DNA, 235 bp, Streptococcus pneumoniae
aataaagtctgacatgaaggctggactaaagatagagtttctcttgaatacggtctcccaagtcgtacgatacttcttaactggctagcacaatacaggaaaaacgggtatactattgttgagaaaacaagagggagagtacctgagagcggagaatgccatcctaaaaaagttaagagaactccgattgaaggaggaaaaagagaaagaagaaagacagaaattgttcaagaat

SEQ ID NO: 3266 - protein, 40 aa, Streptococcus pneumoniae; identical to SEQ ID NO: 3024
  IS3-Spn1, hypothetical protein, interruption

SEQ ID NO: 3267 - DNA, 831 bp, Streptococcus pneumoniae
atgactgagttttcgttagatcttcttctagaagccattaaactagctcgttggacctactactatcacttgaaacagctagacaaaacagataaagaccaagagcttaaaactgaaattcaatccatctttatcgaacacaagggaaattatgcttatcgccgggttcatttagaactaagaaatcgtggttatctggtaaatcataaaagagttcaaggcttgatgaaagtactcaatttacaagctaaaatgcgaaagaaacgaaaatattcttctcataaaggagacgttggtaagaaggcagagaatctcattcaagcccaatttgaaggctctaaaacaatggaaaagtgctacacagatgtgactgaatttgccattccagcaagtactcaaaagctttacttatcaccagttttagatggctttaacagcgaaattattgcttttaatctttcttgttcgcctaatttagaataagtacaaacaatgttggaacaggcattcaaagagaagcactacgagaatacgattctccatagtgaccaaggctggcaataccaacacgattcttatcatcggttcctagagaataagggaattcaagcatctatgtcacgcaagggaaacagccaagacaacggtatgatggaatctttctttggcattttaaaatccgaaatgttttatggctatgagaaaacatttaaatcacttaaccaattggaacaagtcattatagactatattgattactacaacaacaaacgaattaaggtaaaactaaaaggacttagtcctgtgcagtacagaactaaatccttcgga

SEQ ID NO: 3268 - protein, 160 aa, Streptococcus pneumoniae
  IS3-Spn1, transposase POINT MUTATION
MTEFSLDLLLEAIKLARWTYYYHLKQLDKTDKDQELKTEIQSIFIEHKGNYAYRRVHLELRNRGYLVNHKRVQGLMKVLNLQAKMRKKRKYSSHKGDVGKKAENLIQAQFEGSKTMEKCYTDVTEFAIPASTQKLYLSPVLDGFNSEIIAFNLSCSPNLE

SEQ ID NO: 3269 - DNA, 1344 bp, Streptococcus pneumoniae; identical to SEQ ID NO: 517

SEQ ID NO: 3270 - protein, 448 aa, Streptococcus pneumoniae; identical to SEQ ID NO: 486
  IS1380-Spn1, transposase; Cellular location: cytoplasm; Similar to strain R6 sequence 15903941 (2.E-46)

SEQ ID NO: 3271 - DNA, 459 bp, Streptococcus pneumoniae
atgaagcaaacaaaaacaactaaaatcgcccttgtatccctattaaccgccctttctgtggttctaggttatttcttaaaaatcccaacacctacaggaattctaactcttttagatgctggtgtcttctttgcggccttttactttggtagtcgtgaaggagcggtagtcggaggactagcaagtttcttgattgacctcttatcaggctaccctcagtggatgttctttagcttggtcaaccatggcttgcagggatttttcgcaggatttaaaggaaaaagtcagtggttaggccttattttagcaactattgccatggtaggaggctacgccttgggttctgctttgatgaatggctgggcagcagccctcccagaaattctaccgaattttatgcaaaatatggtagggatgattgtaggatttattcttagtcaaagtatcaagaagattaag

SEQ ID NO: 3272 - protein, 153 aa, Streptococcus pneumoniae
  conserved hypothetical protein; Cellular location: membrane; Similar to strain R6 sequence 15904024 (e-149)
MKQTKTTKIALVSLLTALSVVLGYFLKIPTPTGILTLLDAGVFFAAFYFGSREGAVVGGLASFLIDLLSGYPQWMFFSLVNHGLQGFFAGFKGKSQWLGLILATIAMVGGYALGSALMNGWAAALPEILPNFMQNMVGMIVGFILSQSIKKIK

SEQ ID NO: 3273 - DNA, 771 bp, Streptococcus pneumoniae
atgaagaataatcgtattttagcactttctggaaatgatatttttagtggtggtggactgtcagctgatttggctacctataccttgaacggcttgcatgggtttgtagcagtgacttgtttgacagccttgacagaaaaaggatttgaagtctttccaactgatgataccatttttcaacatgaattagatagcttgcgtgatgtggaatttgggggaattaagattggtcttctccctactgtcagcgtggctgagaaggccttggactttatcaaacaacgcccaggagtacctgtggtgttggatcctgtcttggtctgcaaggaaacgcatgatgtagctgtcagtgagctctgccaagagttgattcgctttttcccttatgtcagtgtgattacgcctaatctcccagaagcagaattattatccggtcaggaaattaaaaccttggaagacatgaaaactgcagcgcagaaattgcatgatttaggagcgccagcagtcattatcaagggaggcaatcgtcttagtcaggacaaggctgtggatgtcttttatgatggacagacctttactatcctagaaaatccagttatccaaggccaaaatgctggtgcaggttgtacctttgcctctagcattgccagtcacctggttaaaggtgataaacttttgccagcagtagaaagctctaaggctttcgtttatcgtgctattgcacaagcagatcagtatggagtaagacaatatgaagcaaacaaaaacaac

SEQ ID NO: 3274 - protein, 257 aa, Streptococcus pneumoniae
  phosphomethylpyrimidine kinase, putative; Cellular location: cytoplasm; Similar to strain R6 sequence 15903493 (e-145)
MKNNRILALSGNDIFSGGGLSADLATYTLNGLHGFVAVTCLTALTEKGFEVFPTDDTIFQHELDSLRDVEFGGIKIGLLPTVSVAEKALDFIKQRPGVPVVLDPVLVCKETHDVAVSELCQELIRFFPYVSVITPNLPEAELLSGQEIKTLEDMKTAAQKLHDLGAPAVIIKGGNRLSQDKAVDVFYDGQTFTILENPVIQGQNAGAGCTFASSIASHLVKGDKLLPAVESSKAFVYRAIAQADQYGVRQYEANKNN

SEQ ID NO: 3275 - DNA, 747 bp, Streptococcus pneumoniae
atgacgagatataaagcaactatttcctatgatggttatgcctttgctggctttcagcgccagcctcatgcgcgtagcgttcaggaagaaattgaaaaaaccttgaccagattaaataaagggcaagccattactgttcacggtgctggtaggacagatagtggggttcatgccctgggacaggtgattcattttgacctgccttatcagatggatgaggagaaactccgttttgccttggatacccagtctcctgaagatattgatgtgatttcgattgagcttgtggcagatgattttcattgccgttatgccaagcatagcaagacctatgagtttactgtggatagaggacgtcccaaaaatccgatgcgccgtcactatgccacccactttccctacccactcgatgtggaacgaatgcagattgcaatcaaaaagctagagggaacccatgattttaccggttttacagcctctgggactagtgtagaggataaggttcgcaccatcacagaagctagtttaatagtcgatgagacaggacaatttttgacctttaccttttcaggaaatggtttcttgtataaacagattcgcaatatggtggggactcttctcaaaatcggtaacaaccgcatgccagtagagcagattgatctcatcttggagaagaaggacaggcaacttgcaggtcccactgcagcaccaaatggtttgtatttaaaggagattcgttatgaagaa

SEQ ID NO: 3276 - protein, 249 aa, Streptococcus pneumoniae
  tRNA pseudouridine synthase A (truA); Cellular location: cytoplasm; Similar to strain R6 sequence 15903494 (e-142)
MTRYKATISYDGYAFAGFQRQPHARSVQEEIEKTLTRLNKGQAITVHGAGRTDSGVHALGQVIHFDLPYQMDEEKLRFALDTQSPEDIDVISIELVADDFHCRYAKHSKTYEFTVDRGRPKNPMRRHYATHFPYPLDVERMQIAIKKLEGTHDFTGFTASGTSVEDKVRTITEASLIVDETGQFLTFTFSGNGFLYKQIRNMVGTLLKIGNNRMPVEQIDLILEKKDRQLAGPTAAPNGLYLKEIRYEE

SEQ ID NO: 3277 - DNA, 108 bp, Streptococcus pneumoniae
ttgtatgggtataaaaatctcatactcttcgaaaatctcttcaaaccacgtcagtttccatctgcaacctcaacacactattttgagcaacctgcggctagctttcta

SEQ ID NO: 3278 - protein, 36 aa, Streptococcus pneumoniae
  box element
MYGYKNLILFENLFKPRQFPSATSTHYFEQPAASFL

SEQ ID NO: 3279 - DNA, 1149 bp, Streptococcus pneumoniae
atgaaacaatttttagaacgggccagcattttggctctctccctcgttttgattacctccttttccatttcgagtgccctaccagccatgtttgactattatcagggttattctaaggaacaaattgagctcttggtgagcttgccttcctttggaatcatgatgatgttactgctaaatggtttcttagaaaaaatatttcctgagcgcttacagattagtttgggcttgctgattttatcattgagcggtacagctcccttctggtaccaagcctatccctttgtctttggaacacggcttctctttggtttgggtcttgggatgatcaatgccaaggccatttctattatcagtgaacgctaccaaggaaaaaggcgaattcagatgttagggctacgcgcttctgcagaggtcgttggagcttctctcattaccttggccgtcggtcagttgttggcctttggttggacagctatctttctagcctatagtgctggatttttggtgctgcccctttatctgctctttgtcccttatggaaaatcaaagaaagaagtcaagaaaagagcgaaggaagcaagtcgtttaactcgagaaatgaaaggcttgatttttaccttagctatcgaagcggcagttgtagtttgtaccaatacagctattaccatccgtattccaagtttgatggtggaaagaggattgggggatgcccagttatctagttttgttcttagtatcatgcagttgatcgggattgtggctggggtgagtttttctttcttgatttctatctttaaagagaaactgctcctctggtctggtattacctttggcttggggcaaatcgtgattgccttgtcttcatccttgtgggtggtagtagcaggaagtgttctggctggatttgcctatagtgtagtcttgacgacggtctttcaacttgtctctgaacgaattccagctaaactcctcaatcaagcaacttcatttgctgtattaggctgtagtttcggagcctttacgaccccattcgttctaggtgcaattggcttactaactcacaatgggatgttggtctttagtatcttaggaggttggttgattgtaatctctatctttgtcatgtacctacttcagaagagagct

SEQ ID NO: 3280 - protein, 383 aa, Streptococcus pneumoniae
  hypothetical protein (Major facilitator); Cellular location: membrane; Similar to strain R6 sequence 15903496 (0.E+01)
MKQFLERASILALSLVLITSFSISSALPAMFDYYQGYSKEQIELLVSLPSFGIMMMLLLNGFLEKIFPERLQISLGLLILSLSGTAPFWYQAYPFVFGTRLLFGLGLGMINAKAISIISERYQGKRRIQMLGLRASAEVVGASLITLAVGQLLAFGWTAIFLAYSAGFLVLPLYLLFVPYGKSKKEVKKRAKEASRLTREMKGLIFTLAIEAAVVVCTNTAITIRIPSLMVERGLGDAQLSSFVLSIMQLIGIVAGVSFSFLISIFKEKLLLWSGITFGLGQIVIALSSSLWVVVAGSVLAGFAYSVVLTTVFQLVSERIPAKLLNQATSFAVLGCSFGAFTTPFVLGAIGLLTHNGMLVFSILGGWLIVISIFVMYLLQKRA

SEQ ID NO: 3281 - DNA, 627 bp, Streptococcus pneumoniae
atgtcaaaacactataaacttgtattttatagccgtatcttcttgtttctagcggcttttacgggagtttatcttgaaattactaagcatggtggttttgggatgcttctctattacacggttctgtccaacctcttggtaactatttttaccctttatcttctaaaggttatgagccgtgtaggtgaaaattggcaaaggccaagtctcttgcgcttaaaaggtggggtcaccatgagtatcatgattacctgtgtgatttaccatttcctcttggcgcccattgcgactaatttctataccctagaaaatttcctttgccactatatcgttcccatctggtttttagcggataccctcttttttgacaaacagggtcaatacaagatttgggatccagcagtgtggaccattttaccctttctgtatatgatgtttgctctttttaatggcttggttctaaaactcaatattccaaatgccaaggataatcctttcccttacttctttttgaatgtgaacaagggttggaatgttgtgtttaagtggtgtctgattatctttgttgcctatatggtagcaggatttattttctactttatcaagcaaatcaagagaaagtcatcc

SEQ ID NO: 3282 - protein, 209 aa, Streptococcus pneumoniae
  conserved hypothetical protein; Cellular location: membrane; Similar to strain R6 sequence 15903497 (e-123)
MSKHYKLVFYSRIFLFLAAFTGVYLEITKHGGFGMLLYYTVLSNLLVTIFTLYLLKVMSRVGENWQRPSLLRLKGGVTMSIMITCVIYHFLLAPIATNFYTLENFLCHYIVPIWFLADTLFFDKQGQYKIWDPAVWTILPFLYMMFALFNGLVLKLNIPNAKDNPFPYFFLNVNKGWNVVFKWCLIIFVAYMVAGFIFYFIKQIKRKSS

SEQ ID NO: 3283 - DNA, 336 bp, Streptococcus pneumoniae
atgaacaatttaccaaattgtccaaaatgtaactcagagtatgtctacgaagacggtgccctactggtttgcccagagtgtgctcatgagtggaatcctgctgaagttgcagaagtagaagaaggtcttgtcgctatcgatgccaacggaaataaattggctgatggtgatacagtaactctcatcaaggacttgaaagtaaaaggtgcgccaaaagatttgaaacaagggacgcgcgtgaaaaatatccgcatcgtagaaggcgaccacaatatcgactgtaagattgatggttttggtgccatgaaacttaaatcagagtttgtgaggaagatt

SEQ ID NO: 3284 - protein, 112 aa, Streptococcus pneumoniae
  phnA protein (phnA); Cellular location: cytoplasm; Similar to strain R6 sequence 15903498 (2.E-63)
MNNLPNCPKCNSEYVYEDGALLVCPECAHEWNPAEVAEVEEGLVAIDANGNKLADGDTVTLIKDLKVKGAPKDLKQGTRVKNIRIVEGDHNIDCKIDGFGAMKLKSEFVRKI

SEQ ID NO: 3285 - DNA, 669 bp, Streptococcus pneumoniae
atgaaaacaattcaaattgctattgatggtcctgcttccagcggtaagagtacggtcgcaaagattattgctaaggattttggattcacctaccttgatacaggagctatgtatcgtgcagcgacctatatggctcttaagaaccaattaggagttgaagaagtcgaagcccttctagccttgttggaccagcatccaatcagctttggacgttcagaaactggagaccagcttgtttttgtaggagatgtggatattacccatcctatccgtgaaaatgaagtgaccaatcatgtttctgctattgcagcaattcctcaagtgcgtgagaaactggtttctctccaacaagaaattgcccagcaaggcgggattgtcatggatggtcgcgatattggaactgttgtattgccacaagcagaattgaaaattttcctagtagcttctgttgatgagagagcagagcgtcgttacaaggaaaatattgccaagggaattgaaacagaccttgaaaccctaaaaaaggaaattgctgcgcgtgactacaaggatagtcatcgtgagacttctcctctcaaacaagcagaggatgctgtctaccttgatacaactggtttgaacattcaagaagtagttgaaaaaatcaaagcagaagctgaaaaaagaatg

SEQ ID NO: 3286 - protein, 223 aa, Streptococcus pneumoniae
  cytidylate kinase (cmk); Cellular location: cytoplasm; Similar to strain R6 sequence 15903499 (e-121)
MKTIQIAIDGPASSGKSTVAKIIAKDFGFTYLDTGAMYRAATYMALKNQLGVEEVEALLALLDQHPISFGRSETGDQLVFVGDVDITHPIRENEVTNHVSAIAAIPQVREKLVSLQQEIAQQGGIVMDGRDIGTVVLPQAELKIFLVASVDERAERRYKENIAKGIETDLETLKKEIAARDYKDSHRETSPLKQAEDAVYLDTTGLNIQEVVEKIKAEAEKRM

SEQ ID NO: 3287 - DNA, 474 bp, Streptococcus pneumoniae
atggcaaaagaaccgtggcaagaagatatctatgatcaagaagaatcaagagcagagcgtcggcatcgaaaccacggaggggctgataggatggctaatcgtattttgacgatcctagctagtattttctttgtaattgtggtggtgatggtcatcgttctcatctatctatcatcgggggggagtaatcgcacagcagccttaaaaggctttcatgattctgatgccagtgtagtacaaatctcatcttcaagtagttctcagcctgagcagagttcagagccagaatctacttctagtagttcagaagaagctgctaatcctgaaggaacgattaaagttctcgcaggagaaggggaagcagctattgccgctcgtgcaggaatctccattgctcagttagaggccttgaatcctgggcacatggctacaggatcttggtttgctaatccaggtgatgttataaaaataaaa

SEQ ID NO: 3288 - protein, 158 aa, Streptococcus pneumoniae
  hypothetical protein; Cellular location: membrane; Similar to strain R6 sequence 15903500 (1.E-83)
MAKEPWQEDIYDQEESRAERRHRNHGGADRMANRILTILASIFFVIVVVMVIVLIYLSSGGSNRTAALKGFHDSDASVVQISSSSSSQPEQSSEPESTSSSSEEAANPEGTIKVLAGEGEAAIAARAGISIAQLEALNPGHMATGSWFANPGDVIKIK

SEQ ID NO: 3289 - DNA, 204 bp, Streptococcus pneumoniae
atgaaaatcacacttatacctgaacgatgtatcgcctgtgggctttgccaaacttattctgatttatttgattaccacgataatggaatcgtgcgtttttacgatgaccctgaccaactggaaaaagaaatttctcctagtcaggatatcttagaggctgttaaaaattgcccaactcgcgccctgattggaaaccaggaagcc

SEQ ID NO: 3290 - protein, 68 aa, Streptococcus pneumoniae
  ferredoxin (fer); Cellular location: cytoplasm; Similar to strain R6 sequence 15903501 (4.E-37)
MKITLIPERCIACGLCQTYSDLFDYHDNGIVRFYDDPDQLEKEISPSQDILEAVKNCPTRALIGNQEA

SEQ ID NO: 3291 - DNA, 1017 bp, Streptococcus pneumoniae
gtgaagacgcatggcgttggcaaagcaagcatccaaatggatttgaagactaagatgatgatttcaatcatcgtcccttgtttaaacgaagaggaagtacttcctcttttttatcaggctctggaagctttacttccagatttggaaacagaaatcgagtatgtctttgtcgatgatggatcaagtgatgggaccttggaactcttaaaggcctatcgggagcaaaatccggcagtccattatatttctttctctcgaaattttggcaaagaagcagccctttatgcaggcttgcaatatgcgacaggagatttggtggtggtgatggatgcagacctccaagatcctcctagtatgttgtttgagatgaaaaatgtattagacaaaaatgtagacttggactgcgttgggacacggagaactagtcgggagggagaacccttctttcgcagtttctgtgctgttctcttttatcgcctcatgcaaaaaatcagcccagtagctctgccgtcgggtgtccgtgattttcgtatgatgagaaggtctgtagtcgatgccattttaagcttgaccgagtccaatcgtttttcaaaggggctcttcgcctgggtgggtttcaaaacctactatttggactatccaaatgtcgaaaggcaggctggcaagacaagttggagttttaggcaactctttttctactccattgaagggattattaatttttcagattttcccttgattatagcctttgtagctggtctcctatcttgttttctttctctgctgatgaccttttttgttgtggttcggaccctcattttgggcaatccgacatctggttggacctctctgatggctgttattctctttcttggaggcattcaactcttgaccattgggattctcggcaagtatatcagtaagatttatttagagactaaaaaaagaccactttatcttatcaaagaaaaaagtgaccttcctgattttacagaaaaaaataaagtgaaaagacta

SEQ ID NO: 3292 - protein, 339 aa, Streptococcus pneumoniae
  glycosyl transferase, family 2; Cellular location: membrane; Similar to strain R6 sequence 15903502 (e-179)
MKTHGVGKASIQMDLKTKMMISIIVPCLNEEEVLPLFYQALEALLPDLETEIEYVFVDDGSSDGTLELLKAYREQNPAVHYISFSRNFGKEAALYAGLQYATGDLVVVMDADLQDPPSMLFEMKNVLDKNVDLDCVGTRRTSREGEPFFRSFCAVLFYRLMQKISPVALPSGVRDFRMMRRSVVDAILSLTESNRFSKGLFAWVGFKTYYLDYPNVERQAGKTSWSFRQLFFYSIEGIINFSDFPLIIAFVAGLLSCFLSLLMTFFVVVRTLILGNPTSGWTSLMAVILFLGGIQLLTIGILGKYISKIYLETKKRPLYLIKEKSDLPDFTEKNKVKRL

SEQ ID NO: 3293 - DNA, 1017 bp, Streptococcus pneumoniae
atgcaagaaaagattttggtaactggtggtgccggttttattggaacccacactgttattgaattgatccaagcaggtcatcaagttgttgtggtggataatcttgtcaatagcaatcgtaagagtttagaagttgttgaaggaatcacaggagttgagattcctttctatgaggcagatattcgtgacacagataccctcagagatattttcaagcaggaagaaccgactggtgtcattcactttgctggtttgaaggctgttggcgaatcaacacgtatccctcttgcctactatgacaacaatatcgctggaactgtcagccttttgaaagccatggaagaaaacaactgtaaaaacatcatcttcagttcttctgcgacagtttacggggatccgcacacagtgcccatcttggaagatttcccactttcagtgaccaacccatacggtcgtactaagctcatgctagaggaaattttgactgatatttacaaagcagactcagaatggaatgttgtcttgcttcgttactttaacccaatcggagcccatgagagtggtgatttgggagaaaatccaaacggtattccaaacaatctcttgccatatgtgactcaagtagccgttggaaaattagagcaagtgcaagtgtttggagacgattacgatacggaagatggaacaggtgttcgtgactatatccacgttgtcgatttggctaagggtcacgttgcagctttgaaaaaaatccaaaaaggttcaggactaaacgtttataaccttggaactggtaaaggttactcagttcttgaaattatccaaaacatggaaaaagcggtgggccgtcctattccttaccgcatcgtagaacgtcgcccaggtgatatcgctgcctgctactcagacccggcaaaagctaaagcagaactcggttgggaagcagaactcgacatcacccaaatgtgtgaagacgcatggcgttggcaaagcaagcatccaaatggatttgaagac

SEQ ID NO: 3294 - protein, 339 aa, Streptococcus pneumoniae
  UDP-glucose 4-epimerase (galE); Cellular location: cytoplasm; Similar to strain R6 sequence 15903503 (0.E+01)
MQEKILVTGGAGFIGTHTVIELIQAGHQVVVVDNLVNSNRKSLEVVEGITGVEIPFYEADIRDTDTLRDIFKQEEPTGVIHFAGLKAVGESTRIPLAYYDNNIAGTVSLLKAMEENNCKNIIFSSSATVYGDPHTVPILEDFPLSVTNPYGRTKLMLEEILTDIYKADSEWNVVLLRYFNPIGAHESGDLGENPNGIPNNLLPYVTQVAVGKLEQVQVFGDDYDTEDGTGVRDYIHVVDLAKGHVAALKKIQKGSGLNVYNLGTGKGYSVLEIIQNMEKAVGRPIPYRIVERRPGDIAACYSDPAKAKAELGWEAELDITQMCEDAWRWQSKHPNGFED

SEQ ID NO: 3295 - DNA, 147 bp, Streptococcus pneumoniae
ttgaattggattttcgaagagtataagcattttactgaaattttatcaggtagtttaggatggcaaatgacattccctgtcaaaaatggtaaaataagaaaaaataatctgagaatcgaggaaaaaagatgcaagaaaagattttgg

SEQ ID NO: 3296 - protein, 49 aa, Streptococcus pneumoniae
  box element
MNWIFEEYKHFTEILSGSLGWQMTFPVKNGKIRKNNLRIEEKRCKKRFW

SEQ ID NO: 3297 - DNA, 99 bp, Streptococcus pneumoniae
gtggatagaactgacgaagtcagctcaaaacactgttttgaggttgtggatagaactgacgaagtcagtaaccatacccatggcaaggcgacgttgacg

SEQ ID NO: 3298 - protein, 33 aa, Streptococcus pneumoniae
  box element
MDRTDEVSSKHCFEVVDRTDEVSNHTHGKATLT

SEQ ID NO: 3299 - DNA, 1110 bp, Streptococcus pneumoniae
gtgaagacaatgaaaaaagttgccattattggagcaggaattgtgggagcaacagctgcctactacctctcgagagaaagtgacctagaggtgaccgtttttgaccatgagcaaggtcaagccaccaaggccgcagcaggaattatcagtccttggttttccaaacgccgtaataaagcctggtacaagatggcgcgcttgggggctgatttttatgtggatttattagctgatttagagaaatcaggacaagaaatcgacttttaccagcgttcgggagtctttctcttgaaaaaggatgaatccaatttggaagaactttatcaactggccctccagcgcagagaagaatctcccttgatagggcaattagccattctgaaccaagcctcagctaatgaattattccctggtttgcagggatttgaccgcctgctctatgcttctggtggagcgagagtagatggccaacttttagtgactcgtttgctggaagtcagtcatgtcaagctggtcaaagaaaaagtgactctgacaccgttagcatcaggctaccagattggtgaagaggagtttgagcaggttattttggcgacgggagcttggttgggggacatgttagagcctttaggttatgaagtggatgtccgtcctcaaaaaggacaactacgagattatcagcttgcccaagacatggaagattaccctgttgtcatgccagaaggggagtgggatttgattccctttgcaggtgggaaattatccttaggcgctacccacgaaaatgacatgggatttgatttgacggtagatgaaaccttgctccaacaaatggaggaggccaccttgactcactatctgattttggctgaagctacttcaaaatctgagcgtgttggaatccgtgcctacaccagtgatttctctcctttctttgggcaggtgcctgacttaactggtgtctatgcagccagtggactaggttcatcaggcctcacaactggtcctatcattggttaccatctagcccaactgatccaagacaaggagttgaccttggaccctctaaattacccaattgaaaactatgtcaaacgagtaaaaagcgaa

SEQ ID NO: 3300 - protein, 370 aa, Streptococcus pneumoniae
  oxidoreductase, DadA family protein; Cellular location: outside; Similar to strain R6 sequence 15903504 (0.E+01)
MKTMKKVAIIGAGIVGATAAYYLSRESDLEVTVFDHEQGQATKAAAGIISPWFSKRRNKAWYKMARLGADFYVDLLADLEKSGQEIDFYQRSGVFLLKKDESNLEELYQLALQRREESPLIGQLAILNQASANELFPGLQGFDRLLYASGGARVDGQLLVTRLLEVSHVKLVKEKVTLTPLASGYQIGEEEFEQVILATGAWLGDMLEPLGYEVDVRPQKGQLRDYQLAQDMEDYPVVMPEGEWDLIPFAGGKLSLGATHENDMGFDLTVDETLLQQMEEATLTHYLILAEATSKSERVGIRAYTSDFSPFFGQVPDLTGVYAASGLGSSGLTTGPIIGYHLAQLIQDKELTLDPLNYPIENYVKRVKSE

SEQ ID NO: 3301 - DNA, 795 bp, Streptococcus pneumoniae
atgttagcaagtgaagtgatccaagcttatgaagccttttgccctcaggaattttctatggagggagacagccgtggtctgcaaattggcactttagacaagggtatccaaagggtcatggttgccctcgatattcgtgaagagacagtggcagaggccattgaaaagggtgtggacttgattatcgtcaagcacgcgcctatctttcgtcctatcaaggacttgcttgccagccgtccgcaaaatcagatttacatcgacctgattaagcatgatatcgcagtttatgtcagccataccaatattgatatcgttgaaaatgggctcaatgactggttttgtcagatgctaggaatcgaggagacgacttatctgcaggaaacaggtccagaacgtggaattggacgtattgggaatattcagcctcagacattttgggaattggcccaacaggtcaagcaagtctttgacctagatagccttcgaatggtgcattatcaagaggatgatttgcagaagcctatttcaagagtagcaatttgtggtggaagcgggcagtctttctataaggatgctttggcaaagggggcagatgtctatatcactggtgatatctactaccatactgctcaggatatgctatctgatgggttgcttgcattggacccaggtcactatatcgaagtgatttttgtagaaaaaatcgcagcacttcttagtcaatggaaggaagataaggggtggtctattgatatcttgcctagtcaggcatcaaccaatcctttccatcatatc

SEQ ID NO: 3302 - protein, 265 aa, Streptococcus pneumoniae
  conserved hypothetical protein; Cellular location: cytoplasm; Similar to strain R6 sequence 15903505 (e-149)
MLASEVIQAYEAFCPQEFSMEGDSRGLQIGTLDKGIQRVMVALDIREETVAEAIEKGVDLIIVKHAPIFRPIKDLLASRPQNQIYIDLIKHDIAVYVSHTNIDIVENGLNDWFCQMLGIEETTYLQETGPERGIGRIGNIQPQTFWELAQQVKQVFDLDSLRMVHYQEDDLQKPISRVAICGGSGQSFYKDALAKGADVYITGDIYYHTAQDMLSDGLLALDPGHYIEVIFVEKIAALLSQWKEDKGWSIDILPSQASTNPFHHI

SEQ ID NO: 3303 - DNA, 675 bp, Streptococcus pneumoniae
atgatttcaaagagattagaattggtagcttcctttgtgtcacagggggctattttactagatgtgggaagtgaccatgcttatctgcctatcgagttggttgagagaggccaaatcaaaagcgctattgcaggtgaggtggtggaaggtccctatcagtctgcggttaaaaatgttgaggctcacggcctaaaggagaaaatccaagtccgtttagccaatggcttggcagcttttgaagagactgaccaagtgtctgtcattaccattgctggcatgggtggtcgtttgattgctaggattttagaagaaggtttggggaagttagctaatgtagagcgtttgatcctccagcccaataatcgtgaagacgacttgcgtatctggctacaggatcatggattccagattgtagcagaaagcatcttagaagaagctggaaagttttatgagattttggtggtggaagcaggacaaatgaagctatcagccagtgatgttcgctttggtcccttcttgtccaaagaagtcagtccagtatttgtccaaaaatggcaaaaagaagctgagaagctagagttcgccctcggacaaatcccagaaaaaaatctggaagaacgtcaagttctagtagataagattcaagctatcaaggaggtgctccatgttagcaag

SEQ ID NO: 3304 - protein, 225 aa, Streptococcus pneumoniae
  Bcl-2 family protein; Similar to strain R6 sequence 15903506 (e-122)
MISKRLELVASFVSQGAILLDVGSDHAYLPIELVERGQIKSAIAGEVVEGPYQSAVKNVEAHGLKEKIQVRLANGLAAFEETDQVSVITIAGMGGRLIARILEEGLGKLANVERLILQPNNREDDLRIWLQDHGFQIVAESILEEAGKFYEILVVEAGQMKLSASDVRFGPFLSKEVSPVFVQKWQKEAEKLEFALGQIPEKNLEERQVLVDKIQAIKEVLHVSK

SEQ ID NO: 3305 - DNA, 102 bp, Streptococcus pneumoniae
atggaacaaacattgtttgaattagaactacttccagaggaagatatcattgtcacaggtctccctaagtattgttcttttacttgtttaattacaggtcgc

SEQ ID NO: 3306 - protein, 34 aa, Streptococcus pneumoniae
  hypothetical protein; Cellular location: cytoplasm
MEQTLFELELLPEEDIIVTGLPKYCSFTCLITGR

SEQ ID NO: 3307 - DNA, 990 bp, Streptococcus pneumoniae
atggatttattagagaaagaatgtttaaaatgtgataaaaatttccaacagggtgatatttggaattactattatttatcagataagatgcctgcacaagggtggaaaatacacataagctcccaaataaaagacgctgtaaatatttttaagattgtgtataaactatcccaactaaataattgtagctttaaagttgttaaaaatttagaggaattaaaaaaaattaattcccctagggaaatgagccctactgctaacaaatttataactctatatcctaagtcagaatctgaagctaagagtatgatttgtaatcttacgaatagactgtcagaatttaaggctccaaaaatactatctgactatcaatgtggaatgcattctccagttcattatagatatggggcttttttaaaaaaacaagcttatgatgaaaaaaataaaaaagtcatctatttattgctagatgaaaaaaggaagaactatgtagaagataagagacaaaatttccctagtcttcctagctggaaaatggatttattttcagaagaagaaaaaaggatttattttcaaaccacatgtgaagtttcaagtaaggactctgcaataaataaatacaaaatggaaaaaattattaagagatcaaataaaggaaatgtttatcgggcaattagaaaatcggacgggcaaaaagtaatcatcaagcagtcaagaccttttgtgaattatgatgctgaaggagaatggacagctcttgatgatataaaaaatgaagctcacatgctaaaaaaattagccgataaaagttatactactaatttaactgatgaattttatatcgtggatgattattttcttgttcaggaacaagttgacgggttaaactttgaagaatttattcgagaaacagaacactccttaaatattagagaaaaaacactggataacattgtgaatatagtaagttacatccataaactgggaata

SEQ ID NO: 3308 - protein, 330 aa, Streptococcus pneumoniae
  conserved domain protein; Cellular location: cytoplasm; Similar to strain R6 sequence 15903248 (1.E-22)
MDLLEKECLKCDKNFQQGDIWNYYYLSDKMPAQGWKIHISSQIKDAVNIFKIVYKLSQLNNCSFKVVKNLEELKKINSPREMSPTANKFITLYPKSESEAKSMICNLTNRLSEFKAPKILSDYQCGMHSPVHYRYGAFLKKQAYDEKNKKVIYLLLDEKRKNYVEDKRQNFPSLPSWKMDLFSEEEKRIYFQTTCEVSSKDSAINKYKMEKIIKRSNKGNVYRAIRKSDGQKVIIKQSRPFVNYDAEGEWTALDDIKNEAHMLKKLADKSYTTNLTDEFYIVDDYFLVQEQVDGLNFEEFIRETEHSLNIREKTLDNIVNIVSYIHKLGI

SEQ ID NO: 3309 - DNA, 339 bp, Streptococcus pneumoniae
atgttggaacaggcattcaaagagaagcactatgagaatacgattctccatagtgaccaaggctggcaataccaacacgattcttatcatcggttcctagagagtaagggaattcaagcatccatgtcacgcaagggcaacagcccagacaacggcatgatggaatctttctttggcattttgaaatcggagatgttttatggttatgagaagaactttagatctttagaaaaccttgaacaagctattgtggactacattgattattacaacaacaagagaattaaggtaaagctaaaaggacttagccctgtgcaatacagaactaaatccttcgga

SEQ ID NO: 3310 - protein, 113 aa, Streptococcus pneumoniae
  DNA transposase
MLEQAFKEKHYENTILHSDQGWQYQHDSYHRFLESKGIQASMSRKGNSPDNGMMESFFGILKSEMFYGYEKNFRSLENLEQAIVDYIDYYNNKRIKVKLKGLSPVQYRTKSFG

SEQ ID NO: 3311 - DNA, 831 bp, Streptococcus pneumoniae
atgactgagttttcgttagatcttcttctaaaagccattaaactagctcgttggacctactactatcacttgaaacagctagataaaccagataaggaccaagagcttaaagctgaaattcaatccatctttatcgaacacaagggaaattatgcttatcgccgggttcatttagaactaagaaatcgtgcttatctggtaaatcataaaagagttcaaggcttgatgaaagtactcaatttacaagctaaaatgcgacagaaacgaaaatattcttctcataaaggagacgttggtaagaaagcagagaatctcattcaaggccaatttgaaggctctaaaacaatggaaaagtgctacacagatgtgacagaatttgccattccagcaagtactcaaaaactttacttatcaccagttttagatggctttaacagcgaaattattgcttttaatctttcttgttcgcctaatttagaataagtacaaacaatgttggaacaggcattcaaagagaagcactatgagaatacgattctccatagtgaccaaggctggcaataccaacacgattcttatcatcggttcctagagagtaagggaattcaagcatccatgtcacgcaagggcaacagcccagacaacggcatgatggaatctttctttggcattttgaaatcggagatgttttatggttatgagaagaactttagatctttagaaaaccttgaacaagctattgtggactacattgattattacaacaacaagagaattaaggtaaagctaaaaggacttagccctgtgcaatacagaactaaatccttcgga

SEQ ID NO: 3312 - protein, 160 aa, Streptococcus pneumoniae
  IS3-Spn1, transposase POINT MUTATION
MTEFSLDLLLKAIKLARWTYYYHLKQLDKPDKDQELKAEIQSIFIEHKGNYAYRRVHLELRNRAYLVNHKRVQGLMKVLNLQAKMRQKRKYSSHKGDVGKKAENLIQGQFEGSKTMEKCYTDVTEFAIPASTQKLYLSPVLDGFNSEIIAFNLSCSPNLE

SEQ ID NO: 3313 - DNA, 436 bp, Streptococcus pneumoniae
atgaaattaacttatgatgataaagttcagttctatgaacttagaaaacaaggatatatcttagagaagctttcaaataaatttgggataaataattctaatcttaggtacatgattaaattgattgatcgttacggaatagagttcgtcaaaaaagggaaaaatcgttactattctcctgatttaaaacaagaaatgattcataaagtctgacatgaaggctggactaaagatagagtttctcttgaatacggtctcccaagtcgtacgatacttcttaactggctagcacaatacaggaaaaacgggtatactattgttgagaaaacaaaagggagagtacctgagagcggagaatgccatcctaaaaaagttaagagaactccgattgaaggaggaaaaagagaaataagaaagacagaaattgttcaagaat

SEQ ID NO: 3314 - protein, 70 aa, Streptococcus pneumoniae
  IS3-Spn1, hypothetical protein POINT MUTATION FRAMESHIFT
MKLTYDDKVQFYELRKQGYILEKLSNKFGINNSNLRYMIKLIDRYGIEFVKKGKNRYYSPDLKQEMIHKV

SEQ ID NO: 3315 - DNA, 1965 bp, Streptococcus pneumoniae
atgtcactacaatcagttaacgccattcgttttcttggcgtagatgctattaacaaatctaattctggtcacccgggaattgtcatgggtgctgcgccaatggcttatagcctatttacaaagcaccttagaattacacctgagcagccaaactggattaaccgagatcgctttatcttgtctgcgggtcatggatcaatgctactgtatgctctcttgcatttaacagggtataaggatgtatccatggacgagattaaaaatttccggcaatggggatctaagacacctggtcatcctgaagtgacgcatacgtctggtgtggatgcgacatctggtccgcttggtcaggggatttctactgccgttggtttcgcccaagcagagcgttttttagctgctaagtacaacaaagatggtttccctatttttgaccattatacttatgttatcgctggagacggtgacttcatggaaggagtgtctgcggaggcggcttcttatgcaggtcatcaagctttagataagcttatcgtcctctacgactccaacgacatctgcttggatggtgagaccaaagatactttctctgaaaatgttcgcgtccgttacgatgcttatggttggcatacagttctggtagaagatggaacagatttagcagcaatttctacagcaattgagacggccaagttttctggtaaaccgagtttgattgaagtgaaaacggtaattggttacggctcacccaataaaagtggtacaaatgctgttcatggtgcaccactaggagcagaagaaacaggagcaactcgtaagtttttgggatgggattacgatccatttgaagtaccagaggaagtatattctgatttcaagacaaatgtagcggatcgtggtcaggaggcatacgatgcttgggctagtttggtgtctgattacaaggttgcttatcccgaagttgctagtgagattgacgctattgtagctggaaaatcccctgtaaccattactgaaaaagacttccctgtctatgagaatggcttctctcaagcaactcgtaattcgtcccaagatgctattaatacagcagcagttttaccaaccttcttaggtggatcggcagacttagctcactctaacatgacctacatcaaggcagatggcttacaagataaatataatccattaaaccgcaatattcagtttggggtacgtgaatttgccatgggaacaatcctcaatggaatggctcttcatggtggtttacgagtttatggcggaaccttctttgttttctctgactacgtcaaagctgctattcggctatcagccattcaggagttgcctgtaacttatgtctttacccatgattcaattgccgttggtgaagatggtccaactcatgaaccagttgaacatttggcaggtttacgctcaatgccaaacttgactgttatccgtccagcggatgcccgtgaaactcaagcggcttggcatcatgccttgaccagtaccaccactccaactgtcattgtcttaacccgtcaaaacttggtagttgaagaagggacagactttggtaaggtcgctaaaggagcctacgtcgtgtatgataccccgggatttgatactattatcattgctacaggatctgaggtcaatctagctatcaaagctgctaaggaattggttttacaaggtggtaaagtacgtgtggtatctatgccctcaaccgaactatttgatgctcaagatgctacctacaaggaagacattttaccatctaagactcgtcgtcgtgtggccattgaaatggcagcgacccaaagttggtacaagtatgttggtttggatggcgcggtcatcggtattgacatcttcggtgcgtctgccccagctcagactgtgattgataattatggatttacggtagagaatatcgttgctcaagttaagtcccta

SEQ ID NO: 3316 - protein, 655 aa, Streptococcus pneumoniae
  transketolase, FRAMESHIFT (recP); Cellular location: cytoplasm; Similar to strain R6 sequence 15903883 (0.E+01)
MSLQSVNAIRFLGVDAINKSNSGHPGIVMGAAPMAYSLFTKHLRITPEQPNWINRDRFILSAGHGSMLLYALLHLTGYKDVSMDEIKNFRQWGSKTPGHPEVTHTSGVDATSGPLGQGISTAVGFAQAERFLAAKYNKDGFPIFDHYTYVIAGDGDFMEGVSAEAASYAGHQALDKLIVLYDSNDICLDGETKDTFSENVRVRYDAYGWHTVLVEDGTDLAAISTAIETAKFSGKPSLIEVKTVIGYGSPNKSGTNAVHGAPLGAEETGATRKFLGWDYDPFEVPEEVYSDFKTNVADRGQEAYDAWASLVSDYKVAYPEVASEIDAIVAGKSPVTITEKDFPVYENGFSQATRNSSQDAINTAAVLPTFLGGSADLAHSNMTYIKADGLQDKYNPLNRNIQFGVREFAMGTILNGMALHGGLRVYGGTFFVFSDYVKAAIRLSAIQELPVTYVFTHDSIAVGEDGPTHEPVEHLAGLRSMPNLTVIRPADARETQAAWHHALTSTTTPTVIVLTRQNLVVEEGTDFGKVAKGAYVVYDTPGFDTIIIATGSEVNLAIKAAKELVLQGGKVRVVSMPSTELFDAQDATYKEDILPSKTRRRVAIEMAATQSWYKYVGLDGAVIGIDIFGASAPAQTVIDNYGFTVENIVAQVKSL

SEQ ID NO: 3317 - DNA, 744 bp, Streptococcus pneumoniae
ttgaagaagagattgatttgtcagatattgaaattttgtaagagggtaacgatgtcaagaattgaattttcaccatctttgatgaccatggatttggacaaattcaaagagcagattacttttttgaatgataaagtagcatcttatcatatcgatattatggatggccattttgttcccaatattaccttgtctccttggttcattcaagaagttcaaaaaattagtgacacacctttatcagttcatctgatggtcacagacccaaccttttgggtagatcaagttctcgatttacaatgtgagtatatttgtattcatgctgaagttctgaatggtcttgcttttcgtttgattgataaaattcatgatgcaggtctaaaggctggtgttgtccttaatcctgaaacacctgtttctacaatctttccctacattgatttacttgacaaagcaactattatgactgtagatccaggttttgcaggacaacgctttttggagtctaccttgtataaaatccaagaactccgtcagcttagagttcagaatggttatcactacatcattgagatggatggttcttcgagtcgtaagactttcaaacaaattgatgtggcaggaccagatatttatgttataggtcgcagtggattatttggtttggatgacgatattgccaaagcctgggatatctgttctagagattacgaagaaatgaccggaaaaacaatgccaatcaaa

SEQ ID NO: 3318 - protein, 248 aa, Streptococcus pneumoniae
  ribulose-phosphate 3-epimerase family protein; Cellular location: cytoplasm; Similar to strain R6 sequence 15903839 (1.E-31)
MKKRLICQILKFCKRVTMSRIEFSPSLMTMDLDKFKEQITFLNDKVASYHIDIMDGHFVPNITLSPWFIQEVQKISDTPLSVHLMVTDPTFWVDQVLDLQCEYICIHAEVLNGLAFRLIDKIHDAGLKAGVVLNPETPVSTIFPYIDLLDKATIMTVDPGFAGQRFLESTLYKIQELRQLRVQNGYHYIIEMDGSSSRKTFKQIDVAGPDIYVIGRSGLFGLDDDIAKAWDICSRDYEEMTGKTMPIK

SEQ ID NO: 3319 - DNA, 1083 bp, Streptococcus pneumoniae
atgttgaaacacttaaacttaaaaggtcacttattgacagccatttcctatatgattccaattgtttgtggtgcaggattcttagttgccattggtttagcaatggggggtggtgttcctgacgctcttgtagcaggaaaattcactatctgggatgctttagcaactatgggtggtaaagcccttggtctcttgccagttgttattgctacaggtttgtcttactcgattgctggtaagccagggattgcaccaggttttgttgttggtctaattgccaattctgttggttcagggtttatcggtggtatcttgggaggttatatagctggtttcttggttcaagcgattattaaaaaggtcaaagtaccaaactggattaaaggtttaatgccaaccttgattattccttttgtagcctctttggtaagtagtttgattatgatttatattattggagcgcctatcgcagcctttaccaactggttgacgagcttattacaaagcttgggaagtgcttcaaatggtttgatgggggcagttattggaattctcagtgctgttgactttggtggcccacttaataaaacagtctatgcgtttgtgttgactttacaggctgaaggtgtgaaagaaccattgactgctttacaattggtgaatactgctacaccagttggatttggattggcctattttatcgcgaaattactcaaaaaaaatatctatactcaagaggaaatcgaaacattgaaatcggctgttcctatggggattgtcaatattgttgaaggtgtaattccgattgttatgaataacttggttccaggtctcattgcaacaggtatcggtggtgctgttggtggtgctgtttctttgacaatgggtgctgattctgctgtgccatttggtggagtgcttatgttaccaaccatgactcgtccagtagctggtatttgtgccttgttagctaacattgtagtcacaggacttgtctacgcgattttgaaaaaaccaataaaacatgcagaaccagttatgactgttgaagaagagattgatttgtcagatattgaaattttg

SEQ ID NO: 3320 - protein, 361 aa, Streptococcus pneumoniae
  PTS system, IIC component; Cellular location: membrane; Similar to strain R6 sequence 15902824 (3.E-46)
MLKHLNLKGHLLTAISYMIPIVCGAGFLVAIGLAMGGGVPDALVAGKFTIWDALATMGGKALGLLPVVIATGLSYSIAGKPGIAPGFVVGLIANSVGSGFIGGILGGYIAGFLVQAIIKKVKVPNWIKGLMPTLIIPFVASLVSSLIMIYIIGAPIAAFTNWLTSLLQSLGSASNGLMGAVIGILSAVDFGGPLNKTVYAFVLTLQAEGVKEPLTALQLVNTATPVGFGLAYFIAKLLKKNIYTQEEIETLKSAVPMGIVNIVEGVIPIVMNNLVPGLIATGIGGAVGGAVSLTMGADSAVPFGGVLMLPTMTRPVAGICALLANIVVTGLVYAILKKPIKHAEPVMTVEEEIDLSDIEIL

SEQ ID NO: 3321 - DNA, 324 bp, Streptococcus pneumoniae
ttggagggtatccgtatgaaaattgttggtgttgcagcttgtactgtgggaattgcccacacttatattgcacaggaaaaattagagaatgccgcaaaggtagctggacatgtgattcatgttgagactcaggggacaataggggtagaaaatgaattgagtcaagagcagattgatgcagcggatgtagttattttagcagttgatgttaagatttctggtatggaacgctttgagggtaaaaagattatcaaggttccaacagaagtggcagtcaaatctcccaataaactgattgctaaagctgttgagattgttacgaaa

SEQ ID NO: 3322 - protein, 108 aa, Streptococcus pneumoniae
  PTS system, IIB component; Cellular location: membrane; Similar to strain R6 sequence 15902824 (1.E-16)
MEGIRMKIVGVAACTVGIAHTYIAQEKLENAAKVAGHVIHVETQGTIGVENELSQEQIDAADVVILAVDVKISGMERFEGKKIIKVPTEVAVKSPNKLIAKAVEIVTK

SEQ ID NO: 3323 - DNA, 447 bp, Streptococcus pneumoniae
atggaaatcaaagatattcttaatgtgagtctgatccagacggatttacagatgcagagcaaagaagaggtttttgaggcattagctcaactattggttgagacgggttatgtgtctgatagagaccaatttatcgaaggtctttatcagagagaggcagaaggacagaccggtattgggaattatattgctattccccatagcaagagttctgctgtggagaaggcgggggtagtcatagctataaatcacaatgagattccttgggagaccattgatgggaaaggggtcaaagtaattgtactctttgcagttggtgatgatacagaagctgctagggagcatttgaagaccttatcactctttgctcgaaaacttggtaatgacgaagttgttgccaaattagttcgggctcagacatctgatgatgtgattgcagctttttgt

SEQ ID NO: 3324 - protein, 149 aa, Streptococcus pneumoniae
  PTS system, IIA component; Cellular location: cytoplasm; Similar to strain R6 sequence 15902824 (4.E-20)
MEIKDILNVSLIQTDLQMQSKEEVFEALAQLLVETGYVSDRDQFIEGLYQREAEGQTGIGNYIAIPHSKSSAVEKAGVVIAINHNEIPWETIDGKGVKVIVLFAVGDDTEAAREHLKTLSLFARKLGNDEVVAKLVRAQTSDDVIAAFC

SEQ ID NO: 3325 - DNA, 426 bp, Streptococcus pneumoniae
atgaataatctttcgcttgtccttatggatatatctgttcaaaatcgtcaagaagcctacaaagaattagcaaatcaaatcagccttcttgtttctgaagatacagaaaaaatagaagagcttctatattaccgtgagagacagggaagtatagaggttgctaaaggtgttcttctaccacattgtgaaggaaactttcaacatcatgtcttagtgattactagattaaaatcacctatcagagaatggtcgaaggatatccagtgtgttgaccttattatcggtttggccattgcagtatcacaggacaagtcatgtattaaaacattgatgagaagactagcagatgaatcattcataaatcaattaaaacagttaacaaaagaagaattacgggagataatatatggaaatcaaagatattct

SEQ ID NO: 3326 - protein, 142 aa, Streptococcus pneumoniae
  PTS system, nitrogen regulatory component IIA, putative; Cellular location: cytoplasm
MNNLSLVLMDISVQNRQEAYKELANQISLLVSEDTEKIEELLYYRERQGSIEVAKGVLLPHCEGNFQHHVLVITRLKSPIREWSKDIQCVDLIIGLAIAVSQDKSCIKTLMRRLADESFINQLKQLTKEELREIIYGNQRYS

SEQ ID NO: 3327 - DNA, 1461 bp, Streptococcus pneumoniae
gtgtctagaaaacaagaacaaatggaaacgttgttgctccttttgcgagatagtaaggattatatatctgctaaagtattgggagaaaaattaaattgctctgataaaacggtttatcgccttgtcaagggaatcaacaaagattgtccggtagaagcattcattttatctgaaaaaggcagaggtttcaaattaaatccaagaagttccctcgtggacgttgatgggaattttacagaggcttttgatcctgaagtaaggcgtgaaaaattactagaacgtctcttgttgactgctcctaagccacattctatttatgatttaggagaggaattctacgtaagcgagtcagtagtactaaaagatcgtcagatattacaagagagtctagcaatttatgggttagatttaaaaatgagacaacgaaagctttttattgatggggatgaggctcaaattcgttcagccattctaaatctactgccaatgtttaatcagttggatttagagcaaattacacagaataaggttcagcctcttgacggagaacttgctcacttttgtttgggattactgattacacttgagagagaattgggggtaaacattccctatccatataatataaatattttctctcacctgtatatttttatcagtaggaatcgtcgtagtactagtattcatgttgtagcaccttcaaaacctactattgttgatgagaaaatttacagtgtctgtcaaaaaattattcaagaaattgaacaatattttaggatgaaggttgatgcagttgagattgactatctttatcaatacgttgtatcttcgagattgcaaaaaccattttcttccgggaagcttcctttttctcagcgagttttagatgtcactcattactattttagccgtatgtgtatggacaatagagagattgaaacgacagatcctgactttgttgacttggcgagtcatatcagtcccttactgaggagattagataatagagtacagattaagaatagtcttttatcacaaattcttttaacctatcctaatctggttaaagagttaacaactatttctaaagaagtgagtctagtatttggttttgcttccttgagtctggacgagattggttttctagtcttatattttgcacggtttcaagaaaagcgagcacgtcctctaaaaacagtagtgatgtgtacatcaggtgtcggaacttcagagcttttacgagcacgattagaaaagcaattttctgaattggatattattgatgtagttgcttatcatcaattagatgagctgataaatctatatccagatttagatttcattgtgacgacggtagctttgcaggaaccagcaagtgtcccgtttgtcctagttagtgtttttctaaccgagggtgataaacaacgtcttcaagcaaaaattcaggagataaactatgaa

SEQ ID NO: 3328 - protein, 487 aa, Streptococcus pneumoniae
  transcription antiterminator BglG family protein, FRAMESHIFT; Cellular location: membrane; Similar to strain R6 sequence 15902323 (5.E-26)
MSRKQEQMETLLLLLRDSKDYISAKVLGEKLNCSDKTVYRLVKGINKDCPVEAFILSEKGRGFKLNPRSSLVDVDGNFTEAFDPEVRREKLLERLLLTAPKPHSIYDLGEEFYVSESVVLKDRQILQESLAIYGLDLKMRQRKLFIDGDEAQIRSAILNLLPMFNQLDLEQITQNKVQPLDGELAHFCLGLLITLERELGVNIPYPYNINIFSHLYIFISRNRRSTSIHVVAPSKPTIVDEKIYSVCQKIIQEIEQYFRMKVDAVEIDYLYQYVVSSRLQKPFSSGKLPFSQRVLDVTHYYFSRMCMDNREIETTDPDFVDLASHISPLLRRLDNRVQIKNSLLSQILLTYPNLVKELTTISKEVSLVFGFASLSLDEIGFLVLYFARFQEKRARPLKTVVMCTSGVGTSELLRARLEKQFSELDIIDVVAYHQLDELINLYPDLDFIVTTVALQEPASVPFVLVSVFLTEGDKQRLQAKIQEINYE

SEQ ID NO: 3329 - DNA, 471 bp, Streptococcus pneumoniae; identical to SEQ ID NO: 2111

SEQ ID NO: 3330 - protein, 157 aa, Streptococcus pneumoniae; identical to SEQ ID NO: 2112
  transposase, IS200 family; Cellular location: cytoplasm

SEQ ID NO: 3331 - DNA, 2334 bp, Streptococcus pneumoniae
atggataaaaataagattatgggattaacccaaagagaagtcaaggaaagacaggctgagggtttggtcaatgactttaccgcatcagccagtaccagcacttggcaaatcgttaaacgaaatgtctttaccctttttaacgctttgaactttgccattgctttggctcttgcctttgtgcaggcttggagcaatctggtcttctttgctgttatctgctttaacgctttttctgggattgtgaccgagctacgagccaaacacatggtggacaagctcaatctcatgaccaaggaaaaggtcaaaaccatccgtgatggtcaggaagttgctcttaatcctgaagaattagtgctaggagatgtcattcgtttgtctgcaggagagcagattcctagtgatgccttggttttggaaggctttgcggaagtcaatgaagccatgttaacgggagaaagtgatttggtgcaaaaggaagttgacggcttacttttgtcaggaagtttcctagccagtgggtcagttttatctcaagttcaccatgtcggtgcagacaactatgctgccaaactcatgcttgaggctaagaccgttaaacccatcaactcccgtatcatgaaatcgctggacaagttggctggttttactgggaagattatcattccctttggtctggctctcttgctggaagccttgcttttaaaaggcctgcctctcaagtcatccgttgtaaactcgtcgacagctcttttgggaatgttgcctaagggaattgcccttttgaccattacttcgctcttgactgcagtgattaagttgggcttgaaaaaggtcttggtgcaggagatgtactctgttgagaccttggcgcgcgtggatatgctctgtctggacaagacgggtaccatcacccaaggaaagatgcaggtggaggctgttcttccgttgacggaaacgtatggtgaagaggctattgccagcatcttgactagctacatggcccatagtgaggataagaatccaactgcccaagccattcgccagcgttttgtgggagatgttgcttatcctatgatttccaatcttcccttctcgagcgaccgcaagtggggggctatggagttagaaggcttggggacagttttcttaggggcacctgagatgttgcttgattctgaagtcccagaagctagggaggccttggagagaggatcacgtgtcttggtcttagctctcagtcaggagaaattagaccatcacaaaccacagaaaccatctgatattcaggctctagccttgctggaaatcttggaccccattcgagagggagcagcagagacgctggactatctccgttctcaggaggtgggactcaagattatctctggtgacaatccagttacggtgtccagcattgcccagaaggctggttttgcggactatcacagctatgtagattgctcaaaaatcaccgatgaggaattgatggccatggcggaggagacagctattttcggacgtgtttcccctcatcaaaagaaactcatcatccaaacgttgaaaaaagcgggacatacaacggctatgacaggggacggggttaatgatatcttggcccttcgtgaggcggattgttctatcgtgatggcggagggggatccagcaacccgtcagattgccaatctggttctcttgaactcagactttaatgatgttcctgagattctcttcgagggtcgtcgcgtggtcaataacattgcccacatcgccccgattttcttgataaagaccatctattccttcctgttagcagtcatctgtattgccagtgctttactaggtcggtcagagtggattttgattttccccttcattccgatccagattaccatgattgaccagtttgtggaaggtttcccaccattcgttctgacttttgagcgaaatatcaaacctgttgagcagaatttcctcagaaaatccatgcttcgtgccctaccaagcgctctcatggtcgtcttcagcgtcctgtttgtgaaaatgtttggcgcgagtcaaggttggtctgagttagaaatctcaactctactctattatctcttggggtcaattggtttcttatccgtatttagagcctgcatgccatttaccctatggcgtgtcctcttgattgtttggtcagtaggaggtttcctagccacagctctcttcccaagaattcaaaaactgcttgaaatttcaaccttaacagaacaaacgttgcctgtttatggtgtcatgatgttggtctttaccgtgattttcatcctgaccagtcgttaccaagcgaaaaaa

SEQ ID NO: 3332 - protein, 778 aa, Streptococcus pneumoniae
  cation-transporting ATPase, E1-E2 family ( ); Cellular location: membrane; Similar to strain R6 sequence 15903507 (0.E+01)
MDKNKIMGLTQREVKERQAEGLVNDFTASASTSTWQIVKRNVFTLFNALNFAIALALAFVQAWSNLVFFAVICFNAFSGIVTELRAKHMVDKLNLMTKEKVKTIRDGQEVALNPEELVLGDVIRLSAGEQIPSDALVLEGFAEVNEAMLTGESDLVQKEVDGLLLSGSFLASGSVLSQVHHVGADNYAAKLMLEAKTVKPINSRIMKSLDKLAGFTGKIIIPFGLALLLEALLLKGLPLKSSVVNSSTALLGMLPKGIALLTITSLLTAVIKLGLKKVLVQEMYSVETLARVDMLCLDKTGTITQGKMQVEAVLPLTETYGEEAIASILTSYMAHSEDKNPTAQAIRQRFVGDVAYPMISNLPFSSDRKWGAMELEGLGTVFLGAPEMLLDSEVPEAREALERGSRVLVLALSQEKLDHHKPQKPSDIQALALLEILDPIREGAAETLDYLRSQEVGLKIISGDNPVTVSSIAQKAGFADYHSYVDCSKITDEELMAMAEETAIFGRVSPHQKKLIIQTLKKAGHTTAMTGDGVNDILALREADCSIVMAEGDPATRQIANLVLLNSDFNDVPEILFEGRRVVNNIAHIAPIFLIKTIYSFLLAVICIASALLGRSEWILIFPFIPIQITMIDQFVEGFPPFVLTFERNIKPVEQNFLRKSMLRALPSALMVVFSVLFVKMFGASQGWSELEISTLLYYLLGSIGFLSVFRACMPFTLWRVLLIVWSVGGFLATALFPRIQKLLEISTLTEQTLPVYGVMMLVFTVIFILTSRYQAKK

SEQ ID NO: 3333 - DNA, 747 bp, Streptococcus pneumoniae
atgttttatacttatttgcgtggattagttgtattgctcttatggtccatcaatggcaatgctcactatcataatactgataaaattcctaatcaagatgaaaattatattttagttgcgcctcaccgtacctggtgggatcctgtttatatggcctttgcgaccaagccaaaacagttcatctttatggcaaaaaaagaactctttaccaaccgtatctttggttggtggattcgtatgtgtggcgcctttcccatcgaccgtgaaaatcccagcgcctcagccatcaaatatcctatcaacgttctcaaaaaaagtgaccgctctctcatcatgtttccaagtggtagccgccactcaaacgatgtcaaggggggcgcagcactgattgccaaaatggccaaggtccgtatcatgccggttacctacaccggtcccatgactttgaagggcttgattagccgtgaacgtgtcgatatgaactttggaaatccaatcgatatctcagatatcaagaaaatgaatgatgaaggcattgaaacagtcgccaatcgtattcaaacagaattccaacgtctggacgaagaaacgaaacaatggcacaatgataaaaaaccaaatccactctggtggtttatccgcatccctgccctcatccttgctattatcctcgctatcctaaccatcatctttagctttatcgcaagcttcatctggaacccagataagaaaagagaagaacttgca

SEQ ID NO: 3334 - protein, 249 aa, Streptococcus pneumoniae
  acyltransferase family protein; Cellular location: membrane; Similar to strain R6 sequence 15903508 (e-148)
MFYTYLRGLVVLLLWSINGNAHYHNTDKIPNQDENYILVAPHRTWWDPVYMAFATKPKQFIFMAKKELFTNRIFGWWIRMCGAFPIDRENPSASAIKYPINVLKKSDRSLIMFPSGSRHSNDVKGGAALIAKMAKVRIMPVTYTGPMTLKGLISRERVDMNFGNPIDISDIKKMNDEGIETVANRIQTEFQRLDEETKQWHNDKKPNPLWWFIRIPALILAIILAILTIIFSFIASFIWNPDKKREELA

SEQ ID NO: 3335 - DNA, 612 bp, Streptococcus pneumoniae
atgggacagacaatcatatctgctattggtgtttatatttccaccagtatcgattatttaattattttaattattttatttgcacagctatcacagaataaacagaaatggcatatttatgcggggcaatatctaggcacaggcttacttgtaggggcgagtttagttgctgcttatgtcgttaatttcgtgcctgaagaatggatggttggattgcttggtttaatccctatctatttagggattcgctttgcaattgttggagaagatgcggaagaagaagaggaagaaattattgaaagattagaacaaagcaaggcaaatcaactgttttggacagttacattgctgacaattgcgtctggcggagataatttaggtatctatataccttattttgcttcgttagattggtcacagaccctcgtggccttgcttgtgtttgtaatcggcataattatcttttgcgagattagtcgggtgttatcctctattccgttaatattcgagacaattgaaaaatacgagcgaatcattgtgcccttagtattcattctacttggactatacatcatgtatgaaaatggcacgatagagacttttctgatcgtg

SEQ ID NO: 3336 - protein, 204 aa, Streptococcus pneumoniae
  cadmium resistance transporter, putative; Cellular location: membrane; Similar to strain R6 sequence 15903509 (e-112)
MGQTIISAIGVYISTSIDYLIILIILFAQLSQNKQKWHIYAGQYLGTGLLVGASLVAAYVVNFVPEEWMVGLLGLIPIYLGIRFAIVGEDAEEEEEEIIERLEQSKANQLFWTVTLLTIASGGDNLGIYIPYFASLDWSQTLVALLVFVIGIIIFCEISRVLSSIPLIFETIEKYERIIVPLVFILLGLYIMYENGTIETFLIV

SEQ ID NO: 3337 - DNA, 267 bp, Streptococcus pneumoniae
atggcaatctcaaaagagaaaaaaaatgaaatcatcgcacaatatgcacgtcacgaaggtgatacaggttcagtagaggttcaagttgctgtccttacttgggaaatcaaccaccttaacgaacacatcaaacaacacaaaaaagaccacgctacttaccgtggattgatgaaaaaaatcggtcgccgtcgtaacttgcttgcatacttgcgtaaaaacgacgttaaccgttaccgtgagttgatcaactctctaggacttcgtcgc

SEQ ID NO: 3338 - protein, 89 aa, Streptococcus pneumoniae
  ribosomal protein S15 (rpsO); Cellular location: cytoplasm; Similar to strain R6 sequence 15903510 (6.E-48)
MAISKEKKNEIIAQYARHEGDTGSVEVQVAVLTWEINHLNEHIKQHKKDHATYRGLMKKIGRRRNLLAYLRKNDVNRYRELINSLGLRR

SEQ ID NO: 3339 - DNA, 627 bp, Streptococcus pneumoniae
atgaaactagcagttattgcagcaaatggacaagcggggaaagcaattgttgaagaagcagtcaaacgaggacatgaagtaacggctattgttcgttctgaaaacaaaagtcaagctgagtctattattaaaaaagatttatttgagttgacaaaagatgatcttactggatttgatgctgttatttcagcgtttggtgcttatacaccagatacgctaccgctccacagcaaatcaatcgaactatttaatcagcttcttgctggaacacagacacgttttctagttgtagggggagcaggaagtctttatatagatgaaacaaaaacgacacgacttttagatacgcctgattttcctgaagaatttaagccactagcaaaagctcaagcggatgaattggatcttcttcgtacaaaaaataatctcaactggacttttgtcagtcctgctgtagattttattcccgatggtgaaaaaacaggaaactacattctagcaggagaaatttttactactaatgaaaaaggaataagccagattagttatgcagattatgctattggattggtagatgaacttgaaaaaggtcatcatataaaagaacgtatctctttacttgaaaaa

SEQ ID NO: 3340 - protein, 209 aa, Streptococcus pneumoniae
  conserved hypothetical protein; Cellular location: cytoplasm; Similar to strain R6 sequence 15903511 (e-115)
MKLAVIAANGQAGKAIVEEAVKRGHEVTAIVRSENKSQAESIIKKDLFELTKDDLTGFDAVISAFGAYTPDTLPLHSKSIELFNQLLAGTQTRFLVVGGAGSLYIDETKTTRLLDTPDFPEEFKPLAKAQADELDLLRTKNNLNWTFVSPAVDFIPDGEKTGNYILAGEIFTTNEKGISQISYADYAIGLVDELEKGHHIKERISLLEK

SEQ ID NO: 3341 - DNA, 207 bp, Streptococcus pneumoniae
gtgattatcatgcgtagattctattcccatctcccctactatctggtcatattattcttttattggccactttatgagttgttcttactagttgtttctgacccccttacactcaagggactctatataaacaatcttctcttctttacacctctggtaatcttgattgtatcgttactctatagctaccgtttccgtttctcactt

SEQ ID NO: 3342 - protein, 69 aa, Streptococcus pneumoniae
  hypothetical protein; Cellular location: membrane; Similar to strain R6 sequence 15903512 (4.E-35)
MIIMRRFYSHLPYYLVILFFYWPLYELFLLVVSDPLTLKGLYINNLLFFTPLVILIVSLLYSYRFRFSL

SEQ ID NO: 3343 - DNA, 102 bp, Streptococcus pneumoniae
ttgctaatctatgaaacagttgctctggtcggcatggattctggtattagcatcaagcatattctacaaaaaatgaaaaacaaaaaactttcacaaaatcct

SEQ ID NO: 3344 - protein, 34 aa, Streptococcus pneumoniae
  hypothetical protein; Cellular location: cytoplasm
MLIYETVALVGMDSGISIKHILQKMKNKKLSQNP

SEQ ID NO: 3345 - DNA, 387 bp, Streptococcus pneumoniae
atgaaggtggaaccacgttgcgacgtcctttcgaggatgtcgcatttttttattaggatactaattatggagttgcaagaattagtggagcgcagttgggcaatccgacaagcttatcacgaactggaagttaagcatcatgattccaagtggacggtagaagaagacctcttggctttatctaatgatattggaaatttccaacgactggtgatgacaaagcaaggacgctactatgatgaaacaccctacacactggaacaaaaactttcagaaaatatctggtggctattagaactttctcaacgtttggatatagacattctgacggaaatggaaaacttcctctctgataaagaaaagcaattgaacgttaggacttggaag

SEQ ID NO: 3346 - protein, 129 aa, Streptococcus pneumoniae
  hypothetical protein; Cellular location: cytoplasm; Similar to strain R6 sequence 15903513 (5.E-35)
MKVEPRCDVLSRMSHFFIRILIMELQELVERSWAIRQAYHELEVKHHDSKWTVEEDLLALSNDIGNFQRLVMTKQGRYYDETPYTLEQKLSENIWWLLELSQRLDIDILTEMENFLSDKEKQLNVRTWK

SEQ ID NO: 3347 - DNA, 1941 bp, Streptococcus pneumoniae
atgattaacattactttcccagatggcgctgttcgtgaattcgaatctggcgtaacaacttttgaaattgcccaatctatcagcaattccctagctaaaaaagccttggctggtaaattcaacggcaaactcatcgacactactcgcgctatcactgaagatggaagcatcgaaattgtgacacctgatcacgaagatgcccttccaatcttgcgtcactcagcagctcacttgttcgcccaagcagctcgtcgtcttttcccagacattcacttgggagttggtccagccatcgaagatggtttctactacgatactgacaacacagctggtcaaatctctaacgaagaccttcctcgtatcgaagaagaaatgcaaaaaatcgtcaaagaaaacttcccatctattcgtgaagaagtgactaaagacgaggcacgtgaaatcttcaaaaatgacccttacaagttggaattgattgaagaacactcagaagacgaaggcggtttgactatctatcgtcagggtgaatatgtagacctctgccgtggacctcacgttccatcaacaggtcgtatccaaatcttccaccttctccatgtagctggtgcgtactggcgtggaaacagcgacaacgctatgatgcaacgtatctacggtacagcttggtttgacaagaaagacttgaaaaactaccttcaaatgcgtgaagaagctaaggaacgtgaccaccgtaaacttggtaaagagcttgacctctttatgatttcacaagaagtgggacaaggtttgccattctggttgccaaatggtgcgactatccgtcgtgaattggaacgctacatcgtaaacaaagagttggtttctggctaccaacacgtctacactccaccacttgcttctgttgagctttacaagacttctggtcactgggatcattaccaagaagacatgttcccaaccatggacatgggtgacggggaagaatttgtccttcgtccaatgaactgtccgcaccacatccaagttttcaaacaccatgttcactcttaccgtgaattgccaatccgtatcgctgaaatcggtatgatgcaccgttacgaaaaatctggtgccctcactggccttcaacgtgtacgtgaaatgtcactcaacgacggtcacctattcgttactccagaacaaatccaagaagaattccaacgtgcccttcagttgattatcgatgtttatgaagacttcaacttgactgactaccgcttccgcctctctcttcgtgaccctcaagatactcataagtactttgataacgatgagatgtgggaaaatgcccaaaccatgcttcgtgcagctcttgatgaaatgggcgtggactactttgaagccgaaggtgaagcagccttctacggaccaaaattggatatccagattaaaactgcccttggaaaagaagaaaccctttctactatccaacttgatttcttgttgccagaacgcttcgacctcaaatacatcggagctgatggcgaagatcaccgtccagtcatgatccaccgtggggttatctcaactatggaacgcttcacagctatcttgattgagaactacaagggggccttcccaacatggctggcaccacaccaagtaaccctcatcccagtatctaacgaaaaacacgtggactacgcttgggaagtggccaagaaactccgtgaccgcggtgtccgtgcagacgtagatgagcgcaatgaaaaaatgcagttcaagatccgtgcttcacaaaccagcaagattccttaccaattaattgttggagacaaagaaatggaagacgaaacagtcaacgttcgtcgctacggccaaaaagaaacacaaactgtctcagttgataattttgttcaagctatcctagctgatatcgccaacaaatcacgcgttgagaaa

SEQ ID NO: 3348 - protein, 647 aa, Streptococcus pneumoniae
  threonyl-tRNA synthetase (thrS); Cellular location: cytoplasm; Similar to strain R6 sequence 15903515 (0.E+01)
MINITFPDGAVREFESGVTTFEIAQSISNSLAKKALAGKFNGKLIDTTRAITEDGSIEIVTPDHEDALPILRHSAAHLFAQAARRLFPDIHLGVGPAIEDGFYYDTDNTAGQISNEDLPRIEEEMQKIVKENFPSIREEVTKDEAREIFKNDPYKLELIEEHSEDEGGLTIYRQGEYVDLCRGPHVPSTGRIQIFHLLHVAGAYWRGNSDNAMMQRIYGTAWFDKKDLKNYLQMREEAKERDHRKLGKELDLFMISQEVGQGLPFWLPNGATIRRELERYIVNKELVSGYQHVYTPPLASVELYKTSGHWDHYQEDMFPTMDMGDGEEFVLRPMNCPHHIQVFKHHVHSYRELPIRIAEIGMMHRYEKSGALTGLQRVREMSLNDGHLFVTPEQIQEEFQRALQLIIDVYEDFNLTDYRFRLSLRDPQDTHKYFDNDEMWENAQTMLRAALDEMGVDYFEAEGEAAFYGPKLDIQIKTALGKEETLSTIQLDFLLPERFDLKYIGADGEDHRPVMIHRGVISTMERFTAILIENYKGAFPTWLAPHQVTLIPVSNEKHVDYAWEVAKKLRDRGVRADVDERNEKMQFKIRASQTSKIPYQLIVGDKEMEDETVNVRRYGQKETQTVSVDNFVQAILADIANKSRVEK

SEQ ID NO: 3349 - DNA, 972 bp, Streptococcus pneumoniae
atgcttgattggaaacaattttttctagcctatctgcgctcccgtagtcgtctttttatctatctgctttctttggcatttcttgtcttactctttcagtttttatttgccagtctaggaatttacttcctctactttttcttcttgtgttgctttgtaaccatattatttttcacttgggacatattggtggaaacgcaggtctatcgccaggaacttctctatggagagagggaagccaagtctcctttggaaatagctttagcagaaaaattagaagcgcgtgagatggaactctatcagcagaggtcaaaagcagaaagaaaactgacggatttgctggattactataccttgtgggtccatcagataaagacccccattgcagccagtcaactcttagttgcagaagtggtcgaccgccaactgaagcagcagctagaacaggaaattttcaaaatcgactcctataccaacctagttttacagtacctgcgtttagaaagtttccatgatgatttggtcttaaagcaggttcaaattgaggacttggtcaaggaaataattcgtaaatatgctcttttctttattcaaaaaggcttaaatgtcaatctacatgaccttgataaagaaatcgtgacggataaaaagtggctgctagtggttattgagcaaatcatctcaaacagtctcaagtacaccaaggaaggtggtctggagatttatatggatgaccaagagctttgtatcaaagatacgggaatcgggataaaaaacagtgatgtcctccgagtatttgaacgtggcttttcaggatacaatggccgtttgacccagcagtcctctggacttggcctttatctatctaagaaaatttctgaagaactggggcaccagattcgtatcgagtctgaggtcggaaaaggaacgacagtgcggattcagtttgctcaagtgaacttagtccttgag

SEQ ID NO: 3350 - protein, 324 aa, Streptococcus pneumoniae
  sensor histidine kinase; Cellular location: membrane; Similar to strain R6 sequence 15903516 (0.E+01)
MLDWKQFFLAYLRSRSRLFIYLLSLAFLVLLFQFLFASLGIYFLYFFFLCCFVTILFFTWDILVETQVYRQELLYGEREAKSPLEIALAEKLEAREMELYQQRSKAERKLTDLLDYYTLWVHQIKTPIAASQLLVAEVVDRQLKQQLEQEIFKIDSYTNLVLQYLRLESFHDDLVLKQVQIEDLVKEIIRKYALFFIQKGLNVNLHDLDKEIVTDKKWLLVVIEQIISNSLKYTKEGGLEIYMDDQELCIKDTGIGIKNSDVLRVFERGFSGYNGRLTQQSSGLGLYLSKKISEELGHQIRIESEVGKGTTVRIQFAQVNLVLE

SEQ ID NO: 3351 - DNA, 765 bp, Streptococcus pneumoniae
ttgtactggctaaaaacaggctatttcaaattcagtttcagaccatctagcatggaaaaatctgttataataatggaaaaggagaagcgcatgcacaagattttattaatagaagatgatcaggtcattcgtcaacagattgggaaaatgctctctgaatggggatttgaagtggtcctggtagaagactttatggaagttttgagtctatttgttcagtcggaacctcatctggtcctcatggatattggtttgcccttgtttaatggttatcactggtgtcaggaaatccgcaagatttccaaggtacctatcatgtttctttcttcgagagaccaggctatggatattgtcatggcaatcaatatgggggcggatgactttgtgaccaagccttttgaccagcaggttcttttagctaaggttcagggcttgttgcgtcgttcctatgagtttgggcgtgatgagagtttgctggaatatgctggtgttatcctcaataccaaatccatggatttacattatcaagggcaagtcttgaatttgaccaagaatgaattccagattttacgcgtgttatttgagcatgcaggcaacatcgtagcacgtgacgacctgatgcgggaactttggaacagtgactttttcattgatgataataccctctctgtcaatgtggctcgtttgcgtaaaaagttggaggagcagggattggtaggatttatcgagaccaagaaaggaatagggtacggattgaagcatgct

SEQ ID NO: 3352 - protein, 255 aa, Streptococcus pneumoniae
  DNA-binding response regulator; Cellular location: membrane; Similar to strain R6 sequence 15903517 (e-127)
MYWLKTGYFKFSFRPSSMEKSVIIMEKEKRMHKILLIEDDQVIRQQIGKMLSEWGFEVVLVEDFMEVLSLFVQSEPHLVLMDIGLPLFNGYHWCQEIRKISKVPIMFLSSRDQAMDIVMAINMGADDFVTKPFDQQVLLAKVQGLLRRSYEFGRDESLLEYAGVILNTKSMDLHYQGQVLNLTKNEFQILRVLFEHAGNIVARDDLMRELWNSDFFIDDNTLSVNVARLRKKLEEQGLVGFIETKKGIGYGLKHA

SEQ ID NO: 3353 - DNA, 1071 bp, Streptococcus pneumoniae
atggccaatatttttgactatctgaaagatgtcgcatatgattcttattacgaccttcccttgaatgagttagacattctaaccttaatagaaatcacctacctctcctttgataatctggtctccacacttcctcaacgtcttttagatctagcacctcaggttccaagagatcccaccatgcttactagcaaaaatcgccttcaattattagatgaattggctcaacacaagcgcttcaaaaattgcaaactctcccattttatcaacgacatcgaccctgaactgcaaaagcaatttgcggctatgacttatcgtgtcagcctcgatacctatctgattgtctttcgtgggacagatgacagtatcattggctggaaggaagatttccacctgacctatatgaaggaaattcctgctcaaaagcacgcccttcgctatttaaagaacttttttgcccatcatcctaagcaaaaggttattctagctgggcattccaagggaggaaatctcgctatctatgctgctagccaaattgagcaaagtttgcaaaatcagatcacagcagtttatacatttgatgcacctggtctccatcaagaattgacacagactgcgggttatcaaaggataatggatagaagcaagatattcattccacaaggttccattatcggtatgatgctggaaattcctgctcaccaaatcatcgttcagagtactgccctgggtggcatcgcccagcacgatacctttagttggcagattgaggacaagcacttcgtccaactggataagaccaacagtgatagccagcaagtagacacaacctttaaagaatgggtggccacagtccctgacgaagaacttcagctctacttcgacctcttctttggcactattcttgatgctggtattagctctatcaatgacttggcttccttaaaggcgcttgaatacattcatcatctctttgtccaagctcaatccctcactccagaagaaagagaaaccttgggtcgccttacccagttattgattgatactcgttaccaggcatggaaaaataga

SEQ ID NO: 3354 - protein, 357 aa, Streptococcus pneumoniae
  hypothetical protein; Cellular location: cytoplasm; Similar to strain R6 sequence 15903518 (0.E+01)
MANIFDYLKDVAYDSYYDLPLNELDILTLIEITYLSFDNLVSTLPQRLLDLAPQVPRDPTMLTSKNRLQLLDELAQHKRFKNCKLSHFINDIDPELQKQFAAMTYRVSLDTYLIVFRGTDDSIIGWKEDFHLTYMKEIPAQKHALRYLKNFFAHHPKQKVILAGHSKGGNLAIYAASQIEQSLQNQITAVYTFDAPGLHQELTQTAGYQRIMDRSKIFIPQGSIIGMMLEIPAHQIIVQSTALGGIAQHDTFSWQIEDKHFVQLDKTNSDSQQVDTTFKEWVATVPDEELQLYFDLFFGTILDAGISSINDLASLKALEYIHHLFVQAQSLTPEERETLGRLTQLLIDTRYQAWKNR

SEQ ID NO: 3355 - DNA, 300 bp, Streptococcus pneumoniae
atgtatctcgttataggaattgtattagcctttatagtgtcattttggaaggataatagaagtttgtggaatccagtattatttttattatccctcatttcaagttatttttatctatcctaccttttttataaaaatggatacgagaatgttcagttagctttttatatatttgcctttgtcttacttccttttttgctttttctaagtggcatctttttaatctataatggggtcattttgttgaagcgagagggacgttccaagccccattatctctcaatgctctttgatttttat

SEQ ID NO: 3356 - protein, 100 aa, Streptococcus pneumoniae
  hypothetical protein; Cellular location: membrane; Similar to strain R6 sequence 15903519 (1.E-53)
MYLVIGIVLAFIVSFWKDNRSLWNPVLFLLSLISSYFYLSYLFYKNGYENVQLAFYIFAFVLLPFLLFLSGIFLIYNGVILLKREGRSKPHYLSMLFDFY

SEQ ID NO: 3357 - DNA, 435 bp, Streptococcus pneumoniae
atgcaaattccaagtagatttaccattgcgactcatatgctgataatcattgccctcgaggggaaggaaagcaaggtgaccagtgattttctggctgctagtgtcggggtcaatcctgtcattatcagaaagatcttgtcccagttgaagaaggcagagctgatttcagtagcgcgtggaacgggcggaacagagattgtcaaggaccttaaggatattagtcttttagatgtttatcaggcggtcgaatgtcttggtaagacaggtcaactcttcagtttccatgacaatccgaatccaaattgccctgtaggagctcatattcatgatgttttggatcaaaaattggagagaattcagttgactatggaggcagaacttggtcaaaccagtctagaaaaagtcgtggccgatgcagagagtcagatgaaggat

SEQ ID NO: 3358 - protein, 145 aa, Streptococcus pneumoniae
  Rrf2 family protein; Cellular location: outside; Similar to strain R6 sequence 15903520 (5.E-78)
MQIPSRFTIATHMLIIIALEGKESKVTSDFLAASVGVNPVIIRKILSQLKKAELISVARGTGGTEIVKDLKDISLLDVYQAVECLGKTGQLFSFHDNPNPNCPVGAHIHDVLDQKLERIQLTMEAELGQTSLEKVVADAESQMKD

SEQ ID NO: 3359 - DNA, 846 bp, Streptococcus pneumoniae
atggatatgacgaaaatagctcttctttcagatattcatggaaataccaccgccttggaggctgttttggcagatgctcggcagataggagtggatgaatactggcttttgggagatattctcatgccagggacagggcgtagaaggattttggacttgttggatcaactaccgattacggctagagttttgggaaactgggaagacagtctttggcatggtgtccgtaaggaattggacagtactcgccccagtcaacgctatctcttgcgccagtgccagtatgttttagaggaaatttccctagaagaaattgaagtgctccacaatcaacctcttcaaattcatcgtcagtttggggatttgacggtgggaattagccatcatctgcctgataagaactgggggcgagagttgattcatactggcaaacaagaggagtttgaccgcttggtgactcatcctccctgtgatattgctgtttatggacatattcaccagcagttgcttcgttacgggactggtgggcaattgattgtcaatccgggttcgattggccaacctttctttttggacgctcagctacggaaggacttgcgggcccagtatatgattttggagtttgatgacaaaggcctggtagatatggacttccgacgggtagactacgatgtagcagctgaattgcagctggctaaagacctgagacttccctattttgaggtttactatgaaagtctggtcaatgggatccaccatactcatcatcaggaatttttgagagaattggctcagaaagagggctgcgatcgggagttagacgactggttgaaaagtggtaacgat

SEQ ID NO: 3360 - protein, 282 aa, Streptococcus pneumoniae
  conserved hypothetical protein; Cellular location: cytoplasm; Similar to strain R6 sequence 15903522 (e-168)
MDMTKIALLSDIHGNTTALEAVLADARQIGVDEYWLLGDILMPGTGRRRILDLLDQLPITARVLGNWEDSLWHGVRKELDSTRPSQRYLLRQCQYVLEEISLEEIEVLHNQPLQIHRQFGDLTVGISHHLPDKNWGRELIHTGKQEEFDRLVTHPPCDIAVYGHIHQQLLRYGTGGQLIVNPGSIGQPFFLDAQLRKDLRAQYMILEFDDKGLVDMDFRRVDYDVAAELQLAKDLRLPYFEVYYESLVNGIHHTHHQEFLRELAQKEGCDRELDDWLKSGND

SEQ ID NO: 3361 - DNA, 648 bp, Streptococcus pneumoniae
atgaccccaaacaaagaagactatctaaaatgtatttatgaaattggcatagacctgcataagattaccaacaaggaaattgcggctcgcatgcaagtctctccccctgccgtaactgaaatgatcaaacgaatgaaaagtgaaaatctcatcctaaaggacaaggaatgtggctatctactgactgacctcggtctcaaactggtctctgagctctatcgtaagcaccgcttgattgaagtttttctagttcatcatttagactatacaagtgaccagattcacgaggaagctgaggtcttggaacacactgtctctgacctgttcgtggaaagactagataaactgctaggtttccctaaaacctgcccccacgggggaactattcctgccaagggagaactactcgttgaaatcaataacctcccactagctgatatcaaggaagctggcgcctaccgcctgactcgggtgcacgatagttttgacattctccattatctggacaagcactcacttcacatcggtgaccagctccaagtcaagcagtttgatggcttcagcaataccttcactatcctcagtaacgacgaggatttacaagtgaatatggacattgcaaaacaactctatgtcgagaaaatcaac

SEQ ID NO: 3362 - protein, 216 aa, Streptococcus pneumoniae
  iron-dependent transcriptional regulator; Cellular location: cytoplasm; Similar to strain R6 sequence 15903523 (e-123)
MTPNKEDYLKCIYEIGIDLHKITNKEIAARMQVSPPAVTEMIKRMKSENLILKDKECGYLLTDLGLKLVSELYRKHRLIEVFLVHHLDYTSDQIHEEAEVLEHTVSDLFVERLDKLLGFPKTCPHGGTIPAKGELLVEINNLPLADIKEAGAYRLTRVHDSFDILHYLDKHSLHIGDQLQVKQFDGFSNTFTILSNDEDLQVNMDIAKQLYVEKIN

SEQ ID NO: 3363 - DNA, 1272 bp, Streptococcus pneumoniae
atggaacaattacattttatcacaaaattactagacattaaagaccctaacatccagattttagacatcatcaataaggatacacacaaggaaatcatcgccaaactggactacgacgccccatcttgccctgagtgcggaaaccaattgaagaaatatgactttcaaaaaccttctaaaattccttatcttgaaacgactggtatgcctactagaattctccttagaaagcgtcgattcaagtgctatcactgttcaaaaatgatggtcgctgaaacttctatcgtcaagaagaatcaccaaatccctcgtatcatcaaccaaaagattgctcaaaagttaattgaaaagatttctatgactgatattgcccatcagctttccatctcaacttcaactgttattcgtaagctcaatgactttcactttaaacatgatttttcttgtcttcctgagattatgtcttgggatgagtatgcttttacaaaaggaaagatgagcttcattgcgcaagattttaacaatctcaatatcatcaacaatctcaatatcatcactgttcttaagggaagaacacaagctgtcatccgaaatcactttcttaaatatgatagagccgtccgatgtcgcgtcaaaatcattactatggatatgtttagtccttactatgatttagctagacaacttttcccgtgtgctaaaatcgtgttggatcgctttcacattgtacaacatcttagccgtgctatgagtcgtgtgcgtgttcaaatcatgaatcagtttcatcgaaaatcccatgaatacaaggctatcaagcgctactggaagctcatacaacaggatagccgtaaactgagtgataagcgattttatcgtcctacttttcgtatgcacttaaccaataaagagattttagacaagcttttgagctattcacaagacttgaaacaccactatcagctctatcaactcttgctgtttcactttcagaataagaaaccggagaaatttttcggactcattgaggacaatctaaagcaggttcatcctatttttcagactgtctttaaaaccttcctcaaagataaagaaaagattgtcaacgcccttcaactacactattctaatgccaaactggaagcgaccaataatctcatcaaacttatcaagcgcaatgcctttggttttcggaactttgaaaacttcaaaaaacggatttttatcgctctgaatatcaaaaaagaaaggacaaaatttgtcctttctcgagct

SEQ ID NO: 3364 - protein, 424 aa, Streptococcus pneumoniae
  IS1167, transposase; Cellular location: cytoplasm; Similar to strain R6 sequence 15903763 (0.E+01)
MEQLHFITKLLDIKDPNIQILDIINKDTHKEIIAKLDYDAPSCPECGNQLKKYDFQKPSKIPYLETTGMPTRILLRKRRFKCYHCSKMMVAETSIVKKNHQIPRIINQKIAQKLIEKISMTDIAHQLSISTSTVIRKLNDFHFKHDFSCLPEIMSWDEYAFTKGKMSFIAQDFNNLNIINNLNIITVLKGRTQAVIRNHFLKYDRAVRCRVKIITMDMFSPYYDLARQLFPCAKIVLDRFHIVQHLSRAMSRVRVQIMNQFHRKSHEYKAIKRYWKLIQQDSRKLSDKRFYRPTFRMHLTNKEILDKLLSYSQDLKHHYQLYQLLLFHFQNKKPEKFFGLIEDNLKQVHPIFQTVFKTFLKDKEKIVNALQLHYSNAKLEATNNLIKLIKRNAFGFRNFENFKKRIFIALNIKKERTKFVLSRA

SEQ ID NO: 3365 - DNA, 519 bp, Streptococcus pneumoniae
atgttgtccactcgtttcacggggaaattaagcaaatggggaaattactttggtattgttaataccattttgtccggtgctattgattatatccttggaaataaggcggccatcattacctatcccgtcaccttcctcatttatacctttgctataaagaagtgggaagcttcgcaagaaggcagacccaaccaaatgagccaaaaacaggtaaaattggcggccatcatcatttccatcatcgccttcctctttgcctttgtgaccaactatatcggatatgggggcaagatgaatctccttgcctacgtaacaactattgcctttgcactgtccctcattgccaatgctttgaatgcattaaaactaacaactcagtggggcttttggttgatttacaatttcgttcagctgacaaaagctggtattcaaggaaacttcgccaatatcggtaaatacatcttttatatcctcaatgcaatcggagctttatttgtctggaatgatgaagaagttaga

SEQ ID NO: 3366 - protein, 173 aa, Streptococcus pneumoniae
  hypothetical protein; Cellular location: membrane; Similar to strain R6 sequence 15903525 (2.E-63)
MLSTRFTGKLSKWGNYFGIVNTILSGAIDYILGNKAAIITYPVTFLIYTFAIKKWEASQEGRPNQMSQKQVKLAAIIISIIAFLFAFVTNYIGYGGKMNLLAYVTTIAFALSLIANALNALKLTTQWGFWLIYNFVQLTKAGIQGNFANIGKYIFYILNAIGALFVWNDEEVR

SEQ ID NO: 3367 - DNA, 411 bp, Streptococcus pneumoniae
atgaaaaaactctatagaatccattttatagcaattgcagttattgatttgctactatttgcattttttatcactagactcgagacatcttttgagtggctcttgctctctggtttaattttcttccttgctcaaggactcctgctatttctcttggtcgtccgactcaaacatcaattcgctgagatttatcctcaaatcaataaaaagattcgcttctactatttaggggttctcaccattgattttctattttttgttctcttagccttcattagttctcagcgtttttcatctcttatgccaatcatcactgcttgccattctactttttattatatgacagctgactacctaagagaaaactatccagacttttacgacaaacacatctctttatgggagtgtctc

SEQ ID NO: 3368 - protein, 137 aa, Streptococcus pneumoniae
  conserved domain protein; Cellular location: membrane; Feature of note: WYY motif; 1 transmembrane domain; Similar to strain R6 sequence 15903526 (1.E-72)
MKKLYRIHFIAIAVIDLLLFAFFITRLETSFEWLLLSGLIFFLAQGLLLFLLVVRLKHQFAEIYPQINKKIRFYYLGVLTIDFLFFVLLAFISSQRFSSLMPIITACHSTFYYMTADYLRENYPDFYDKHISLWECL

SEQ ID NO: 3369 - DNA, 168 bp, Streptococcus pneumoniae
atgaaagaaaatgagccaaccgctataaatcaaaatccagtcccaagtaagcccccttttaaatgtcaaaaatgccagcatgattccatcaatgacaaggagttgaatggttttgatgaagatgatttttttcatgctaaaacctccttttctttagagacactccca

SEQ ID NO: 3370 - protein, 56 aa, Streptococcus pneumoniae
  hypothetical protein
MKENEPTAINQNPVPSKPPFKCQKCQHDSINDKELNGFDEDDFFHAKTSFSLETLP

SEQ ID NO: 3371 - DNA, 183 bp, Streptococcus pneumoniae
atgaaaaaaatcatcttcatcaaaaccattcaactccttgtcattgatggaatcatgctggcatttttgacatttaaaagggggcttacttgggactggattttgatttatagcggttggctcattttctttcatcctgtgctattgacctatctttcaaaccaactttgtgaccactttagt

SEQ ID NO: 3372 - protein, 61 aa, Streptococcus pneumoniae
  hypothetical protein; Cellular location: membrane; Similar to strain R6 sequence 15903528 (4.E-12)
MKKIIFIKTIQLLVIDGIMLAFLTFKRGLTWDWILIYSGWLIFFHPVLLTYLSNQLCDHFS

SEQ ID NO: 3373 - DNA, 159 bp, Streptococcus pneumoniae
atgattctctccttggtgtctttaagtgatattccacttttccttcagggaactctcctcatcctaggacatctcatcccttcctatcgcatctgccaaagcctgaaaagagacttcccccaagcatatcaagaaccgatttctttttggagtatttta

SEQ ID NO: 3374 - protein, 53 aa, Streptococcus pneumoniae
  hypothetical protein; Cellular location: membrane; Similar to strain R6 sequence 15903528 (3.E-26)
MILSLVSLSDIPLFLQGTLLILGHLIPSYRICQSLKRDFPQAYQEPISFWSIL

SEQ ID NO: 3375 - DNA, 441 bp, Streptococcus pneumoniae
atgaaaatcattatccaacgggttaaaaaagcccaagtgagtatagaaggccagattcagggaaaaatcaatcagggacttttattgctggttggtgttggaccagaggaccaagaggaagatttggactatgctgtgagaaaactggtcaatatgcggattttttcagacgcagaaggcaagatgaacctgtctgtcaaagatattgaaggagaaatcctctctatttctcagtttaccctctttgcggatactaagagaggcaatcgtccagcctttacaggggcagctaaacctgatatggcatcagacttctatgatgctttcaatcaaaaattagcgcaagaagtgcccgttcagacaggcatctttggagcagatatgcaggttgagctggttaataatggacctgttaccattatcctagatactaaaaagaga

SEQ ID NO: 3376 - protein, 147 aa, Streptococcus pneumoniae
  conserved hypothetical protein; Cellular location: cytoplasm; Similar to strain R6 sequence 15903529 (7.E-79)
MKIIIQRVKKAQVSIEGQIQGKINQGLLLLVGVGPEDQEEDLDYAVRKLVNMRIFSDAEGKMNLSVKDIEGEILSISQFTLFADTKRGNRPAFTGAAKPDMASDFYDAFNQKLAQEVPVQTGIFGADMQVELVNNGPVTIILDTKKR

SEQ ID NO: 3377 - DNA, 2220 bp, Streptococcus pneumoniae
atgccgaaagaagtgaatttaacaggcgaagaagttgtcgctttaaccaaagaatatttaacggaagaggatgttcattttgtccataaggccttggtctatgctgttgaatgccacagtggtcaatatcgcaaatcaggcgagccttatatcattcaccctatccaagtggcaggtattttagctaagctaaagctggatgctgtaacagtagcttgtggattcttgcatgatgtggtggaagatacagatgcgactttggacgatttggaaagagagtttggtcctgatgtgcggatgattgttgacggagttaccaagcttggcaaggtcgagtacaaatcgatcgaggagcaattagcggaaaatcatcgcaagatgctcatggccatgtctgaggacatccgcgttattttggtcaaactgtctgaccgcttgcacaatatgcggaccctgaaacatcttcgaaaagacaagcaggagcgtatttccaaagaaaccatggaaatctatgccccgcttgcccatcgtttggggatttccagtgtcaaatgggaattagaagacttgtctttccgttatctcaatccaacggagttttacaagattacccatatgatgaaggaaaagcgcagggagcgtgaggccttggtggatgaggtagtcacaaaattagaggagtatacgacagaacgtcacttgaaagggaagatttatggtcgtcccaagcatatttactcaattttccgcaaaatgcaggacaagagaaaacggtttgaggaaatctatgatctgattgctattcgttgtattttagatacccaaagtgatgtttatgccatgcttggttacgtgcatgaattttggaaaccgatgccaggtcgcttcaaagactatatcgccaaccgcaaggccaatggttatcagtctatccatacgactgtttatggaccaaaagggccgattgaattccagattcgaaccaaggaaatgcacgaggtggctgagtacggggttgcggctcactgggcttataagaaaggtataaaggggcaagttaacagcaaggaatcagctattggaatgaactggatcaaggagatgatggagctccaagaccaggctgatgatgctaaggaatttgtggactctgttaaggaaaactatttggctgaggagatttacgtttttaccccagatggagctgtccgttcccttcccaaagattcaggaccgattgattttgcctacgaaatccataccaaggtcggtgaaaaagcaactggtgccaaggtcaatggccgcatggttccactgacaaccaagttaaagacaggggatcaggttgaaattatcgccaacccgaactcctttggacctagccgtgactggctcaatatggtcaagactagcaaggcgcgcaataagattcgccagttctttaaaaaccaagataaggaattgtctgtcaacaagggtcgtgagatgctgatggctcagttccaagaaaatggctatgtggcaaataaatttatggacaagcgccacatggatcaagttctgcaaaagaccagttacaagacagaagactccctctttgcggccattggttttggggaaatcggtgcgattaccgtctttaaccgtctgactgaaaaggaacgccgtgaggaagagcgtgccaaggccaaagctgaggcagaggagcttgtcaaaggtggcgaggtcaaggttgaaaataaagaaaccctcaaggtcaagcatgaggggggagtggttattgaaggtgcttctggtctcctagtgcggattgctaagtgttgtaaccccgtgcctggtgacgatattgttggctacattaccaagggtcgtggtgtggctattcaccgtgtggactgtatgaacctgcgtgcccaagaaaactacgagcaacgtctccttgatgtggaatgggaagaccagtaccctagctcaaataaggagtatatggcccatatcgatatctacggtctcaaccgtacaggactgttgaacgatgtactgcaagttctttcaaatacaaccaagaatatttcaacggtcaatgcccaaccaaccaaggatatgaagtttgctaatatccatgtgtccttcggtattgccaacctctctacactgaccacggttgtcgataaaattaagagtgtgccagaagtttactctgtcaaacggaccaacggc

SEQ ID NO: 3378 - protein, 740 aa, Streptococcus pneumoniae
  GTP pyrophosphokinase (relA); Cellular location: membrane; Similar to strain R6 sequence 15903530 (0.E+01)
MPKEVNLTGEEVVALTKEYLTEEDVHFVHKALVYAVECHSGQYRKSGEPYIIHPIQVAGILAKLKLDAVTVACGFLHDVVEDTDATLDDLEREFGPDVRMIVDGVTKLGKVEYKSIEEQLAENHRKMLMAMSEDIRVILVKLSDRLHNMRTLKHLRKDKQERISKETMEIYAPLAHRLGISSVKWELEDLSFRYLNPTEFYKITHMMKEKRREREALVDEVVTKLEEYTTERHLKGKIYGRPKHIYSIFRKMQDKRKRFEEIYDLIAIRCILDTQSDVYAMLGYVHEFWKPMPGRFKDYIANRKANGYQSIHTTVYGPKGPIEFQIRTKEMHEVAEYGVAAHWAYKKGIKGQVNSKESAIGMNWIKEMMELQDQADDAKEFVDSVKENYLAEEIYVFTPDGAVRSLPKDSGPIDFAYEIHTKVGEKATGAKVNGRMVPLTTKLKTGDQVEIIANPNSFGPSRDWLNMVKTSKARNKIRQFFKNQDKELSVNKGREMLMAQFQENGYVANKFMDKRHMDQVLQKTSYKTEDSLFAAIGFGEIGAITVFNRLTEKERREEERAKAKAEAEELVKGGEVKVENKETLKVKHEGGVVIEGASGLLVRIAKCCNPVPGDDIVGYITKGRGVAIHRVDCMNLRAQENYEQRLLDVEWEDQYPSSNKEYMAHIDIYGLNRTGLLNDVLQVLSNTTKNISTVNAQPTKDMKFANIHVSFGIANLSTLTTVVDKIKSVPEVYSVKRTNG

SEQ ID NO: 3379 - DNA, 168 bp, Streptococcus pneumoniae
ttgctctttgattttcatttagtattaattccaaaatccagtcaaggtaccagtgtatgtgatacgagttccaccgtttatctttcgtatcttcaatggaattggggaagtcagaaagtctttgggttacaatatggtttccgttcttctatctctccttctatcacc

SEQ ID NO: 3380 - protein, 56 aa, Streptococcus pneumoniae
  box element
MLFDFHLVLIPKSSQGTSVCDTSSTVYLSYLQWNWGSQKVFGLQYGFRSSISPSIT

SEQ ID NO: 3381 - DNA, 183 bp, Streptococcus pneumoniae
ttgaggttgcagataaagttgacgcggtttgaagagatttttgaagagtataaaaatcctcaagatactttcttctatcctttagtttataaggagaatacctatgaaaaaaactgctatttctatctttgctctcctaatgttaggagtttgctgcctgttcctattcagccagcaaagcta

SEQ ID NO: 3382 - protein, 61 aa, Streptococcus pneumoniae
  box element
MRLQIKLTRFEEIFEEYKNPQDTFFYPLVYKENTYEKNCYFYLCSPNVRSLLPVPIQPAKL

SEQ ID NO: 3383 - DNA, 678 bp, Streptococcus pneumoniae
ttgaagagattttcgaagagtattagtacattctttgagattggagctagtatgaaaatccataaaaccgtgaatcctgttgcctatgaaaatacctattatctagaaggcgaaaagcacctcatcgtcgtcgatcctggtagtcattgggaagccattcgtcagacaatcgagaagatcaacaaaccgatctgtgctattctcttgacccacgcccattatgaccatatcatgagtctggacttggttcgcgagacgtttggcaatcctcctgtctatatcgcagagagcgaagccagctggctctacactcctgtcgataatctctccggtctccctcgccacgatgatatggcagatgtggtcacaaaacctgcagaacacacctttgtctttcacgaagaataccaactagaggaatttcgttttaaggttctaccgaccccagggcactctatcggtggtgtttccctagtctttcctgatgctcatctagtcttgacgggagatgctctattccgcgaaactatcggacggaccgaccttccgactggtagcatggagcaactccttcatagtatccagacccaactcttcaccctaccaaactacgatgtctatccaggacatggtccagctactactatcgctcacgaaaaggccttcaatccctttttc

SEQ ID NO: 3384 - protein, 226 aa, Streptococcus pneumoniae
  metallo-beta-lactamase superfamily protein; Cellular location: cytoplasm; Similar to strain R6 sequence 15903533 (e-122)
MKRFSKSISTFFEIGASMKIHKTVNPVAYENTYYLEGEKHLIVVDPGSHWEAIRQTIEKINKPICAILLTHAHYDHIMSLDLVRETFGNPPVYIAESEASWLYTPVDNLSGLPRHDDMADVVTKPAEHTFVFHEEYQLEEFRFKVLPTPGHSIGGVSLVFPDAHLVLTGDALFRETIGRTDLPTGSMEQLLHSIQTQLFTLPNYDVYPGHGPATTIAHEKAFNPFF

SEQ ID NO: 3385 - DNA, 1950 bp, Streptococcus pneumoniae
ttgcattccctagtgatttttgttaagataaatgcaaatacaaatgaaagcgagaacaagatgacacgttatcaagatgatttttatgatgctatcaatggagaatggcaacagacagctgaaatcccagcagataagtctcaaacaggaggttttgttgatttagaccaggaaattgaagacctgatgctggcgacaacagacaagtggttagcaggtgaagaagtgcctgaggatgctatcttggaaaactttgtcaaataccaccgcctagttcgtgattttgacaagagagaagctgacggtatcacacctgtcttaccactccttaaagaattccaagaattggagacttttgcggattttacagctaaactagcagagtttgagcttgcaggaaaaccaaacttccttccttttggtgtatcgccagactttatggatgctagaatcaatgttctatgggctagcgctccaagcacaatcttgccagatacgacctactatgcagaagaacatcctcagcgcgaagagctcttgactctttggaaagaaagcagcgcaaatctcctcaaggcttatgatttctctgatgaagaaattgaagacttgctagaaaaaagacttgaattggaccgccgagttgcggcagtggtgctctctaatgaagaaagttcagaatatgctaaactctatcatccatattcttacgaagatttcaagaaattcgcgcctgccctacctttggatgacttcttcaaagcagttattgggcaattaccagacaaggttattgtagacgaggaacgtttctggcaagcagcagagcaattctacagtgaggaagcctggtctctccttaaagcaaccttgattttgagtgttgtcaatctttcaaccagctatttaacagaggatatccgtgttttgtctggtgcctacagccgtgccctttctggagttccagaggcaaaagataaggtcaaagcagcttatcatctagcacaagaacctttcaagcaagccctgggtctttggtacgcccgtgagaagttctctccagaagccaaggcggatgtggagaaaaaagtggcaaccatgattgatgtttataaggagcgtctgcttaagaatgactggctcactccagaaacctgtaaacaggctatcgtgaagctcaatgtgatcaaaccttatattggctatccagaagaattgcctgcacgttacaaggataaggtagtgaatgaaactgccagtctttttgagaatgctctagcctttgcgcgtgtggaaatcaagcacagttggagtaagtggaaccagcctgtagattataaggaatggggcatgcctgctcatatggtcaatgcctactacaatcctcagaagaacctgattgtctttccagcggccattttacaggcgcctttctatgacttgcatcagtcatcttctgctaactacggtggtattggggcagtgattgcccatgaaatttcccacgcctttgatactaacggggcttcctttgacgaaaatggtagcctcaaggattggtggacagagagcgactatgctgccttcaaggagaaaacacaaaaagtcattgaccaatttgatggacaggattcttatggagcaaccattaacggtaaattgactgtatcagaaaacgtggctgacttgggaggaatcgcagcagcgcttgaagcagctaagagagaagcagacttctcagcagaagagttcttctacaacttcggtcgcatctggcgcatgaaaggtcgaccagaatttatgaaacttttggctagcgtcgatgtgcacgcaccagccaaactccgtgtcaatgtgcaagtaccaaacttcgacgatttctttacaacctatgatgtcaaagaaggagacggaatgtggcgttcaccagaggagcgcgtgattatttgg

SEQ ID NO: 3386 - protein, 650 aa, Streptococcus pneumoniae
  endopeptidase O (pepO); Cellular location: cytoplasm; Similar to strain R6 sequence 15903534 (0.E+01)
MHSLVIFVKINANTNESENKMTRYQDDFYDAINGEWQQTAEIPADKSQTGGFVDLDQEIEDLMLATTDKWLAGEEVPEDAILENFVKYHRLVRDFDKREADGITPVLPLLKEFQELETFADFTAKLAEFELAGKPNFLPFGVSPDFMDARINVLWASAPSTILPDTTYYAEEHPQREELLTLWKESSANLLKAYDFSDEEIEDLLEKRLELDRRVAAVVLSNEESSEYAKLYHPYSYEDFKKFAPALPLDDFFKAVIGQLPDKVIVDEERFWQAAEQFYSEEAWSLLKATLILSVVNLSTSYLTEDIRVLSGAYSRALSGVPEAKDKVKAAYHLAQEPFKQALGLWYAREKFSPEAKADVEKKVATMIDVYKERLLKNDWLTPETCKQAIVKLNVIKPYIGYPEELPARYKDKVVNETASLFENALAFARVEIKHSWSKWNQPVDYKEWGMPAHMVNAYYNPQKNLIVFPAAILQAPFYDLHQSSSANYGGIGAVIAHEISHAFDTNGASFDENGSLKDWWTESDYAAFKEKTQKVIDQFDGQDSYGATINGKLTVSENVADLGGIAAALEAAKREADFSAEEFFYNFGRIWRMKGRPEFMKLLASVDVHAPAKLRVNVQVPNFDDFFTTYDVKEGDGMWRSPEERVIIW

SEQ ID NO: 3387 - DNA, 720 bp, Streptococcus pneumoniae
atgatacgtatcgaaaacctcagtgtctcctacaaagaaacgttggcacttaaggatatttcactagtgctccatggaccaacaattaccggcatcattggtccaaacggcgctgggaaatcaacactattaaaaggtatgttgggaattatcccacatcaaggtcaggcatttctcgatgacaaggaagttaaaaaatccttacaccgaattgcctatgtcgaacaaaaaatcaatatcgactacaactttcccatcaaggtcaaggaatgcgtctcgttaggactatttccctctattcctctctttcgaagtttaaaggctaaacattggaagaaagtgcaagaggcccttgaaatcgtcggcctagctgactacgctgaacgtcaaattagtcaactgtctggaggtcaattccagcgggtcttgattgccagatgtttggtgcaggaagccgactatatcctcttggatgaaccctttgctgggattgactctgtcagtgaggaaatcatcatgaatacgctgagagatttgaaaaaagctgggaagacggttctcatcgttcaccacgacctcagcaagattccccactacttcgatcaagtcttacttgtcaatcgagaagtgattgcctttggtccaacaaaagaaacttttaccgaaaccaatctaaaagaagcttacggtaatcaactctttttcaatggaggtgaccta

SEQ ID NO: 3388 - protein, 240 aa, Streptococcus pneumoniae
  manganese ABC transporter, ATP-binding protein (psaB); Cellular location: cytoplasm; Similar to strain R6 sequence 15903535 (e-135)
MIRIENLSVSYKETLALKDISLVLHGPTITGIIGPNGAGKSTLLKGMLGIIPHQGQAFLDDKEVKKSLHRIAYVEQKINIDYNFPIKVKECVSLGLFPSIPLFRSLKAKHWKKVQEALEIVGLADYAERQISQLSGGQFQRVLIARCLVQEADYILLDEPFAGIDSVSEEIIMNTLRDLKKAGKTVLIVHHDLSKIPHYFDQVLLVNREVIAFGPTKETFTETNLKEAYGNQLFFNGGDL

SEQ ID NO: 3389 - DNA, 846 bp, Streptococcus pneumoniae
atgattgcagaatttatcgatggattgcaaaaattccatttcctacaaaatgccttgataacagctattgtcgtcgggattgtagctggagctgtgggatgtttcattattctacgcgggatgtcactcatgggagatgccatttcacatgctgtcttaccaggtgtagccctatccttcatcttgggccttgacttctttatcggagccattgtctttggattgctagctgccatcatcattacctacatcaaaggaaactcgattatcaaaagcgataccgccatcggcattaccttttcttctttcttagccctcggtatcatcttgattggtgtcgctaaaagttcaactgaccttttccatatcctttttggtaatatcctggccgtccaagatacggatatgtttattactatgggtgtgggggcagctatcctcttgttaatctggattttcttcaagcaactcttgataacttcctttgatgaactcttggctaaagccatgggaatgcctgtcaatttctatcactaccttctcatggtactcctgactctcgtgtctgtgacagccatgcaaagtgtcggaactatcctgattgtagccatgctgattaccccagctgcaactgcttatctgtatgctaatagtctgaaaagtatgattttcctttcctcaaccttcggagctactgcttcagttttgggactctttattggctatagttttaatgttgcggcaggttctagtatcgtgcttacagctgctagtttctttctcattagcttctttatcgctcccaaacaacgatatttgaaactgaaaaataaacatttgttaaaa

SEQ ID NO: 3390 - protein, 282 aa, Streptococcus pneumoniae
  manganese ABC transporter, permease protein, putative FRAMESHIFT (psaC); Cellular location: membrane; Similar to strain R6 sequence 15903536 (e-152)
MIAEFIDGLQKFHFLQNALITAIVVGIVAGAVGCFIILRGMSLMGDAISHAVLPGVALSFILGLDFFIGAIVFGLLAAIIITYIKGNSIIKSDTAIGITFSSFLALGIILIGVAKSSTDLFHILFGNILAVQDTDMFITMGVGAAILLLIWIFFKQLLITSFDELLAKAMGMPVNFYHYLLMVLLTLVSVTAMQSVGTILIVAMLITPAATAYLYANSLKSMIFLSSTFGATASVLGLFIGYSFNVAAGSSIVLTAASFFLISFFIAPKQRYLKLKNKHLLK

SEQ ID NO: 3391 - DNA, 927 bp, Streptococcus pneumoniae
atgaaaaaattaggtacattactcgttctctttctttctgcaatcattcttgtagcatgtgctagcggaaaaaaagatacaacttctggtcaaaaactaaaagttgttgctacaaactcaatcatcgctgatattactaaaaatattgctggtgacaaaattgaccttcatagtatcgttccgattgggcaagacccacacgaatacgaaccacttcctgaagacgttaagaaaacttctgaggctaatttgattttctataacggtatcaaccttgaaacaggtggcaatgcttggtttacaaaattggtagaaaatgccaagaaaactgaaaacaaagactacttcgcagtcagcgacggcgttgatgttatctaccttgaaggtcaaaatgaaaaaggaaaagaagacccacacgcttggcttaaccttgaaaacggtattatttttgctaaaaatatcgccaaacaattgagcgccaaagaccctaacaataaagaattctatgaaaaaaatctcaaagaatatactgataagttagacaaacttgataaagaaagtaaggataaatttaataagatccctgctgaaaagaaactcattgtaaccagcgaaggagcattcaaatacttctctaaagcctatggtgtcccaagtgcttacatctgggaaatcaatactgaagaagaaggaactcctgaacaaatcaagaccttggttgaaaaacttcgccaaacaaaagttccatcactctttgtagaatcaagtgtggatgaccgtccaatgaaaactgtttctcaagacacaaacatcccaatctacgctcaaatctttactgactctatcgcagaacaaggtaaagaaggcgacagctactacagcatgatgaaatacaaccttgacaagattgctgaaggattggcaaaa

SEQ ID NO: 3392 - protein, 309 aa, Streptococcus pneumoniae
  manganese ABC transporter, manganese-binding adhesion liprotein (psaA); Cellular location: lipoprotein; Similar to strain R6 sequence 15903537 (e-177)
MKKLGTLLVLFLSAIILVACASGKKDTTSGQKLKVVATNSIIADITKNIAGDKIDLHSIVPIGQDPHEYEPLPEDVKKTSEANLIFYNGINLETGGNAWFTKLVENAKKTENKDYFAVSDGVDVIYLEGQNEKGKEDPHAWLNLENGIIFAKNIAKQLSAKDPNNKEFYEKNLKEYTDKLDKLDKESKDKFNKIPAEKKLIVTSEGAFKYFSKAYGVPSAYIWEINTEEEGTPEQIKTLVEKLRQTKVPSLFVESSVDDRPMKTVSQDTNIPIYAQIFTDSIAEQGKEGDSYYSMMKYNLDKIAEGLAK

SEQ ID NO: 3393 - DNA, 102 bp, Streptococcus pneumoniae
atgagctggcgttttttctatgcccatatttccggtcaaatcattggaaaattccgactgtttcagctaaaatggaagaaaaaagattggagtatcctatgg

SEQ ID NO: 3394 - protein, 34 aa, Streptococcus pneumoniae
  hypothetical protein
MSWRFFYAHISGQIIGKFRLFQLKWKKKDWSILW

SEQ ID NO: 3395 - DNA, 501 bp, Streptococcus pneumoniae
ttggagtatcctatggtaacttttctcggaaatcctgtgagctttacaggtaaacaactacaagtcggcgacaaggcgcttgatttttctcttactacaacagatctttctaaaaaatctctggctgattttgatggcaagaaaaaagtcttgagtgtcgttccttctatcgatacaggcatctgctcaactcaaacacgtcgttttaatgaagaattggctggactggacaacacggtcgtattgactgtttcaatggacctaccttttgctcaaaaacgttggtgcggtgctgaaggccttgacaatgccattatgctttcagactactttgaccattctttcgggcgcgattatgccctcttgatcaacgaatggcacctattagcacgcgcagtctttgtcctcgatactgacaatacgattcgctacgttgaatacgtggataatatcaattctgagccaaacttcgaagccgcaattgcagctgctaaagcccta

SEQ ID NO: 3396 - protein, 167 aa, Streptococcus pneumoniae
  thiol peroxidase (psaD); Cellular location: cytoplasm; Similar to strain R6 sequence 15903538 (1.E-96)
MEYPMVTFLGNPVSFTGKQLQVGDKALDFSLTTTDLSKKSLADFDGKKKVLSVVPSIDTGICSTQTRRFNEELAGLDNTVVLTVSMDLPFAQKRWCGAEGLDNAIMLSDYFDHSFGRDYALLINEWHLLARAVFVLDTDNTIRYVEYVDNINSEPNFEAAIAAAKAL

SEQ ID NO: 3397 - DNA, 2772 bp, Streptococcus pneumoniae
atgccagtgtcaaggatgtggtgctcaaccagcatcctcaggatattgacagtttggagtactagcatgatcaagcgaaaaacttattggaaggacttagttcagtccttcacaggctccaaggggcgttttttatccatcttgatcctgatgatgttgggatctctagccttagtaggcctcaaagtaaccagtcccaacatggaggcgacagctaatgcttatttaacaactgctcaaaccttggatttggcagtcatgtctaactatggcttggatcaagcagaccaagaagaactaaaacagacggagggcgcagaggtcgagtttggctatttgacagatgtgactatggataatgggcaggatgccattcggctgtactccaaaccagagcgaatttcaacctttcagctaagaaagggacgacttcctcagtcagacaaggaaatcgctttggccactcatttgcaaggccaatacagcgtgggacaggagattagttttaaagaaaaagaagagggtcattcctctttaaaagaccatacttataccattactggttttgtggattcggctgaaatcctctcccagcgagatatgggctacgcaggaagtggaagtgggactctgacagcctatggggtgattttacctagtcaatttgatcagaaagtctacaatatagctcgtttgaaatatcaagatttagcgggtttaaatgccttttcatcagcttatgaagaaaaatccaagcaacatcaagaagagcttgaacaaattttatcagataatggcaaggtacgtctgcaacttttgaaaaaagaaggacaagagtctctagacaaggggcaagagacccttgacaaggctcagactaatttgcaggaaggcaagcgtcgtttagcagctgctcaagctcgtatacaggctcaagaaagtcaactagccttgtttcctcaagttcagagagagcaggctagtgctcaacttacccaagccaagcaggaattgggcaaggaagaggacaaactaaagcaagctgaacaaaatctagcccaagaaaaggaaaaattagaaaaacatcagcaagtcttggatgatttggcggagccaaggtatcaggtttataatcgtcagaccatgccaggtggtcagggctatcttatgtatagcaatgcttcatccagtattcgagcagtgggcaatatctttcctgtggtactttatgccgtagcagccatggtgacctttacgaccatgactcgctttgtagacgaagagcgaactcatgcagggatttttaaggccttgggttatcgtagtaaggatattatcgccaagtttctcctttatggactagtagctgggactgtcggaacggctctaggtagtatacttggtcattatttgctagccagtgtaatttcaagtgtcattacaaaaggcatggtggtgggagaaactcagattcagttctattggacctatagcttactagcttttgtcttgagcttgttggcgagtgtgttaccagcctatctggtggcttggagggaacttcatgacgaagcagcccagcttctacttcctaaacctcctgtcaaaggagctaaaatcttattggagcgtatcggttttatctggcgtcgtctcagttttactcataaggtaacagcccgcaacatctttcgttataagcagagaatgttgatgacaatctttggtgtggcaggttctgtagctctgctctttgcaggtttgggaatccaatcttctgtagcaggagttccgtctaaacagtttcaacaaatccaacagtatcagatgcttgtctctgaaaatcctagtgcgaccaatcaggacaaggtagagctagcagaagtgttgaaagggcaggagatactagcctaccagaaaatctattctaaagcgctatacaaggatttcaaaggcaaagctggtcttcaaaacattactcttatgatgatagagaaggaagatttgactccctttatccatcttcaacatcatcagcaggagctgacattaaaagatggcatcgttattacagctaaactcgcccagctggcaggtgtcaaggttgggcagactttagaaattgaaggtaaggaactaaaggtcgttgctattactgagaactacgttggtcactttatttatatgagtcaggctagctatgagcaactttacggacagctaccccaagccaacacttatctggtctcattaagggataccagtgcaactagtatcgaaagtcaggcgggcttgcttatgaatcaatctgcggtgtccagcgttgtccaaaatgcttcagccattcgactcttcgactctatcgctagctcactcaatcagaccatgaccatcttggtcatcgtatcggttctattagctattgtcatcctttacaatctgaccaatatcaacgtagctgagagaatccgtgaactctccactatcaaggttcttggttttcataataatgaagtcaccctctacatttaccgtgagacgattgtgctgtcccttgtgggaatcgtacttggtctgatagctggtttctatttacaccaatttttgattcaaatgatttcgcctgcgactattctcttttatccgcaggtaggctgggaagtctatgtaatcccagtggcagcagtaagcatcattttgaccttgcttggtttcttcgtcaattattatctgagaaaggttgatatgttagaagccctgaaatctgtagag

SEQ ID NO: 3398 - protein, 924 aa, Streptococcus pneumoniae
  hypothetical protein; Cellular location: membrane; Similar to strain R6 sequence 15903539 (0.E+01)
MPVSRMWCSTSILRILTVWSTSMIKRKTYWKDLVQSFTGSKGRFLSILILMMLGSLALVGLKVTSPNMEATANAYLTTAQTLDLAVMSNYGLDQADQEELKQTEGAEVEFGYLTDVTMDNGQDAIRLYSKPERISTFQLRKGRLPQSDKEIALATHLQGQYSVGQEISFKEKEEGHSSLKDHTYTITGFVDSAEILSQRDMGYAGSGSGTLTAYGVILPSQFDQKVYNIARLKYQDLAGLNAFSSAYEEKSKQHQEELEQILSDNGKVRLQLLKKEGQESLDKGQETLDKAQTNLQEGKRRLAAAQARIQAQESQLALFPQVQREQASAQLTQAKQELGKEEDKLKQAEQNLAQEKEKLEKHQQVLDDLAEPRYQVYNRQTMPGGQGYLMYSNASSSIRAVGNIFPVVLYAVAAMVTFTTMTRFVDEERTHAGIFKALGYRSKDIIAKFLLYGLVAGTVGTALGSILGHYLLASVISSVITKGMVVGETQIQFYWTYSLLAFVLSLLASVLPAYLVAWRELHDEAAQLLLPKPPVKGAKILLERIGFIWRRLSFTHKVTARNIFRYKQRMLMTIFGVAGSVALLFAGLGIQSSVAGVPSKQFQQIQQYQMLVSENPSATNQDKVELAEVLKGQEILAYQKIYSKALYKDFKGKAGLQNITLMMIEKEDLTPFIHLQHHQQELTLKDGIVITAKLAQLAGVKVGQTLEIEGKELKVVAITENYVGHFIYMSQASYEQLYGQLPQANTYLVSLRDTSATSIESQAGLLMNQSAVSSVVQNASAIRLFDSIASSLNQTMTILVIVSVLLAIVILYNLTNINVAERIRELSTIKVLGFHNNEVTLYIYRETIVLSLVGIVLGLIAGFYLHQFLIQMISPATILFYPQVGWEVYVIPVAAVSIILTLLGFFVNYYLRKVDMLEALKSVE

SEQ ID NO: 3399 - DNA, 708 bp, Streptococcus pneumoniae
gtgggtctgatggcttatattgagatgaaacactgttacaagcgttatcaggttggggacacggagattgtggccaattgtgatgtgaattttgagattgaaaagggggagctggttattatccttggtgcttcaggtgcaggcaagtcaacagttcttaaccttcttgggggaatggataccaatgatgaaggggaaatctggattgatggtgttaatattgcggattatagttcccaccagcgcaccaattaccgtagaaatgatgtggggtttgtttttcagttttataatctagtttctaatctgacagctaaggaaaatgtggaactggcttctgaaattgtgacagatgccttgaatcctgatcaggccttgacagatgtaggtctggctcatcgtctcaataactttccagcccagctttctggaggggagcaacagcgagtctccattgcacgcgcggtagccaaaaatcctaaaattctcctttgtgatgaaccgactggagccttggattatcagacgggcaagcaggttttgaaaattctccaagacatgtctcgtcaaaagggagcgacggtgatcatcgtgactcataatggagctttggcgcccattgctgatcgcgtgattcaaatgcacgatgccagtgtcaaggatgtggtgctcaaccagcatcctcaggatattgacagtttggagtac

SEQ ID NO: 3400 - protein, 236 aa, Streptococcus pneumoniae
  ABC transporter, ATP-binding protein; Cellular location: cytoplasm; Similar to strain R6 sequence 15903540 (e-130)
MGLMAYIEMKHCYKRYQVGDTEIVANCDVNFEIEKGELVIILGASGAGKSTVLNLLGGMDTNDEGEIWIDGVNIADYSSHQRTNYRRNDVGFVFQFYNLVSNLTAKENVELASEIVTDALNPDQALTDVGLAHRLNNFPAQLSGGEQQRVSIARAVAKNPKILLCDEPTGALDYQTGKQVLKILQDMSRQKGATVIIVTHNGALAPIADRVIQMHDASVKDVVLNQHPQDIDSLEY

SEQ ID NO: 3401 - DNA, 2409 bp, Streptococcus pneumoniae
atgataaggaataaaaaacaagattatgtactggcctacaagcaaccagcttcaaccacttacatgggttgggaagaagaagctttaccgataggcaatggttctttaggagcaaaagtatttggccttataggggctgaacggattcaatttaatgaaaaaagtctctggtctggaggtccacttcctgatagttcagattatcagggtggaaatcttcaggatcagtatgtttttttagctgagattcggcaggctttggagaagagagattacaatctggctaaggaactggctgagcagcacctaattgggccaaaaacgagtcaatatgggacctatctgtcttttggggatattcacattgagttcagccagcaaggtacgactttgtctcaggtgacggactatcagagacagctgaatattagtaaggcacttgcgacgacttcttatgtctataagggaacgcgatttgaacgtaaagcttttgcgagttttccagatgatctcttggttcaatgttttactaaggaagggttggaaactctagattttactatagaactatccttgacctgtgatttggcttctgatggaaagtatgagcaggaaaaatctgattacaaggagtgtaagttggatattactgattctcatatcttgatgaagggaagagttaaggataatgatctgcggtttgctagttatctagcttgggaaacggatggagatattagagtttggtcagatagggttcagatatcaggagccagttatgccaatctcttcttggccgctaagacggattttgcccaaaatcctgctagcaattatcgcaagaaactagatttagagcaacaggtgatagacttggtggacacagctaaagaaaagggctatacccaattgaaatcaaggcatatcgaggactaccaagccttattccagcgtgttcaattggatttggaagctgatgttgacgcatccactacagatgatttgttaaaaaattataagccacaagaagggcaggctttggaggagctgttcttccagtatggacggtatttattgattagttcgtccagagactgcccagatgctctaccagctaacctacagggagtctggaatgcggtcgacaatcctccttggaattcggactatcacttaaatgtcaatctgcagctgaattattggccagcctatgttaccaatctcctagagacggtctttccagtcatcaactatgtagatgatttgcgtgtctatggtcgtctagcggctgtaaagtatgcaggaatcgtctctcagaaaggtgaggagaatggttggttggttcatactcaagcgactccctttggttggacggcacctggttgggattactattggggttggtcaccagctgccaatgcgtggatgatgcaaaccgtttatgaagcctatttattttatagggaccaagactatctcagggagaaaatttatcccatgttgagggaaacggttcgtttttggaatgcctttttacataaggatcagcaggcgcagcgttgggtgtcttctccgtcttattccccagaacatgggccgatttcgattggcaatacctatgaccaatctctgatttggcagttatttcatgattttattcaggctgctcaggaattgggactggatgaggacttgttgactgaggttaaggagaagtctgatttactaaatcctttgcaaatcactcaatctggtcgaatcagggagtggtatgaggaggaagagcagtattttcaaaatgagaaagtggaggcccagcatcggcacgcttcccatctagtgggactctatcctggcaatctctttagctacaagggacaagagtatattgaagcggcgcgtgctagcctcaatgatcgtggagatggcggcacaggctggtccaaggctaataagatcaatctctgggcgcgtttgggagatggcaatcgagcccataaattattggcagagcagttaaagacatccaccttgcaaaatctttggtgtagccatcctccttttcagatagatggtaattttggtgctactagtggcatggcagaaatgttactccagtctcatgcagcttatctggtacctctagctgccctacctgatgcttggtcaacaggttctgtttcaggcttaatggcacgtggacattttgaagtgagcatgagctgggaagataaaaaactcttacagttgaccattttatcaaggagtggaggagatttgcgagtttcttatccagatattgagaagagtgtgattaaaatgaatcaagaaaaaataaaagcgaaatgcatggggaaagattgtatttcggtggcaacagcagaaggtgatcttgttcaattttatttt

SEQ ID NO: 3402 - protein, 803 aa, Streptococcus pneumoniae
  conserved hypothetical protein; Cellular location: cytoplasm; Feature of note: RGD motif; Similar to strain R6 sequence 15903541 (0.E+01)
MIRNKKQDYVLAYKQPASTTYMGWEEEALPIGNGSLGAKVFGLIGAERIQFNEKSLWSGGPLPDSSDYQGGNLQDQYVFLAEIRQALEKRDYNLAKELAEQHLIGPKTSQYGTYLSFGDIHIEFSQQGTTLSQVTDYQRQLNISKALATTSYVYKGTRFERKAFASFPDDLLVQCFTKEGLETLDFTIELSLTCDLASDGKYEQEKSDYKECKLDITDSHILMKGRVKDNDLRFASYLAWETDGDIRVWSDRVQISGASYANLFLAAKTDFAQNPASNYRKKLDLEQQVIDLVDTAKEKGYTQLKSRHIEDYQALFQRVQLDLEADVDASTTDDLLKNYKPQEGQALEELFFQYGRYLLISSSRDCPDALPANLQGVWNAVDNPPWNSDYHLNVNLQLNYWPAYVTNLLETVFPVINYVDDLRVYGRLAAVKYAGIVSQKGEENGWLVHTQATPFGWTAPGWDYYWGWSPAANAWMMQTVYEAYLFYRDQDYLREKIYPMLRETVRFWNAFLHKDQQAQRWVSSPSYSPEHGPISIGNTYDQSLIWQLFHDFIQAAQELGLDEDLLTEVKEKSDLLNPLQITQSGRIREWYEEEEQYFQNEKVEAQHRHASHLVGLYPGNLFSYKGQEYIEAARASLNDRGDGGTGWSKANKINLWARLGDGNRAHKLLAEQLKTSTLQNLWCSHPPFQIDGNFGATSGMAEMLLQSHAAYLVPLAALPDAWSTGSVSGLMARGHFEVSMSWEDKKLLQLTILSRSGGDLRVSYPDIEKSVIKMNQEKIKAKCMGKDCISVATAEGDLVQFYF

SEQ ID NO: 3403 - DNA, 690 bp, Streptococcus pneumoniae
atggtaaaattggtttttgctcgccacggtgagtctgaatggaacaaagctaaccttttcactggttgggctgatgttgatttgtctgaaaaaggtacacaacaagcgattgacgctggtaaattgatcaaagaagctggtatcgaatttgaccaagcttacacttcagtattgaaacgtgctatcaaaacaactaacttggctcttgaagcttctgaccaattgtgggttccagttgaaaaatcatggcgcttgaacgaacgtcactacggtggtttgactggtaaaaacaaagctgaagctgctgaacaatttggtgatgagcaagttcacatctggcgtcgttcatacgatgtattgcctccaaacatggaccgtgatgatgagcactcagctcacacagaccgtcgttacgcttcacttgacgactcagttatcccagatgctgaaaacttgaaagtgactttggaacgtgctcttccattctgggaagataaaatcgctccagctcttaaagatggtaaaaacgtattcgtaggagctcacggtaactcaatccgtgcccttgtaaaacacatcaaaggtttgtcagatgacgagatcatggacgtggaaatccctaacttcccaccattggtattcgaattcgacgaaaaattgaacgtcgtttctgaatactaccttggaaaa

SEQ ID NO: 3404 - protein, 230 aa, Streptococcus pneumoniae
  phosphoglycerate mutase (gpmA); Cellular location: cytoplasm; Feature of note: secreted; Similar to strain R6 sequence 15903542 (e-134)
MVKLVFARHGESEWNKANLFTGWADVDLSEKGTQQAIDAGKLIKEAGIEFDQAYTSVLKRAIKTTNLALEASDQLWVPVEKSWRLNERHYGGLTGKNKAEAAEQFGDEQVHIWRRSYDVLPPNMDRDDEHSAHTDRRYASLDDSVIPDAENLKVTLERALPFWEDKIAPALKDGKNVFVGAHGNSIRALVKHIKGLSDDEIMDVEIPNFPPLVFEFDEKLNVVSEYYLGK

SEQ ID NO: 3405 - DNA, 186 bp, Streptococcus pneumoniae
atggaaaataatgactcgtttactaaactaaaagagtcaactcaaaaattattcgatgcgcagaaaaaaaggttaaataatgaagatagaatagaaacaaccaaaaacaatgtgattgccaaacattgtcaaacagtcctttcctttttggttttgactagcttttttgtgaaaaattgtgtaaaa

SEQ ID NO: 3406 - protein, 62 aa, Streptococcus pneumoniae
  hypothetical protein; Cellular location: membrane; Similar to strain R6 sequence 15903543 (9.E-32)
MENNDSFTKLKESTQKLFDAQKKRLNNEDRIETTKNNVIAKHCQTVLSFLVLTSFFVKNCVK

SEQ ID NO: 3407 - DNA, 222 bp, Streptococcus pneumoniae
gtgcgtattgattcaatcgcatcgtctgttacaaccggtgtatcgaaagtgattgtttcttttgaactattggatgttgctactgtcttctcatcattacttgttgaagtattctttgaactttatgttccacatgcaactagaagagaaagagataatagagctactcctataccgataaacttttttgttcttttcatgctaaaataccttttattcttc

SEQ ID NO: 3408 - protein, 74 aa, Streptococcus pneumoniae
  hypothetical protein; Cellular location: membrane
MRIDSIASSVTTGVSKVIVSFELLDVATVFSSLLVEVFFELYVPHATRRERDNRATPIPINFFVLFMLKYLLFF

SEQ ID NO: 3409 - DNA, 258 bp, Streptococcus pneumoniae
gtgggaggaattttacttcttattggtccttttgtcttgttgggaatagcggtaaacacagctgctacaactcttaatggaggagctactgcaggggctttttcaggtgtagccttactcttgaatgccttgaagattgcaaatcttgttcttggtatcattgctattgtttactataaaggagataagcgtgtaggtgcagctccgtctgtactaatgattgtttctggtggagttagtctcattctattccgttct

SEQ ID NO: 3410 - protein, 86 aa, Streptococcus pneumoniae
  hypothetical protein; Cellular location: membrane; Similar to strain R6 sequence 15903544 (1.E-19)
MGGILLLIGPFVLLGIAVNTAATTLNGGATAGAFSGVALLLNALKIANLVLGIIAIVYYKGDKRVGAAPSVLMIVSGGVSLILFRS

SEQ ID NO: 3411 - DNA, 2790 bp, Streptococcus pneumoniae
atgaaactcaaagacacccttaatcttgggaaaactgaattcccaatgcgtgcaggccttcctaccaaagagccagtttggcaaaaggaatgggaagatgcaaaactttatcaacgtcgtcaagaattgaaccaaggaaaacctcatttcaccttgcatgatggccctccatacgctaacggaaatatccacgttggacatgctatgaacaagatttcaaaagatatcattgttcgttctaagtctatgtcaggattttacgcaccatttattcctggttgggatactcatggtctgccaatcgagcaagtcttgtcaaaacaaggtgtcaaacgtaaagaaatggacttggttgagtacttgaaactttgccgtgagtacgctctttctcaagtagataaacaacgtgaagattttaaacgtttgggtgtttctggtgactgggaaaatccatatgtgaccttgactcctgactatgaagcagctcaaattcgtgtatttggtgagatggctaataagggttatatctaccgtggtgctaagccagtttactggtcatggtcatctgagtcagcacttgctgaagcagagattgaataccatgacttggtttcaacttccctttactatgccaacaaggtaaaagatggcaaaggagttctagatacagatacttatatcgttgtctggacaacgactccatttaccatcacagcttctcgtggtttgacggttggtgcagatattgattacgttttggttcaacctgctggtgaagctcgtaagtttgtcgttgctgctgaattattgactagcttgtctgagaaatttggctgggctgatgttcaagttttggaaacttaccgtggccaagaactcaaccacatcgtaacagaacacccatgggatacagctgtagaagagttggtaattcttggtgaccacgttacgactgactctggtacaggtattgtccatacagcccctggttttggtgaggacgattacaatgttggtattgctaataatcttgaagtcgcagtgactgttgatgaacgtggtatcatgatgaagaatgctggtcctgaatttgaaggtcaattctatgaaaaggtagttccaactgttattgaaaaacttggtaacctccttcttgcccaagaagaaatctctcactcatatccatttgactggcgtactaagaaaccaatcatctggcgtgcagttccacaatggtttgcctcagtttctaaattccgtcaagaaatcttggacgaaattgaaaaagtgaaattccactcagaatggggtaaagtccgtctttacaatatgatccgtgaccgtggtgactgggttatctctcgtcaacgtgcttggggtgttccacttcctatcttctacgctgaagatggtacagctatcatggtagctgaaactattgaacacgtagctcaactttttgaagaatatggttcaagcatttggtgggaacgtgatgccaaagacctcttgccagaaggatttactcatccaggttcaccaaacggcgagttcaaaaaagaaactgatatcatggacgtttggtttgactcaggttcatcatggaatggagtggtggtaaaccgtcctgaattgacttacccagccgacctttacctagaaggttctgaccaataccgtggttggtttaactcatcacttatcacatctgttgccaaccatggcgtagcaccttacaaacaaatcttgtcacaaggttttgcccttgatggtaaaggtgagaagatgtctaaatctcttggaaatactattgctccaagcgatgttgaaaaacaattcggtgctgaaatcttgcgtctctgggtaacaagtgttgactcaagcaatgacgtgcgtatctctatggatatcttgagccaagtttctgaaacttaccgtaagattcgtaacactcttcgtttcttgattgccaatacatctgactttaacccagctcaagatacagtcgcttacgatgagcttcgttcagttgataagtacatgacgattcgctttaaccagcttgtcaagaccattcgtgatgcctatgcagactttgaattcttgacgatctacaaggccttggtgaactttatcaacgttgacttgtcagccttctaccttgattttgccaaagatgttgtttacattgaaggtgccaaatcactggaacgccgtcaaatgcagactgtcttctatgacattcttgtcaaaatcaccaaactcttgacaccaatccttcctcacactgcggaagaaatctggtcatatcttgagtttgaaacagaagacttcgtccaattgtcagaattaccagaagttcaaacttttgctaaccaagaagaaatcttggatacatgggcagccttcatggactttcgtggacaagcacaaaaagccttggaagaagctcgtaatgcaaaagttatcggtaaatcacttgaagcacacttgacagtttatccaaatgaagttgtgaaaactctactcgaagcagtaaacagcaatgtagcacaacttttgatcgtgtctgagttgaccatcgcagaaggaccagctccggaagctgcccttagcttcgaagatgtagccttcacagttgaacgtgctactggtgaagtatgtgaccgttgccgtcgtatcgacccaacaacagcagaacgcagctaccaggcagttatctgtgaccactgtgcaagcatcgtagaagaaaactttgcggaagcagtcgcagaaggatttgaagagaaa

SEQ ID NO: 3412 - protein, 930 aa, Streptococcus pneumoniae
  isoleucyl-tRNA synthetase (ileS); Cellular location: cytoplasm; Similar to strain R6 sequence 15903545 (0.E+01)
MKLKDTLNLGKTEFPMRAGLPTKEPVWQKEWEDAKLYQRRQELNQGKPHFTLHDGPPYANGNIHVGHAMNKISKDIIVRSKSMSGFYAPFIPGWDTHGLPIEQVLSKQGVKRKEMDLVEYLKLCREYALSQVDKQREDFKRLGVSGDWENPYVTLTPDYEAAQIRVFGEMANKGYIYRGAKPVYWSWSSESALAEAEIEYHDLVSTSLYYANKVKDGKGVLDTDTYIVVWTTTPFTITASRGLTVGADIDYVLVQPAGEARKFVVAAELLTSLSEKFGWADVQVLETYRGQELNHIVTEHPWDTAVEELVILGDHVTTDSGTGIVHTAPGFGEDDYNVGIANNLEVAVTVDERGIMMKNAGPEFEGQFYEKVVPTVIEKLGNLLLAQEEISHSYPFDWRTKKPIIWRAVPQWFASVSKFRQEILDEIEKVKFHSEWGKVRLYNMIRDRGDWVISRQRAWGVPLPIFYAEDGTAIMVAETIEHVAQLFEEYGSSIWWERDAKDLLPEGFTHPGSPNGEFKKETDIMDVWFDSGSSWNGVVVNRPELTYPADLYLEGSDQYRGWFNSSLITSVANHGVAPYKQILSQGFALDGKGEKMSKSLGNTIAPSDVEKQFGAEILRLWVTSVDSSNDVRISMDILSQVSETYRKIRNTLRFLIANTSDFNPAQDTVAYDELRSVDKYMTIRFNQLVKTIRDAYADFEFLTIYKALVNFINVDLSAFYLDFAKDVVYIEGAKSLERRQMQTVFYDILVKITKLLTPILPHTAEEIWSYLEFETEDFVQLSELPEVQTFANQEEILDTWAAFMDFRGQAQKALEEARNAKVIGKSLEAHLTVYPNEVVKTLLEAVNSNVAQLLIVSELTIAEGPAPEAALSFEDVAFTVERATGEVCDRCRRIDPTTAERSYQAVICDHCASIVEENFAEAVAEGFEEK

SEQ ID NO: 3413 - DNA, 159 bp, Streptococcus pneumoniae
ttgattcaataccgggatttgaagcaccgcaagaatctgttacaattttataagaaatattctgagaacaatatcttatccttatatttccagcgagcaggagatggtgtgagtcctgtaatccctattgataagattatcctctcaaaaactcaagtc

SEQ ID NO: 3414 - protein, 53 aa, Streptococcus pneumoniae
  hypothetical protein; Cellular location: cytoplasm; Similar to strain R6 sequence 15903546 (2.E-22)
MIQYRDLKHRKNLLQFYKKYSENNILSLYFQRAGDGVSPVIPIDKIILSKTQV

SEQ ID NO: 3415 - DNA, 798 bp, Streptococcus pneumoniae
gtgaggaatagaatgccaattacatcattagaaataaaggacaagacttttggaactcgattcagaggttttgatccagaagaagtcgatgaatttttagatattgtggttcgtgattacgaagatcttgtgcgtgcgaatcatgataaaaatttgcgtattaagagtttagaagagcgtttgtcttactttgatgaaataaaagattcattgagccagtctgtattgattgctcaggatacagctgagagagtgaaacaggcggcgcatgaacgttcaaacaatatcattcatcaagcagagcaagatgcgcaacgcttgttggaagaagctaaatataaggcaaacgagattcttcgtcaagcaactgataatgctaagaaagtcgctgttgaaacagaagaattgaagaacaagagccgtgtcttccaccaacgtctcaaatctacaattgagagtcagttggctattgttgaatcttcagattgggaagatattctccgtccaacagctacttatcttcaaaccagtgatgaagcctttaaagaagtggttagcgaagtacttggagaaccgattccagctccaattgaagaagaaccaattgatatgacacgtcagttctctcaagcagaaatggcagaattacaagctcgtattgaggtagccgataaagaattgtctgaatttgaagctcagattaaacaggaagtggaagctccaactcctgtagtgagtcctcaagttgaagaagagcctctgctcatccagttggcccaatgtatgaagaaccagaag

SEQ ID NO: 3416 - protein, 266 aa, Streptococcus pneumoniae
  cell division protein DivIVA (divIVA); Cellular location: cytoplasm; Similar to strain R6 sequence 15903548 (e-144)
MRNRMPITSLEIKDKTFGTRFRGFDPEEVDEFLDIVVRDYEDLVRANHDKNLRIKSLEERLSYFDEIKDSLSQSVLIAQDTAERVKQAAHERSNNIIHQAEQDAQRLLEEAKYKANEILRQATDNAKKVAVETEELKNKSRVFHQRLKSTIESQLAIVESSDWEDILRPTATYLQTSDEAFKEVVSEVLGEPIPAPIEEEPIDMTRQFSQAEMAELQARIEVADKELSEFEAQIKQEVEAPTPVVSPQVEEEPLLIQLAQCMKNQK

SEQ ID NO: 3417 - DNA, 783 bp, Streptococcus pneumoniae
atgaataaagggatttatcagcatttctccatagaagatcgtccatttcttgacaagggaatggaatggataaagaaggtagaagatagctatgctccttttttaactccttttatcaatcctcatcaggagaagctattaaagattttggccaaaacctatggtcttgcttgtagcagtagtggggaattcgtctcgagtgagtatgttcgagttttattatacccagattatttccaaccagagttttcagattttgaaatatctctccaggaaattgtgtattccaataaatttgaacatttaacgcatgctaagattttagggacagtcatcaatcaattagggattgaacggaaactttttggagatatcctagtagatgaagaacgggcgcagattatgattaatcagcagtttcttcttctctttcaagatggactaaagaaaattggtcgtatacctgtttcgctggaggaacgtcctttcaccgagaaaatagataagctagaacagtatcgagaactggatttatctgtgtctagttttcgattagatgttcttttatcaaatgttttgaaactatctaggaatcaagcaaaccagttgattgaaaagaaacttgtccaagtaaattatcatgtggtagacaaatcagattacactgttcaagttggagacttgattagtgtgagaaaatttggtcgcttgagattacttcaagataagggacaaacgaaaaaagagaagaaaaaaataaccgtccagttattattaagtaag

SEQ ID NO: 3418 - protein, 261 aa, Streptococcus pneumoniae
  ylmH protein (ylmH); Cellular location: cytoplasm; Similar to strain R6 sequence 15903549 (e-146)
MNKGIYQHFSIEDRPFLDKGMEWIKKVEDSYAPFLTPFINPHQEKLLKILAKTYGLACSSSGEFVSSEYVRVLLYPDYFQPEFSDFEISLQEIVYSNKFEHLTHAKILGTVINQLGIERKLFGDILVDEERAQIMINQQFLLLFQDGLKKIGRIPVSLEERPFTEKIDKLEQYRELDLSVSSFRLDVLLSNVLKLSRNQANQLIEKKLVQVNYHVVDKSDYTVQVGDLISVRKFGRLRLLQDKGQTKKEKKKITVQLLLSK

SEQ ID NO: 3419 - DNA, 261 bp, Streptococcus pneumoniae
atgatttttttaattcgtatgatttataatgcagtggatatttactccctgattttggtagccttcgctgtcatgtcttggtttccaggtgcctacgaatccagtttaggtcgttggattgtagcgttggtgaaaccagtgcttgctcccttgcaacgcctgcctttacagatagcgggtcttgatttatctgtttgggttgcgattgttttggttcgatttttaggagaaaacctagtgcgttttctggcgatgatagga

SEQ ID NO: 3420 - protein, 87 aa, Streptococcus pneumoniae
  ylmG protein (ylmG); Cellular location: membrane; Similar to strain R6 sequence 15903550 (1.E-44)
MIFLIRMIYNAVDIYSLILVAFAVMSWFPGAYESSLGRWIVALVKPVLAPLQRLPLQIAGLDLSVWVAIVLVRFLGENLVRFLAMIG

SEQ ID NO: 3421 - DNA, 537 bp, Streptococcus pneumoniae
atgtctttaaaagatagattcgatagatttatagattattttacggaggatgaggattcaagtctcccttatgaaaaaagagatgagcctgtgtttacttcagtaaattcttcacaggaaccggctctcccaatgaatcaaccttcacagtcggctggcacaaaagagaacaatatcaccagacttcatgcaagacaacaggaattggcaaatcagagtcagcgtgcaacggataaggtcattatagatgttcgttatcctagaaaatatgaggatgcaacagaaattgttgatttattggcaggaaacgaaagtatcttgattgattttcagtatatgacagaggtgcaggctcgtcgttgtttggactatttggatggagcttgtcatgttttagctggaaatttgaaaaaggtagcttctaccatgtatttgttgacaccagtgaacgttattgtaaatgttgaagatatccgtttaccagatgaagatcaacagggtgagttcggttttgatatgaagcgaaatagagtacga

SEQ ID NO: 3422 - protein, 179 aa, Streptococcus pneumoniae
  ylmF protein (ylmF); Cellular location: cytoplasm; Similar to strain R6 sequence 15903551 (e-100)
MSLKDRFDRFIDYFTEDEDSSLPYEKRDEPVFTSVNSSQEPALPMNQPSQSAGTKENNITRLHARQQELANQSQRATDKVIIDVRYPRKYEDATEIVDLLAGNESILIDFQYMTEVQARRCLDYLDGACHVLAGNLKKVASTMYLLTPVNVIVNVEDIRLPDEDQQGEFGFDMKRNRVR

SEQ ID NO: 3423 - DNA, 669 bp, Streptococcus pneumoniae
atgaatgtaaaagaaaatacagaacttgtttttcgagaagttgcagaggctagtctgagtgctcatcgagagagtggttcggtctctgtcattgcagttaccaagtatgtagatgtaccgacagcggaagccttgcttccgctaggtgtccatcatatcggtgaaaatcgtgtagataagtttctggaaaaatatgaagctttaaaagatcgagatgtgacttggcatttgattggtaccttgcaaagacgtaaggtgaaagatgtcattcaatacgttgattatttccatgcattggactcagtaaagctagcaggggaaattcaaaaaagaagtgaccgagtcatcaagtgtttccttcaagtaaatatttctaaagaagaaagcaaacacggtttttcgagagaggaactgctggaaatcttgccagagttagccagactagataagattgaatatgttggtttaatgacgatggcaccttttgaggctagcagtgagcagttgaaagagattttcaaggcggcccaagatttacaaagagaaattcaagagaaacaaattccaaatatgcctatgaccgagttaagtatgggaatgagtcgtgattataaagaagcgattcaattcggttccacttttgttcgtataggtacatcattttttaag

SEQ ID NO: 3424 - protein, 223 aa, Streptococcus pneumoniae
  ylmE protein (ylmE); Cellular location: cytoplasm; Similar to strain R6 sequence 15903552 (e-123)
MNVKENTELVFREVAEASLSAHRESGSVSVIAVTKYVDVPTAEALLPLGVHHIGENRVDKFLEKYEALKDRDVTWHLIGTLQRRKVKDVIQYVDYFHALDSVKLAGEIQKRSDRVIKCFLQVNISKEESKHGFSREELLEILPELARLDKIEYVGLMTMAPFEASSEQLKEIFKAAQDLQREIQEKQIPNMPMTELSMGMSRDYKEAIQFGSTFVRIGTSFFK

SEQ ID NO: 3425 - DNA, 1257 bp, Streptococcus pneumoniae
atgacattttcatttgatacagctgctgctcaaggggcagtgattaaagtaattggtgtcggtggaggtggtggcaatgccatcaaccgtatggtcgacgaaggtgttacaggcgtagaatttatcgcagcaaacacagatgtacaagcattgagtagtacaaaagctgagactgttattcagttgggacctaaattgactcgtggtttgggtgcaggaggtcaacctgaggttggtcgtaaagccgctgaagaaagcgaagaaacactgacggaagctattagtggtgccgatatggtcttcatcactgctggtatgggaggaggctctggaactggagctgctcctgttattgctcgtatcgccaaagatttaggtgcgcttacagttggtgttgtaacacgtccctttggttttgaaggaagtaagcgtggacaatttgctgtagaaggaatcaatcaacttcgtgagcatgtagacactctattgattatctcaaacaacaatttgcttgaaattgttgataagaaaacaccgcttttggaggctcttagcgaagcggataacgttcttcgtcaaggtgttcaagggattaccgatttgattaccaatccaggattgattaaccttgactttgccgatgtgaaaacggtaatggcaaacaaagggaatgctcttatgggtattggtatcggtagtggagaagaacgtgtggtagaagcggcacgtaaggcaatctattcaccacttcttgaaacaactattgacggtgctgaggatgttatcgtcaacgttactggtggtcttgacttaaccttgattgaggcagaagaggcttcacaaattgtgaaccaggcagcaggtcaaggagtgaacatctggctcggtacttcaattgatgaaagtatgcgtgatgaaattcgtgtaacagttgttgcaacgggtgttcgtcaagaccgcgtagaaaaggttgtggctccacaagctagatctgctactaactaccgtgagacagtgaaaccagctcattcacatggctttgatcgtcattttgatatggcagaaacagttgaattgccaaaacaaaatccacgtcgtttggaaccaactcaggcatctgcttttggtgattgggatcttcgccgtgaatcgattgttcgtacaacagattcagtcgtttctccagtcgagcgctttgaagccccaatttcacaagatgaagatgaattggatacacctccatttttcaaaaatcgt

SEQ ID NO: 3426 - protein, 419 aa, Streptococcus pneumoniae
  cell division protein FtsZ (ftsZ); Cellular location: membrane; Similar to strain R6 sequence 15903553 (0.E+01)
MTFSFDTAAAQGAVIKVIGVGGGGGNAINRMVDEGVTGVEFIAANTDVQALSSTKAETVIQLGPKLTRGLGAGGQPEVGRKAAEESEETLTEAISGADMVFITAGMGGGSGTGAAPVIARIAKDLGALTVGVVTRPFGFEGSKRGQFAVEGINQLREHVDTLLIISNNNLLEIVDKKTPLLEALSEADNVLRQGVQGITDLITNPGLINLDFADVKTVMANKGNALMGIGIGSGEERVVEAARKAIYSPLLETTIDGAEDVIVNVTGGLDLTLIEAEEASQIVNQAAGQGVNIWLGTSIDESMRDEIRVTVVATGVRQDRVEKVVAPQARSATNYRETVKPAHSHGFDRHFDMAETVELPKQNPRRLEPTQASAFGDWDLRRESIVRTTDSVVSPVERFEAPISQDEDELDTPPFFKNR

SEQ ID NO: 3427 - DNA, 1317 bp, Streptococcus pneumoniae
gtgcttgtggccgagcagagaaatggtgaattaaatgtaattggcgtgagtaatgccaaaagtaaaggtgtaaaggatggaattattgttgatattgatgcagcagcaactgctatcaagtcagccatttcccaagcggaagaaaaggcaggcatttcgattaaatcagtgaatgtcggcttgcctggtaatcttttgcaggtagaaccaactcaggggatgattccagtaacatctgatactaaggaaattacggatcaagatgttgaaaatgttgtcaaatcagctttgacaaagagtatgacacctgaccgtgaagtcattacctttattcctgaagaatttattgtggatggtttccaagggattcgtgacccacgtggcatgatgggggttcgccttgaaatgcgtggtttgctttatacaggacctcgtactatcttgcacaatttgcgtaagacggttgagcgtgcaggtgttcaggttgaaaatgttatcatttcaccactagcaatggttcagtctgttttgaacgaaggggaacgtgaatttggtgctacagtgattgatatgggggcaggtcaaacgactgtcgctacaatccgtaatcaagaactccagttcacacatattctccaagaaggtggagattatgtaactaaagatatctccaaggttttgaaaacctctcgcaaattagcggaaggcttgaaactgaattacggggaagcctatccgcctcttgcaagcaaagaaaccttccaagtagaggttattggagaagtagaagcagtcgaagtgacggaagcctacttgtcagaaattatttctgcacgaatcaagcacatccttgaacaaatcaagcaagaattagatagaaggcgtctattggacctccctggtggtattgtcttaatcggtgggaatgccattttaccaggtatggttgagcttgctcaggaagtctttggcgtccgtgtcaagctttatgttccaaatcaagttggtatccgtaatccagcctttgcgcatgtgattagtttatcagaatttgcgggtcaattaacagaagttaatcttttggctcagggagcgataaaaggtgagaatgacttaagtcatcagccaattagttttggtgggatgctgcaaaaaacagctcagtttgtacaatcaacgcctgttcaaccagctcctgctccagaagtagagccggtggcgcctacagaaccaatggcggatttccaacaagcttcacaaaataaaccgaaattagcagatcgtttccgtggattgatcggaagcatgtttgacgaa

SEQ ID NO: 3428 - protein, 439 aa, Streptococcus pneumoniae
  cell division protein FtsA (ftsA); Cellular location: membrane; Similar to strain R6 sequence 15903554 (0.E+01)
MLVAEQRNGELNVIGVSNAKSKGVKDGIIVDIDAAATAIKSAISQAEEKAGISIKSVNVGLPGNLLQVEPTQGMIPVTSDTKEITDQDVENVVKSALTKSMTPDREVITFIPEEFIVDGFQGIRDPRGMMGVRLEMRGLLYTGPRTILHNLRKTVERAGVQVENVIISPLAMVQSVLNEGEREFGATVIDMGAGQTTVATIRNQELQFTHILQEGGDYVTKDISKVLKTSRKLAEGLKLNYGEAYPPLASKETFQVEVIGEVEAVEVTEAYLSEIISARIKHILEQIKQELDRRRLLDLPGGIVLIGGNAILPGMVELAQEVFGVRVKLYVPNQVGIRNPAFAHVISLSEFAGQLTEVNLLAQGAIKGENDLSHQPISFGGMLQKTAQFVQSTPVQPAPAPEVEPVAPTEPMADFQQASQNKPKLADRFRGLIGSMFDE

SEQ ID NO: 3429 - DNA, 102 bp, Streptococcus pneumoniae
ttgacagagcttgttccaatatctagacctgtaaaaaagccttctctagccattacatcgcttcctctctatcttccaagtttcgcacttcgtattattcca

SEQ ID NO: 3430 - protein, 34 aa, Streptococcus pneumoniae
  hypothetical protein
MTELVPISRPVKKPSLAITSLPLYLPSFALRIIP

SEQ ID NO: 3431 - DNA, 702 bp, Streptococcus pneumoniae
atgaatttatgggatattttctttacgactcaggcaaccgagccgcccaaatttgaccttttttggtatgttagcctatttacgctcttagccttaaccttttatacagcccatcgctatcgtgaaaagaaggtttaccaacgatttttccaaatcttgcagactgttcagttaatccttctttatggttggtactgggtcaatcatatgccactgtcagaaagcctacccttttaccattgccgtatggctatgtttgtggtactcttgcttcctggtcaatccaaatataaacaatactttgcattattgggaacatttgggacattagcagcctttgtttatccagtgccagatgcttacccttttccacatatcaccattctatcctttatctttggtcatttagcactcttggggaactctctagtttatctattgagacagtataatgcgcgattgctggatgtgaagggaatttttctcatgacctttgccctaaatgccttgatttttgtggtcaatttggtgacaggtggcgattacggatttttgacaaaaccgccattggttggggatcacggtctagtagctaattatttacttgtttcaattgtgctggtagctactatcagtttgactaagaaaatcttagaattctttttagctcaagaagcagaaaaaatgattgcaaaggaagct

SEQ ID NO: 3432 - protein, 234 aa, Streptococcus pneumoniae
  hypothetical protein; Cellular location: membrane; Similar to strain R6 sequence 15903555 (e-135)
MNLWDIFFTTQATEPPKFDLFWYVSLFTLLALTFYTAHRYREKKVYQRFFQILQTVQLILLYGWYWVNHMPLSESLPFYHCRMAMFVVLLLPGQSKYKQYFALLGTFGTLAAFVYPVPDAYPFPHITILSFIFGHLALLGNSLVYLLRQYNARLLDVKGIFLMTFALNALIFVVNLVTGGDYGFLTKPPLVGDHGLVANYLLVSIVLVATISLTKKILEFFLAQEAEKMIAKEA

SEQ ID NO: 3433 - DNA, 609 bp, Streptococcus pneumoniae
atgaagacaagtgattttgtcaagtatttgcaaagaatgattgccattacagatactggcttaacctttacaaaagatccgtttgaccgtgagcgctacgaagacttgcgaagtctgttatctgaaatgttgaatcaagcatcagaccttgattccgaagaagtggcagaagtcttgaagccaacttctgcttatgcgactccgttaatggacgtccgtgcttggattgttgaggatgagaagatttgtctggttaggggacaaggagaggatagttgggctttgccaggtggctttggtgaagtcggctattctccaacagaaaatattctcaaggaaattgaagaagaaaccggttttaaagccaaagttgaaagactgctagctgtttttgataccaatcgtttccaactacagagcaaacagtatacaaagtttgtttttggatgtaagcttcttgatggacaattccaagaaaatcaagaaattgctgaccttcaattttttgccattgaccaactgccgaacttatctgaaaaacgcattaccaaggagcaaatagagcttctttggcaggtttatcaaggtcatagggggcaatatcttgac

SEQ ID NO: 3434 - protein, 203 aa, Streptococcus pneumoniae
  MutT/nudix family protein; Cellular location: cytoplasm; Similar to strain R6 sequence 15903556 (e-112)
MKTSDFVKYLQRMIAITDTGLTFTKDPFDRERYEDLRSLLSEMLNQASDLDSEEVAEVLKPTSAYATPLMDVRAWIVEDEKICLVRGQGEDSWALPGGFGEVGYSPTENILKEIEEETGFKAKVERLLAVFDTNRFQLQSKQYTKFVFGCKLLDGQFQENQEIADLQFFAIDQLPNLSEKRITKEQIELLWQVYQGHRGQYLD

SEQ ID NO: 3435 - DNA, 1371 bp, Streptococcus pneumoniae
atgaaattaacaatccatgaaattgcccaagttgttggagccaaaaatgatatcagtatctttgaggacacccagttagaaaaagctgagtttgatagtcgtttgattggaactggagatttatttgtgccacttaaaggtgcgcgtgatggccatgactttattgaaacagcctttgaaaatggtgcagcagtaaccttgtctgagaaagaggtctcaaatcatccttacattctagtagatgatgttttgacagcctttcaatccttagcatcctactatcttgaaaaaacgactgttgatgtctttgctgttacaggttcaaatggcaagacaacgactaaggatatgttggcgcatttactgtcaacaagatacaagacctacaaaacacaaggcaattacaataatgagattggccttccttacacagttcttcatatgcctgaaggaacagaaaagttggttttggagatgggacaggatcacttgggcgatattcatctcttgtctgaattggctcgtccaaaaacagccatcgtgaccttggttggagaagcccatttggcctttttcaaagaccgttcagagattgctaagggaaaaatgcaaattgcagacggaatggcttcaggttccttgcttttagcgccggctgaccctatcgtagaggactatttgccaactgataaaaaggtggttcgttttgggcaaggggcagagctggaaattactgacttggttgagcgcaaagatagtctgaccttcaaggccaatttcttagagcaagcccttgatttgccagtaactggcaagtacaatgcgacaaatgctatgattgcatcctatgttgccttgcaagaaggagtttcagaggagcaaattcgtttggccttccaagatcttgaattgacgcgtaaccgtaccgagtggaagaaagcagccaatggagcagatatcctgtcagatgtttacaatgccaatccaactgctatgaaactgattttagagactttctctgccattccagccaatgaaggtggcaagaaaattgcagtgttggcggatatgaaggagcttggtgaccagtctgttcaacttcataatcagatgattttgagcctttctccagatgtgcttgataccgtgattttctatggagaaaatattgctgaattagcccaattggccagtcaaatgttcccaatcggccacgtttactacttcaagaaaacagaagaccaggatcaatttgaagacctagtcaagcaggtcaaggaaagccttggagcccatgaccaaatcctgctcaaaggctctaactctatgaatctagccaagttggtagaaagtttagaaaatgaagacaag

SEQ ID NO: 3436 - protein, 457 aa, Streptococcus pneumoniae
  UDP-N-acetylmuramoylalanyl-D-glutamyl-2,6-diaminopimelate--D-alanyl-D-a; Cellular location: cytoplasm; Similar to strain R6 sequence 15903557 (0.E+01)
MKLTIHEIAQVVGAKNDISIFEDTQLEKAEFDSRLIGTGDLFVPLKGARDGHDFIETAFENGAAVTLSEKEVSNHPYILVDDVLTAFQSLASYYLEKTTVDVFAVTGSNGKTTTKDMLAHLLSTRYKTYKTQGNYNNEIGLPYTVLHMPEGTEKLVLEMGQDHLGDIHLLSELARPKTAIVTLVGEAHLAFFKDRSEIAKGKMQIADGMASGSLLLAPADPIVEDYLPTDKKVVRFGQGAELEITDLVERKDSLTFKANFLEQALDLPVTGKYNATNAMIASYVALQEGVSEEQIRLAFQDLELTRNRTEWKKAANGADILSDVYNANPTAMKLILETFSAIPANEGGKKIAVLADMKELGDQSVQLHNQMILSLSPDVLDTVIFYGENIAELAQLASQMFPIGHVYYFKKTEDQDQFEDLVKQVKESLGAHDQILLKGSNSMNLAKLVESLENEDK

SEQ ID NO: 3437 - DNA, 1041 bp, Streptococcus pneumoniae
atgaaacaaacgattattcttttatatggtggacggagtgcggaacgcgaagtctctgtcctttcagctgagagtgtcatgcgtgcggtcgattacgaccgtttcacagtcaagactttctttatcagtcagtcaggtgactttatcaaaacacaggaatttagtcatgctccggggcaagaagaccgtctcatgaccaatgaaaccattgattgggataagaaagttgcaccaagtgctatctacgaagaaggtgcagtggtctttccagtccttcacgggccaatgggagaagatggctctgttcaaggattcttggaagttttgaaaatgccttacgttggttgcaacattttgtcatcaagtcttgccatggataaaatcacgactaagcgtgttctggaatctgctggtattgcccaagttccttatgtggctatcgttgaaggcgatgatgtgactgctaaaatcgctgaagtggaagaaaaattggcttatccagtcttcactaagccgtcaaacatggggtctagtgtcggtatttctaagtctgaaaaccaagaagaactccgtcaagccttaaaacttgccttccgatatgacagccgtgtcttggttgagcaaggagtgaatgcccgtgaaattgaggttggcctcttgggtaactacgatgtcaagagcacgctaccaggagaagttgtcaaggacgttgccttttatgactacgatgccaagtatattgataacaatattactatggatattcctgccaaaatcagtgatgatgtggtggctgtcatgcgtcaaaatgcagaaacagccttccgtgccattggtggccttggtctatctcgttgcgatttcttctatacagataagggagagatttttctcaacgagctcaatactatgccaggtttcacccagtggtctatgtacccactactttgggacaatatggggatcagctacccaaaactaatcgagcgtttggttgaccttgccaaggaaagttttgacaagcgcgaagcgcatttgata

SEQ ID NO: 3438 - protein, 347 aa, Streptococcus pneumoniae
  D-alanine--D-alanine ligase (ddlA); Cellular location: cytoplasm; Similar to strain R6 sequence 15903558 (0.E+01)
MKQTIILLYGGRSAEREVSVLSAESVMRAVDYDRFTVKTFFISQSGDFIKTQEFSHAPGQEDRLMTNETIDWDKKVAPSAIYEEGAVVFPVLHGPMGEDGSVQGFLEVLKMPYVGCNILSSSLAMDKITTKRVLESAGIAQVPYVAIVEGDDVTAKIAEVEEKLAYPVFTKPSNMGSSVGISKSENQEELRQALKLAFRYDSRVLVEQGVNAREIEVGLLGNYDVKSTLPGEVVKDVAFYDYDAKYIDNNITMDIPAKISDDVVAVMRQNAETAFRAIGGLGLSRCDFFYTDKGEIFLNELNTMPGFTQWSMYPLLWDNMGISYPKLIERLVDLAKESFDKREAHLI

SEQ ID NO: 3439 - DNA, 594 bp, Streptococcus pneumoniae
atgctttatccaacacctattgccaagttgattgacagttattctaagttaccaggtatcgggattaagacggctacgcgtctggccttttatacgattgggatgtctgctgatgatgtcaatgaatttgcaaaaaatctcctttctgctaagagagaattgacatattgttctatttgtggacgtttgacagacgacgatccttgttctatctgtactgatccgactcgtgaccagacaacaattttagttcttgaggatagtagagatgtggcagccatggaaaatatccaagaataccatggactctatcatgtccttcatggcctcatttctcctatgaatggtatcagtccggacgatatcaatctcaagagccttatgactcgtcttatggatagtgaggtttcagaagtgattgtggcgactaatgctacagcggatggtgaagcgacttccatgtatctttcacgtttgctcaagccggctggtatcaaggttacgcgtctagcacgaggtctcgctgtgggagcggacattgagtatgcggacgaagtgacactcttacgagccattgaaaatcggacagagttg

SEQ ID NO: 3440 - protein, 198 aa, Streptococcus pneumoniae
  recombination protein RecR (recR); Cellular location: cytoplasm; Similar to strain R6 sequence 15903559 (e-110)
MLYPTPIAKLIDSYSKLPGIGIKTATRLAFYTIGMSADDVNEFAKNLLSAKRELTYCSICGRLTDDDPCSICTDPTRDQTTILVLEDSRDVAAMENIQEYHGLYHVLHGLISPMNGISPDDINLKSLMTRLMDSEVSEVIVATNATADGEATSMYLSRLLKPAGIKVTRLARGLAVGADIEYADEVTLLRAIENRTEL

SEQ ID NO: 3441 - DNA, 2055 bp, Streptococcus pneumoniae
atgagactgatttgtatgagaaaatttaacagccattcgattccgattcggcttaatttattgttttcaatcgtcattttactctttatgaccattattggtcgtttgttgtatatgcaggttttgaacaaggatttttacgaaaaaaagctagcttcagctagtcagaccaagattacaagcagttcagcccgtggggaaatttatgatgctagtggaaaacctttggtagaaaatacgttaaagcaggttgtttcctttacgcgtagcaataaaatgacggctacagacttaaaagaaacagctaaaaagttactgacttatgtgagcatcagttctccaaatttgacagaacgccagctggcggattactatttggctgatcctgaaatctataaaaaaatagtggaagctctcccaagtgagaaacgcttggattcagatggcaatcgtctatccgaatcagaactgtataacaatgcggtcgatagtgtacaaacgagtcaactaaactatacagaggatgaaaagaaagaaatctatctttttagtcagttaaatgctgttggaaactttgcgacaggaaccattgcgacagatcctctaaatgattctcaggtggctgttattgcctctatttcaaaggagatgcctggcattagtatttctacttcttgggatagaaaggttttggaaacttccctttcttctatagttgggagtgtatccagtgaaaaagctggtctcccagcggaagaagcagaagcctatcttaaaaaaggctattctctaaatgaccgtgtaggaacctcctatttggaaaagcaatatgaagagaccttacaaggaaaacgctcggtaaaagaaatccatctggataaatatggcaatatggaaagcgtggatacaattgaggaaggtagtaagggaaacaatatcaaactgaccattgatttggctttccaagatagcgtggatgctttactgaaaagttatttcaattctgagctagaaaatggtggagccaagtattctgaaggtgtctatgcagtcgcccttaacccaaaaacaggtgcggttttgtctatgtcagggattaaacatgacttgaaaacgggagagttgacgcctgattccttgggaacggtaaccaatgtctttgttccaggttcggttgtcaaggcggcgaccatcagctcaggttgggaaaatggagtcttgtcaggaaaccagaccttgacagaccagtccattgtcttccaaggttcagctcccatcaattcttggtatactcaggcttacggttcattccctatcacagcggtccaagctctggagtattcatcaaatacctatatggtccaaacagccttaggtcttatggggcaaacctatcaacccaatatgtttgtcggcaccagcaatctagagtctgctatggagaaactgcgttcaacctttggcgaatatggcttgggtactgcgacaggaattgacctaccagatgaatctactggatttgttcccaaagagtatagctttgctaattacattactaatgcctttgggcagtttgataactatacgccgatgcagttggctcagtatgtagcaactattgcaaataatggtgttcgtgtggctcctcgtattgttgaaggcatttatggtaataatgataagggaggactgggtgacttgattcagcaactgcaaccgacagagatgaataaggtcaatatatccgactccgatatgagcatcttgcaccaaggtttttatcaggttgcccatggtactagtggattgacaactggacgtgccttttcaaatggtgccttggtatccattagcggaaaaacaggtacagccgaaagctatgtggcagatggtcagcaagcaaccaataccaatgcggtggcctatgccccatctgataatccccaaatcgctgtcgcagtggtctttcctcataataccaatctaacaaatggtgtaggaccttccattgcgcgtgacattatcaatctgtatcaaaaataccatccaatgaat

SEQ ID NO: 3442 - protein, 685 aa, Streptococcus pneumoniae
  penicillin-binding protein 2B (penA); Cellular location: outside; Similar to strain R6 sequence 15903560 (0.E+01)
MRLICMRKFNSHSIPIRLNLLFSIVILLFMTIIGRLLYMQVLNKDFYEKKLASASQTKITSSSARGEIYDASGKPLVENTLKQVVSFTRSNKMTATDLKETAKKLLTYVSISSPNLTERQLADYYLADPEIYKKIVEALPSEKRLDSDGNRLSESELYNNAVDSVQTSQLNYTEDEKKEIYLFSQLNAVGNFATGTIATDPLNDSQVAVIASISKEMPGISISTSWDRKVLETSLSSIVGSVSSEKAGLPAEEAEAYLKKGYSLNDRVGTSYLEKQYEETLQGKRSVKEIHLDKYGNMESVDTIEEGSKGNNIKLTIDLAFQDSVDALLKSYFNSELENGGAKYSEGVYAVALNPKTGAVLSMSGIKHDLKTGELTPDSLGTVTNVFVPGSVVKAATISSGWENGVLSGNQTLTDQSIVFQGSAPINSWYTQAYGSFPITAVQALEYSSNTYMVQTALGLMGQTYQPNMFVGTSNLESAMEKLRSTFGEYGLGTATGIDLPDESTGFVPKEYSFANYITNAFGQFDNYTPMQLAQYVATIANNGVRVAPRIVEGIYGNNDKGGLGDLIQQLQPTEMNKVNISDSDMSILHQGFYQVAHGTSGLTTGRAFSNGALVSISGKTGTAESYVADGQQATNTNAVAYAPSDNPQIAVAVVFPHNTNLTNGVGPSIARDIINLYQKYHPMN

SEQ ID NO: 3443 - DNA, 849 bp, Streptococcus pneumoniae
atggacaaaccagatatcgcaactatcattgattcacattttgaagaaatgacagacctagaacaagaaatcgctcgctattttttgcaagctgaaacgattacagatgatttatcttctcaacaagtcacccaaaaattacatatttctcaagctgctttgacccgctttgctaaaaagtgtggctttactggctaccgagaatttattttccaataccaacatcaggcagaaaatcaagccaaccaagtctccaagcacagtccactgaccaaacgagtcctcagaagttatagcaatatgagggaacaaacacaagacttgattgacgaaatccaactagaacgaattgcccagctaatcgaagatgctgagcgtatctacttctttggaacagggagttctggcctcgtcgcccgtgaaatgaaattacgttttatgcgactaggtgtggtctgcgaagctttgacagaccaagacggctttgcctggacaaccagcatcatggatgaaaattgtctagtactgggcttctcactttcaggctcaactccttctattttagatagtctattagatgctaaggagatgggggcaaagactgtactctttacaagtgttcccaataaagatagccagacctatacagagactgttcttgtagccacccacagccaaccctcctatatccaacgaatatccgctcaacttcctatgctcttctttatcgatttgatttatgcctactttttggaaatcaatcgcgaaagcaaggaaaaaatctttaatagctactgggaaaataaaaaactcaacggctatcgtagacaaaaacgtgtaagaaaatcc

SEQ ID NO: 3444 - protein, 283 aa, Streptococcus pneumoniae
  phosphosugar-binding transcriptional regulator, putative; Cellular location: membrane; Similar to strain R6 sequence 15903561 (e-159)
MDKPDIATIIDSHFEEMTDLEQEIARYFLQAETITDDLSSQQVTQKLHISQAALTRFAKKCGFTGYREFIFQYQHQAENQANQVSKHSPLTKRVLRSYSNMREQTQDLIDEIQLERIAQLIEDAERIYFFGTGSSGLVAREMKLRFMRLGVVCEALTDQDGFAWTTSIMDENCLVLGFSLSGSTPSILDSLLDAKEMGAKTVLFTSVPNKDSQTYTETVLVATHSQPSYIQRISAQLPMLFFIDLIYAYFLEINRESKEKIFNSYWENKKLNGYRRQKRVRKS

SEQ ID NO: 3445 - DNA, 882 bp, Streptococcus pneumoniae
atgacatattacgttgcaattgatatcggtggaaccaacatcaagtatggtttggttgatcaagaggggcaacttcttgaatcgcatgaaatgccaactgaggcgcataagggtggacctcatatcttacaaaagaccaaagatatcgtagctagttatttagaaaaaggcccagtagcaggtgttgccatatcttctgctgggatggtggatccggataagggtgagattttctatgctgggccgcaaatccctaactacgcaggcacccagttcaaaaaggaaatcgaagaaagctttactattccttgtgagattgaaaatgatgtcaactgtgcaggtcttgctgaggcagtatctggttcaggcaagggagcaagtgtgacactttgcttgaccattggaaccggtatcggtggttgcttgattatggataggaaagtcttccatggttttagcaattcagcctgtgaagtcgggtatatgcatatgcaggatggagcttttcaagacttggcttctacaacagctttagtgaaatatgtagctgaagcccatggagaagatgttgatcagtggaatggccgtagaattttcaaagaagccactgaaggaaacaaaatctgcatggaaggtattgaccgtatggttgactatctaggaaaaggtctggcaaatatttgctacgttgccaatccagaagtggttattcttggtggtggtatcatggggcaagaggctatcctcaaacctaagatccgtacagccttgaaagaggctttggtaccaagtttagcagaaaaaacacgattagaatttgcccatcaccaaaatacagcagggatgttgggtgcatattatcattttaagacaaaacaatcc

SEQ ID NO: 3446 - protein, 294 aa, Streptococcus pneumoniae
  ROK family protein; Cellular location: membrane; Similar to strain R6 sequence 15903562 (e-172)
MTYYVAIDIGGTNIKYGLVDQEGQLLESHEMPTEAHKGGPHILQKTKDIVASYLEKGPVAGVAISSAGMVDPDKGEIFYAGPQIPNYAGTQFKKEIEESFTIPCEIENDVNCAGLAEAVSGSGKGASVTLCLTIGTGIGGCLIMDRKVFHGFSNSACEVGYMHMQDGAFQDLASTTALVKYVAEAHGEDVDQWNGRRIFKEATEGNKICMEGIDRMVDYLGKGLANICYVANPEVVILGGGIMGQEAILKPKIRTALKEALVPSLAEKTRLEFAHHQNTAGMLGAYYHFKTKQS

SEQ ID NO: 3447 - DNA, 690 bp, Streptococcus pneumoniae
ttgaccattattgcccatgttgcttgcaataatactaaagatagtatggaacttgctcgccatgctgaaagcttgggagtagatgctattgcaacgattccaccaatttatttccgcttgccagaatactcagttgccaaatactggaacgatatcagttctgcagctccaaacacagactacgtgatttacaacattcctcaattggcaggggttgctttgactccaagcctttacacagaaatgttgaaaaatcctcgtgttatcggtgtgaagaactcttctatgccagttcaagatatccaaacctttgtcagccttggtggagaagaccatatcgtctttaatggtcctgatgagcagttcctaggaggacgcctcatgggggctagggctggtatcggtggtacttatggtgctatgccagaactcttcttgaaactcaatcagttgattgcggataaggacctagaaacagcgcgtgaattgcagtatgctatcaacgcaatcattggtaaactcacttctgctcatggaaatatgtacggtgtcatcaaagaagtcttgaaaatcaatgaaggcttgaatattggatctgttcgttcaccattgacaccagtgactgaagaagatcgtccagttgtagaagcggctgctgccttgattcgtgaaaccaaggagcgcttcctc

SEQ ID NO: 3448 - protein, 230 aa, Streptococcus pneumoniae
  putative acylneuraminate lyase
MTIIAHVACNNTKDSMELARHAESLGVDAIATIPPIYFRLPEYSVAKYWNDISSAAPNTDYVIYNIPQLAGVALTPSLYTEMLKNPRVIGVKNSSMPVQDIQTFVSLGGEDHIVFNGPDEQFLGGRLMGARAGIGGTYGAMPELFLKLNQLIADKDLETARELQYAINAIIGKLTSAHGNMYGVIKEVLKINEGLNIGSVRSPLTPVTEEDRPVVEAAAALIRETKERFL

SEQ ID NO: 3449 - DNA, 225 bp, Streptococcus pneumoniae
atgtcagatttgaaaaaatacgaaggtgtcattccagccttctacgcatgttatgatgatcaaggagaagtaagcccagaacgtacgcgtgccttggttcaatacttcattgataaaggtgttcaaggtctttatgtcaatggttcttctggtgaatgtatctaccaaagcgttgaagatcgcaagttgattttggaagaagtcatggcggtagcaaaggtaaat

SEQ ID NO: 3450 - protein, 75 aa, Streptococcus pneumoniae
  N-acetylneuraminate lyase, putative, FRAMESHIFT; Cellular location: cytoplasm; Similar to strain R6 sequence 15903229 (e-134)
MSDLKKYEGVIPAFYACYDDQGEVSPERTRALVQYFIDKGVQGLYVNGSSGECIYQSVEDRKLILEEVMAVAKVN

SEQ ID NO: 3451 - DNA, 642 bp, Streptococcus pneumoniae
atggcacaaaaaggagtaagccttatcaaggcagcatttgatacagataactttctcatgcgttttagtgagaaggtcttggacatcgtgacagccaatcttctttttgtcgtctcttgtttacccatcgtgacgattggagtggctaaaatcagcctctacgagaccatgttcgaagttaagaagagcagacgggtgcctgtttttaaaatctatctaagatctttcaagcaaaatctgaaactaggtcttcagctgggtttaatggagttaggaattgtgtttcttaccctttcagatctctatcttttctggggtcaaacagctctgcccttccaattgctgaaagccatttgtttaggtattctgatttttcttactatcgtgatgctggctagttaccctatcgcggcacgttatgacctatcttggaaagaaattcttcaaaaaggattgatgttggctagttttaactttccttggttcttcctcatgttagccattcttgtcctcattgtgatggttctttatctgtccgccttcagtctactcttaggtggctcagtcttcctactttttgggtttggactattggtctttatccagactggattgatggagaaaattttcgcaaaataccaa

SEQ ID NO: 3452 - protein, 214 aa, Streptococcus pneumoniae
  hypothetical protein; Cellular location: membrane; Similar to strain R6 sequence 15903565 (1.E-71)
MAQKGVSLIKAAFDTDNFLMRFSEKVLDIVTANLLFVVSCLPIVTIGVAKISLYETMFEVKKSRRVPVFKIYLRSFKQNLKLGLQLGLMELGIVFLTLSDLYLFWGQTALPFQLLKAICLGILIFLTIVMLASYPIAARYDLSWKEILQKGLMLASFNFPWFFLMLAILVLIVMVLYLSAFSLLLGGSVFLLFGFGLLVFIQTGLMEKIFAKYQ

SEQ ID NO: 3453 - DNA, 96 bp, Streptococcus pneumoniae
ttgttcatggtagggacttatgaaagctttactgacaaaaaagaaaacagtttacaaagaaaaatgatggaggagcaaacatggcacaaaaaggag

SEQ ID NO: 3454 - protein, 32 aa, Streptococcus pneumoniae
  hypothetical protein; Cellular location: cytoplasm
MFMVGTYESFTDKKENSLQRKMMEEQTWHKKE

SEQ ID NO: 3455 - DNA, 342 bp, Streptococcus pneumoniae
ttggtatcttctaagtatgctgcaagagctagtttcttagatggacaggggattacagttgatgagatggcttggataattaggggcattgtgaatgcattgattggtagatacataaaattaggtacttatgcggctaagtatggtattagtatggcacgctcgatcttaagtagggtagctgcaactgcagcagcaagagtaggattactgaccaagatttctggatggattttacgagtagctgtgaatgtagctgatgtatatggtaattttgccaacaatattgctgcagcttgggatgcatatgataaaattcctaacaatggtcgtataaacttt

SEQ ID NO: 3456 - protein, 114 aa, Streptococcus pneumoniae
  hypothetical protein; Cellular location: cytoplasm; Similar to strain R6 sequence 15903566 (1.E-55)
MVSSKYAARASFLDGQGITVDEMAWIIRGIVNALIGRYIKLGTYAAKYGISMARSILSRVAATAAARVGLLTKISGWILRVAVNVADVYGNFANNIAAAWDAYDKIPNNGRINF

SEQ ID NO: 3457 - DNA, 450 bp, Streptococcus pneumoniae
atgatttttgacgatttgaaaaacatcaccttttacaaagggattcatcctaatttagacaaggctatcgactatctctaccaacatcgtaaggattctttcgaattaggaaagtatgatattgatggagataaagtctttctagttgttcaggaaaatgtcctcaatcaagctgaaaatgatcaatttgagtatcataagaactatgcagatttgcatttgctggtagaaggacatgaatattcgagctacggttcacgtatcaaagacgaggcagtagcattcgacgaagcgagtgacattggctttgttcattgtcatgaacactacccactcttgttgggttatcacaattttgcgattttcttcccaggtgagccacatcagccaaatggttatgcaggcatggaagaaaaggttcgaaaatatctctttaaaattttgattgat

SEQ ID NO: 3458 - protein, 150 aa, Streptococcus pneumoniae
  conserved hypothetical protein; Cellular location: cytoplasm; Similar to strain R6 sequence 15903567 (8.E-86)
MIFDDLKNITFYKGIHPNLDKAIDYLYQHRKDSFELGKYDIDGDKVFLVVQENVLNQAENDQFEYHKNYADLHLLVEGHEYSSYGSRIKDEAVAFDEASDIGFVHCHEHYPLLLGYHNFAIFFPGEPHQPNGYAGMEEKVRKYLFKILID

SEQ ID NO: 3459 - DNA, 150 bp, Streptococcus pneumoniae
ttgagtataggaaaatcaatctatcaagatacagaagtatattttatagatttagagaatatagaggttataagtgtctacaaaatggagggtatgcagttactttatgaagttttgtcagacacttataaacttaagaatggttttagt

SEQ ID NO: 3460 - protein, 50 aa, Streptococcus pneumoniae
  box element
MSIGKSIYQDTEVYFIDLENIEVISVYKMEGMQLLYEVLSDTYKLKNGFS

SEQ ID NO: 3461 - DNA, 837 bp, Streptococcus pneumoniae
atgcaatctacagaaaaaaaaccattaacagcctttactgttatttcaacaatcattttgctcttgttgactgtgctgttcatctttccattctactggattttgacaggggcattcaaatcacaacctgatacaattgttattcctcctcagtggttccctaaaatgccaaccatggaaaacttccaacaactcatggtgcagaaccctgccttgcaatggatgtggaactcagtatttatctcattggtaaccatgttcttagtttgtgcaacctcatctctagcaggttatgtattggctaaaaaacgtttctatggtcaacgcattctatttgctatctttatcgctgctatggcgcttccaaaacaagttgtccttgtaccattggtacgtatcgtcaacttcatgggaatccatgatactctctgggcagttatcttgcctttgattggatggccattcggtgtcttcctcatgaaacagttcagtgaaaatatccctacagagttgcttgaatcagctaaaatcgacggttgtggtgagattcgtaccttctggagtgtagccttcccgattgtgaaaccagggtttgcagcccttgcaatctttaccttcatcaatacttggaatgactacttcatgcaattggtaatgttgacttcacgtaacaatttgaccatctcacttggggttgcgaccatgcaggctgaaatggcaaccaactatggtttgattatggcaggagctgcccttgctgctgttccaatcgtcacagtcttcctagtcttccaaaaatccttcacacagggtattactatgggagcggtcaaagga

SEQ ID NO: 3462 - protein, 279 aa, Streptococcus pneumoniae
  sugar ABC transporter, permease protein; Cellular location: membrane; Similar to strain R6 sequence 15903568 (e-160)
MQSTEKKPLTAFTVISTIILLLLTVLFIFPFYWILTGAFKSQPDTIVIPPQWFPKMPTMENFQQLMVQNPALQWMWNSVFISLVTMFLVCATSSLAGYVLAKKRFYGQRILFAIFIAAMALPKQVVLVPLVRIVNFMGIHDTLWAVILPLIGWPFGVFLMKQFSENIPTELLESAKIDGCGEIRTFWSVAFPIVKPGFAALAIFTFINTWNDYFMQLVMLTSRNNLTISLGVATMQAEMATNYGLIMAGAALAAVPIVTVFLVFQKSFTQGITMGAVKG

SEQ ID NO: 3463 - DNA, 894 bp, Streptococcus pneumoniae
gtgccgactgtgaaagtcaataaaatccgtatgcgggaaacagtgatttcctacgctttcctagcaccagtattattcttctttgtcatctttgtgttggctccgatggtgatgggcttcattacaagtttctttaactactcaatgactaaatttgagtttgtaggcttggataactatatccgtatgtttaaagatcctgtctttacaaaatctctgattaacacagttattttggttattggatctgtaccagttgttgttctattctcactctttgtagcatctcagacctatcatcaaaatgtcattgccagatccttctaccgtttcgtcttcttccttcctgttgtaacgggtagtgttgccgtgacagttgtttggaaatggatttatgacccactatcagggattctaaactttgtccttaagtccagccacatcatcagccaaaacatttcttggttgggagataaaaactgggcattgatggcgattatgattattctcttgaccacttcagttggtcagcccatcatcctttatatcgctgccatggggaatattgacaattcactggttgaagcggcgcgtgttgatggtgcaactgagtttcaagttttttggaagattaaatggccaagccttcttccaacaactctttatattgcaatcatcacaacaattaactcattccagtgtttcgccttgattcagcttttgacatctggtggtccaaactactcaacaagtaccttgatgtactacctttacgaaaaagccttccaattgacagaatacggctatgccaacacaattggtgtcttcttggcagtcatgattgctatcgtaagctttgttcaatttaaagtacttggaaacgacgtagaatac

SEQ ID NO: 3464 - protein, 298 aa, Streptococcus pneumoniae
  sugar ABC transporter, permease protein; Cellular location: membrane; Similar to strain R6 sequence 15903569 (e-169)
MPTVKVNKIRMRETVISYAFLAPVLFFFVIFVLAPMVMGFITSFFNYSMTKFEFVGLDNYIRMFKDPVFTKSLINTVILVIGSVPVVVLFSLFVASQTYHQNVIARSFYRFVFFLPVVTGSVAVTVVWKWIYDPLSGILNFVLKSSHIISQNISWLGDKNWALMAIMIILLTTSVGQPIILYIAAMGNIDNSLVEAARVDGATEFQVFWKIKWPSLLPTTLYIAIITTINSFQCFALIQLLTSGGPNYSTSTLMYYLYEKAFQLTEYGYANTIGVFLAVMIAIVSFVQFKVLGNDVEY

SEQ ID NO: 3465 - DNA, 1326 bp, Streptococcus pneumoniae
atgaaatttagaaaattagcttgtacagtacttgcgggtgctgcggttcttggtcttgctgcttgtggcaattctggcggaagtaaagatgctgccaaatcaggtggtgacggtgccaaaacagaaatcacttggtgggcattcccagtatttacccaagaaaaaactggtgacggtgttggaacttatgaaaaatcaatcatcgaagcgtttgaaaaagcaaacccagatataaaagtgaaattggaaaccatcgacttcaagtcaggtcctgaaaaaatcacaacagccatcgaagcaggaacagctccagacgtactctttgatgcaccaggacgtatcatccaatacggtaaaaacggtaaattggctgagttgaatgacctcttcacagatgaatttgttaaagatgtcaacaatgaaaacatcgtacaagcaagtaaagctggagacaaggcttatatgtatccgattagttctgccccattctacatggcaatgaacaagaaaatgttagaagatgctggagtagcaaaccttgtaaaagaaggttggacaactgatgattttgaaaaagtattgaaagcacttaaagacaagggttacacaccaggttcattgttcagttctggtcaagggggagaccaaggaacacgtgcctttatctctaacctttatagcggttctgtaacagatgaaaaagttagcaaatatacaactgatgatcctaaattcgtcaaaggtcttgaaaaagcaactagctggattaaagacaatttgatcaataatggttcacaatttgacggtggggcagatatccaaaactttgccaacggtcaaacatcttacacaatcctttgggcaccagctcaaaatggtatccaagctaaacttttagaagcaagtaaggtagaagtggtagaagtaccattcccatcagacgaaggtaagccagctcttgagtaccttgtaaacgggtttgcagtattcaacaataaagacgacaagaaagtcgctgcatctaagaaattcatccagtttatcgcagatgacaaggagtggggacctaaagacgtagttcgtacaggtgctttcccagtccgtacttcatttggaaaactttatgaagacaaacgcatggaaacaatcagcggctggactcaatactactcaccatactacaacactattgatggatttgctgaaatgagaacactttggttcccaatgttgcaatctgtatcaaatggtgacgaaaaaccagcagatgctttgaaagccttcactgaaaaagcgaacgaaacaatcaaaaaagctatgaaacaa

SEQ ID NO: 3466 - protein, 442 aa, Streptococcus pneumoniae
  sugar ABC transporter, sugar-binding protein; Cellular location: lipoprotein; Similar to strain R6 sequence 15903570 (0.E+01)
MKFRKLACTVLAGAAVLGLAACGNSGGSKDAAKSGGDGAKTEITWWAFPVFTQEKTGDGVGTYEKSIIEAFEKANPDIKVKLETIDFKSGPEKITTAIEAGTAPDVLFDAPGRIIQYGKNGKLAELNDLFTDEFVKDVNNENIVQASKAGDKAYMYPISSAPFYMAMNKKMLEDAGVANLVKEGWTTDDFEKVLKALKDKGYTPGSLFSSGQGGDQGTRAFISNLYSGSVTDEKVSKYTTDDPKFVKGLEKATSWIKDNLINNGSQFDGGADIQNFANGQTSYTILWAPAQNGIQAKLLEASKVEVVEVPFPSDEGKPALEYLVNGFAVFNNKDDKKVAASKKFIQFIADDKEWGPKDVVRTGAFPVRTSFGKLYEDKRMETISGWTQYYSPYYNTIDGFAEMRTLWFPMLQSVSNGDEKPADALKAFTEKANETIKKAMKQ

SEQ ID NO: 3467 - DNA, 1530 bp, Streptococcus pneumoniae
gtgagggggagttttatgtttaaagttttacaaaaagttggaaaagcttttatgttacctatagctatacttcctgcagcaggtctacttttggggattggtggtgcactttcaaacccaaccacgatagcaacttatccaatactagacaatagtatttttcaatcaatattccaagtaatgagctctgcaggagaggttgtattcagtaatttgtcactacttctctgtgtgggattatgtattggcttagcgaaacgagataaaggaaccgctgcgttagcaggagtaactggttacttagttatgactgcaacgatcaaagctttggtaaaactttttatggcagaaggatctgcaattgatactggagttattggagcattagttgtcggaatagttgccgtatatttgcacaaccgatataacaatattcaattaccttccgctttaggattctttggaggttcacgcttcgttcctattgttacatcgttctcttctatcttgattggctttgtcttctttgttatttggccacctttccaacaacttcttgtttctacaggtggatatatttctcaggcgggtccaattggaacttttctatatggatttttaatgagactttctggagcagtaggcttacatcatataatttaccctatgttttggtatactgaacttggtggtgttgaaactgttgcaggacaaacagtggttggagctcaaaaaatattttttgctcaattagccgatttggcccattctggattatttacagaaggaacaaggttttttgcaggtcgtttctcaacaatgatgttcggtttaccggctgcctgtttagcgatgtaccatagtgttcctaaaaatcgtcgtaaaaaatacgcgggtttgttttttggagttgctttaacatcttttattaccggtattacagaaccaattgaatttatgtttctattcgtcagtccggttctatatgttgttcacgcattccttgatggtgttagcttctttattgcagacgtcttaaatatttcaataggaaacacattttcaggaggtgtaatcgatttcactttatttggaattttgcaggggaacgctaagacgaattgggttcttcagattccatttggacttatttggagtgttttgtattatattatttttagatggttcattactcaattcaacgttctaacgccagggcgaggagaagaagtagattctaaagaaatttctgaatccgcagattcaacttcaaatactgcagattatttaaaacaggatagcctacaaattatcagagccttgggtggatcaaataatatagaagatgtagatgcttgtgtgacacgtttacgtgtagctgtaaaagaagttaatcaagttgataaagcacttttaaaacaaattggtgcagttgatgtcttagaagtgaagggtggcattcaagcaatctatggagcaaaagcaatcttatataaaaatagtattaatgaaattttaggtgtagatgat

SEQ ID NO: 3468 - protein, 510 aa, Streptococcus pneumoniae
  PTS system, IIBC components; Cellular location: membrane; Similar to strain R6 sequence 15903571 (0.E+01)
MRGSFMFKVLQKVGKAFMLPIAILPAAGLLLGIGGALSNPTTIATYPILDNSIFQSIFQVMSSAGEVVFSNLSLLLCVGLCIGLAKRDKGTAALAGVTGYLVMTATIKALVKLFMAEGSAIDTGVIGALVVGIVAVYLHNRYNNIQLPSALGFFGGSRFVPIVTSFSSILIGFVFFVIWPPFQQLLVSTGGYISQAGPIGTFLYGFLMRLSGAVGLHHIIYPMFWYTELGGVETVAGQTVVGAQKIFFAQLADLAHSGLFTEGTRFFAGRFSTMMFGLPAACLAMYHSVPKNRRKKYAGLFFGVALTSFITGITEPIEFMFLFVSPVLYVVHAFLDGVSFFIADVLNISIGNTFSGGVIDFTLFGILQGNAKTNWVLQIPFGLIWSVLYYIIFRWFITQFNVLTPGRGEEVDSKEISESADSTSNTADYLKQDSLQIIRALGGSNNIEDVDACVTRLRVAVKEVNQVDKALLKQIGAVDVLEVKGGIQAIYGAKAILYKNSINEILGVDD

SEQ ID NO: 3469 - DNA, 696 bp, Streptococcus pneumoniae
atgccacagattagcaaagaagccttgattgagcaaatcaaagatggaatcatcgtttcttgtcaggctcttcctcatgaaccgctttatacagaagcgggaggggtgattcccttgctggtcaaagcggctgagcaaggtggagcagtcggtatccgagcaaacagtgttcgcgatatcaaggaaattaaggaagtcactaaacttccaatcattgggattatcaaacgtgattatccacctcaggaacccttcatcacggctactatgaaagaagttgatgaattggcagaactggacatcgaggtgattgctctggattgtaccaagcgtgaacgctacgatggtttggaaattcaagagttcattcgtcaggttaaggagaaatatcctaatcagcttttgatggctgatactagtatcttcgaagaagggctagcagctgtagaagcaggaattgactttgtcggaacaaccttatcaggctacacatcctacagtccaaaagtagacggtccagattttgaattgattaagaaactctgtgatgctggtgtagatgtcattgcagaaggaaaaattcatacaccagaacaagccaaacaaatccttgaatatggagtgcgaggcatcgttgttggtggcgccattactagaccaaaagagattacagaacgcttcgttgctagtcttaaa

SEQ ID NO: 3470 - protein, 232 aa, Streptococcus pneumoniae
  conserved hypothetical protein (N-acetylmannosamine-6-P); Cellular location: cytoplasm; Similar to strain R6 sequence 15903572 (e-129)
MPQISKEALIEQIKDGIIVSCQALPHEPLYTEAGGVIPLLVKAAEQGGAVGIRANSVRDIKEIKEVTKLPIIGIIKRDYPPQEPFITATMKEVDELAELDIEVIALDCTKRERYDGLEIQEFIRQVKEKYPNQLLMADTSIFEEGLAAVEAGIDFVGTTLSGYTSYSPKVDGPDFELIKKLCDAGVDVIAEGKIHTPEQAKQILEYGVRGIVVGGAITRPKEITERFVASLK

SEQ ID NO: 3471 - DNA, 1101 bp, Streptococcus pneumoniae
atggttaaatacggtgttgttggaacagggtattttggagctgaattggctcgctacatgcaaaagaatgatggagcagagattactcttctctatgatccagataatgcagaggcgattgcagaagaattgggagcaaaagtagcaagttccttagatgagttggtttctagcgatgaagtagattgtgttatcgtcgcaactccaaataatcttcataaggaaccggttattaaggctgcacagcatggtaaaaatgttttctgtgaaaaaccaattgcgctttcttatcaagattgtcgcgagatggtagatgcgtgtaaagaaaacaatgtaacctttatggcaggacatattatgaatttctttaatggtgttcatcatgcaaaagaactcattaatcaaggagttatcggagacgttctatattgtcatacagctcgtaatggttgggaagaacaacaaccgtcagtatcatggaaaaaaattcgtgaaaaatcaggtggtcacttgtatcaccacatccatgaattggattgcgttcaattccttatggggggcatgcctgaaactgtaaccatgacaggtggaaatgtggcccatgaaggtgaacatttcggtgatgaagatgatatgatttttgtcaatatggaattttctaataagcgttttgccttgttagaatggggttcagcttatcgttggggtgaacattatgtcttaatccaaggaagcaaaggtgccatccgcttagacttattcaactgtaaaggaactcttaagctagatgggcaagaaagctatttcttgattcacgaatcgcaagaagaagatgatgatcggactcgtatctatcatagtacagagatggatggagcaattgcttatggtaaaccaggtaaacgtactccattatggctatcatctgtcattgataaagaaatgcgctatctgcatgagattatggaaggagctccagtatcagaagaatttgcaaaacttttgacaggtgaagctgccctagaagcaattgctactgcagatgcttgtacccagtctatgtttgaagatcgcaaagtaaaattgtcagaaattgtaaaa

SEQ ID NO: 3472 - protein, 367 aa, Streptococcus pneumoniae
  oxidoreductase, Gfo/Idh/MocA family; Cellular location: cytoplasm; Similar to strain R6 sequence 15903573 (0.E+01)
MVKYGVVGTGYFGAELARYMQKNDGAEITLLYDPDNAEAIAEELGAKVASSLDELVSSDEVDCVIVATPNNLHKEPVIKAAQHGKNVFCEKPIALSYQDCREMVDACKENNVTFMAGHIMNFFNGVHHAKELINQGVIGDVLYCHTARNGWEEQQPSVSWKKIREKSGGHLYHHIHELDCVQFLMGGMPETVTMTGGNVAHEGEHFGDEDDMIFVNMEFSNKRFALLEWGSAYRWGEHYVLIQGSKGAIRLDLFNCKGTLKLDGQESYFLIHESQEEDDDRTRIYHSTEMDGAIAYGKPGKRTPLWLSSVIDKEMRYLHEIMEGAPVSEEFAKLLTGEAALEAIATADACTQSMFEDRKVKLSEIVK

SEQ ID NO: 3473 - DNA, 2091 bp, Streptococcus pneumoniae
atgaataaaagaggtctttattcaaaactaggaatttccgttgtaggcattagtcttttaatgggagtccccactttgattcatgcgaatgaattaaactatggtcaactgtccatatctcctatttttcaaggaggttcatatcaactgaacaataagagtatagatatcagctctttgttattagataaattgtctggagagagtcagacagtagtaatgaaatttaaagcagataaaccaaactctcttcaagctttgtttggcctatctaatagtaaagcaggctttaaaaataattacttttcaattttcatgagagattctggtgagataggtgtagaaataagagacgcccaaaagggaataaattatttattttccagaccagcttcattatggggaaaacataaaggacaggcagttgaaaatacactagtatttgtatctgattctaaagataaaacatacacaatgtatgttaatggaatagaagtgttctctgaaacagttgatacatttttgccaatttcaaatataaatggtatagataaggcaacactaggagctgttaatcgtgaaggtaaggaacattacctcgcaaaaggaagtattgatgaaatcagtctatttaacaaagcaattagtgatcaggaagtttcaactattcccttgtcaaatccatttcagttaattttccaatcaggagattctactcaagctaactattttagaataccgacactatatacattaagtagtggaagagttctatcaagtattgatgcacgttatggtgggactcatgattctaaaagtaagattaatattgccacttcttatagtgatgataatgggaaaacgtggagtgagccaatttttgctatgaagtttaatgactatgaggagcagttagtttactggccacgagataataaattaaagaatagtcaaattagtggaagtgcttcattcatagattcatccattgttgaagataaaaaatctgggaaaacgatattactagctgatgttatgcctgcgggtattggaaataataatgcaaataaagccgactcaggttttaaagaaataaatggtcattattatttaaaactaaagaagaatggagataacgatttccgttatacagttagagaaaatggtgtcgtttataatgaaacaactaataaacctacaaattatactataaatgataagtatgaagttttggagggaggaaagtctttaacagtcgaacaatattcggttgattttgatagtggctctttaagagaaaggcataatggaaaacaggttcctatgaatgttttctacaaagattcgttatttaaagtgactcctactaattatatagcaatgacaactagtcagaatagaggagagagttgggaacaatttaagttgttgcctccgttcttaggagaaaaacataatggaacttacttatgtcccggacaaggtttagcattaaaatcaagtaacagattgatttttgcaacatatactagtggagaactaacctatctcatttctgatgatagtggtcaaacatggaagaaatcctcagcttcaattccgtttaaaaatgcaacagcagaagcacaaatggttgaactgagagatggtgtgattagaacattctttagaaccactacaggtaagatagcttatatgactagtagagattctggagaaacatggtcgaaagtttcgtatattgatggaatccaacaaacttcatatggcacacaagtatctgcaattaaatactctcaattaattgatggaaaagaagcagtcattttgagtacaccaaattctagaagtggccgcaagggaggccaattagttgtcggtttagtcaataaagaagatgatagtattgattggaaataccactatgatattgatttgccttcgtatggttatgcctattctgcgattacagaattgccaaatcatcacataggtgtactgtttgaaaaatatgattcgtggtcgagaaatgaattgcatttaagcaatgtagttcagtatatagatttggaaattaatgatttaacaaaa

SEQ ID NO: 3474 - protein, 697 aa, Streptococcus pneumoniae
  neuraminidase B (nanB); Cellular location: outside; Similar to strain R6 sequence 15903574 (0.E+01)
MNKRGLYSKLGISVVGISLLMGVPTLIHANELNYGQLSISPIFQGGSYQLNNKSIDISSLLLDKLSGESQTVVMKFKADKPNSLQALFGLSNSKAGFKNNYFSIFMRDSGEIGVEIRDAQKGINYLFSRPASLWGKHKGQAVENTLVFVSDSKDKTYTMYVNGIEVFSETVDTFLPISNINGIDKATLGAVNREGKEHYLAKGSIDEISLFNKAISDQEVSTIPLSNPFQLIFQSGDSTQANYFRIPTLYTLSSGRVLSSIDARYGGTHDSKSKINIATSYSDDNGKTWSEPIFAMKFNDYEEQLVYWPRDNKLKNSQISGSASFIDSSIVEDKKSGKTILLADVMPAGIGNNNANKADSGFKEINGHYYLKLKKNGDNDFRYTVRENGVVYNETTNKPTNYTINDKYEVLEGGKSLTVEQYSVDFDSGSLRERHNGKQVPMNVFYKDSLFKVTPTNYIAMTTSQNRGESWEQFKLLPPFLGEKHNGTYLCPGQGLALKSSNRLIFATYTSGELTYLISDDSGQTWKKSSASIPFKNATAEAQMVELRDGVIRTFFRTTTGKIAYMTSRDSGETWSKVSYIDGIQQTSYGTQVSAIKYSQLIDGKEAVILSTPNSRSGRKGGQLVVGLVNKEDDSIDWKYHYDIDLPSYGYAYSAITELPNHHIGVLFEKYDSWSRNELHLSNVVQYIDLEINDLTK

SEQ ID NO: 3475 - DNA, 831 bp, Streptococcus pneumoniae
atgaagaagaaatccagtatttatttagatattctctcacatgtacttttagttggtgcgaccatcgttgcagttttcccattggtatggattatcatatcttctgtcaaagggaaaggggaattaactcagtatccaacacgattttggcctgaacagtttacattagattatttcactcatgttatcaacgatttgcacttcattgataacattcgaaacagtttaatcattgccttggctacaacccttattgcgattattatttctgctatggcagcctatggtattgttcgattctttcctaaattgggagcaatcatgtcgagactactcgtcattacctacattttcccaccaattttgttagcaattccctattcaattgccattgctaaagttgggttaacaaatagtttatttggcttgatgatggtttatctatcttttagtgttccatatgcagtttggctcttagttggatttttccaaacagttccaattggaattgaagaagcggctagaattgatggtgcaaataaatttgttacgttttataaagttgtgctaccgattgtagcaccaggtattgtagcaacagctatttatacatttatcaatgcttggaatgaattcctgtatgccttgattttgattaacaatacaggaaagatgacagtagcagtagcccttcgttcacttaatggttcagaaatactagactggggagatatgatggcagcgtctgttattgtagttcttccatcaattattttcttctctatcatccaaaataagattgcaagtggattatcagaaggatctgtgaag

SEQ ID NO: 3476 - protein, 277 aa, Streptococcus pneumoniae
  ABC transporter, permease protein; Cellular location: membrane; Similar to strain R6 sequence 15903575 (e-153)
MKKKSSIYLDILSHVLLVGATIVAVFPLVWIIISSVKGKGELTQYPTRFWPEQFTLDYFTHVINDLHFIDNIRNSLIIALATTLIAIIISAMAAYGIVRFFPKLGAIMSRLLVITYIFPPILLAIPYSIAIAKVGLTNSLFGLMMVYLSFSVPYAVWLLVGFFQTVPIGIEEAARIDGANKFVTFYKVVLPIVAPGIVATAIYTFINAWNEFLYALILINNTGKMTVAVALRSLNGSEILDWGDMMAASVIVVLPSIIFFSIIQNKIASGLSEGSVK

SEQ ID NO: 3477 - DNA, 882 bp, Streptococcus pneumoniae
atggttaaagaacgtaatttaactcgctggatatttgttttgccagctatgattatcgtaggattactctttgtttatccgtttttctcgagtattttttatagctttaccaataagcatttgattatgcctaattataaatttgttggtttggctaactataaagctgtgctatcagatcccaacttctttaatgcgttctttaattcaattaagtggaccgttttctcattagttggtcaagttttagtagggtttgtattggctttagctcttcacagagtacgccacttcaagaaattatataggacattattgattgttccttgggcatttcctaccatcgttattgccttctcttggcagtggattctaaacggggtttatggctacttacctaatctaatcgtaaaattaggtttaatggaacatacacctgcatttttgacagatagtacatgggcattcctatgtttggtgtttatcaacatttggtttggagcaccaatgattatggttaatgtgctttcagctttgcaaacagtaccagaagaacaatttgaggctgctaagatagatggtgcttcaagttggcaggtgttcaagtttatcgtctttccacatattaaagtggttgtaggacttctagttgttttgagaactgtatggatctttaataactttgacattatctacctcattactggtggtggaccagccaatgctacaacgacgcttccaatttttgcttacaacctgggctggggaactaaattgttgggtcgtgcttcagcagttacagtactgctctttatcttcttggtggcgatttgctttatctactttgctatcatcagtaagtgggaaaaggagggtagaaaa

SEQ ID NO: 3478 - protein, 294 aa, Streptococcus pneumoniae
  ABC transporter, permease protein; Cellular location: membrane; Similar to strain R6 sequence 15903576 (e-173)
MVKERNLTRWIFVLPAMIIVGLLFVYPFFSSIFYSFTNKHLIMPNYKFVGLANYKAVLSDPNFFNAFFNSIKWTVFSLVGQVLVGFVLALALHRVRHFKKLYRTLLIVPWAFPTIVIAFSWQWILNGVYGYLPNLIVKLGLMEHTPAFLTDSTWAFLCLVFINIWFGAPMIMVNVLSALQTVPEEQFEAAKIDGASSWQVFKFIVFPHIKVVVGLLVVLRTVWIFNNFDIIYLITGGGPANATTTLPIFAYNLGWGTKLLGRASAVTVLLFIFLVAICFIYFAIISKWEKEGRK

SEQ ID NO: 3479 - DNA, 1335 bp, Streptococcus pneumoniae
atgaaaaaaatgagaaagtttttatgtctagctggaattgcgctagcggctgttgccttggtagcttgttcaggaaaaaaagaagctacaactagtactgaaccaccaacagaattatctggtgagattacaatgtggcactcctttactcaaggaccccgtttagaaagtattcaaaaatcagcagatgctttcatgcaaaagcatccaaaaacgaaaatcaagattgaaacattttcttggaatgacttctatactaaatggactacaggtttagcaaatggaaatgtgccagatatcagtacagctcttcctaaccaagtaatggaaatggtcaactcagatgctttggttccgctaaatgattctatcaagcgtattggacaagataaatttaacgaaactgccttaaatgaagcaaaaatcggagatgattactactctgttcctctttattcacatgcacaagtcatgtgggttagaacagatttgttaaaagaacataatattgaggttcctaaaacttgggatcaactctatgaagcttctaaaaaattgaaagaagctggagtttatggcttgtctgttccgtttggaacaaatgacttaatggcaacacgtttcttgaacttctacgtacgtagtggtggaggaagcctcttaacaaaagatcttaaagcagacttgacaagccaacttgctcaagatggtattaaatactgggttaaattgtataaagaaatctcacctcaagattctttgaactttaatgtccttcaacaagctaccttgttctatcaaggaaaaacagcatttgactttaactctggcttccatatcggaggaattaatgccaacagtcctcaattgattgattcgattgatgcttatcctattccaaaaatcaaagagtctgataaagaccaaggaattgaaacctcaaacattccaatggttgtttggaaaaattcaaaacatccagaagttgctaaagcattcttagaagcactttataatgaagaagactacgttaaattccttgattcaactccagtaggtatgttgccaactattaaggggattagcgattctgcagcctataaagaaaatgaaactcgtaagaaatttaaacatgctgaagaagtaattactgaagctgttaaaaaaggtactgctattggttatgaaaatgggccaagtgtacaagctggtatgttgactaaccaacacattattgaacaaatgttccaagatatcattacaaatggaacagatcctatgaaagcagcaaaagaagcagaaaaacaattaaatgatttatttgaggctgttcag

SEQ ID NO: 3480 - protein, 445 aa, Streptococcus pneumoniae
  ABC transporter, substrate-binding protein; Cellular location: lipoprotein; Similar to strain R6 sequence 15903577 (0.E+01)
MKKMRKFLCLAGIALAAVALVACSGKKEATTSTEPPTELSGEITMWHSFTQGPRLESIQKSADAFMQKHPKTKIKIETFSWNDFYTKWTTGLANGNVPDISTALPNQVMEMVNSDALVPLNDSIKRIGQDKFNETALNEAKIGDDYYSVPLYSHAQVMWVRTDLLKEHNIEVPKTWDQLYEASKKLKEAGVYGLSVPFGTNDLMATRFLNFYVRSGGGSLLTKDLKADLTSQLAQDGIKYWVKLYKEISPQDSLNFNVLQQATLFYQGKTAFDFNSGFHIGGINANSPQLIDSIDAYPIPKIKESDKDQGIETSNIPMVVWKNSKHPEVAKAFLEALYNEEDYVKFLDSTPVGMLPTIKGISDSAAYKENETRKKFKHAEEVITEAVKKGTAIGYENGPSVQAGMLTNQHIIEQMFQDIITNGTDPMKAAKEAEKQLNDLFEAVQ

SEQ ID NO: 3481 - DNA, 450 bp, Streptococcus pneumoniae
atgattattacaaaaattagccgtttaggaacttatgtgggagtaaatccacattttgcaacattaatagattttctagaaaaaacaggactagaaaatttaacagaaggttcgattgctatcgatggtaatcgattgtttgggaattgctttacttatctagcagatggtcaagcaggggctttctttgaaacccaccaaaaatatttggatattcatttagttttggaaaacgaagaagccatggctgttacatcgccggaaaatgtaagcgttacccaagaatatgatgaagagaaagatattgaattatacacagggaaagtggaacagttggttcatttgagagctggcgaatgcctcatcacttttccagaagatttacatcaacccaaggttcgtataaatgatgaacctgtgaaaaaagttgtctttaaagttgcgatttct

SEQ ID NO: 3482 - protein, 150 aa, Streptococcus pneumoniae
  conserved hypothetical protein; Cellular location: cytoplasm; Similar to strain R6 sequence 15903578 (5.E-84)
MIITKISRLGTYVGVNPHFATLIDFLEKTGLENLTEGSIAIDGNRLFGNCFTYLADGQAGAFFETHQKYLDIHLVLENEEAMAVTSPENVSVTQEYDEEKDIELYTGKVEQLVHLRAGECLITFPEDLHQPKVRINDEPVKKVVFKVAIS

SEQ ID NO: 3483 - DNA, 102 bp, Streptococcus pneumoniae
ttgaaaatctcttcaaaccacagtcgcttcaccttggattatataggtcagtcttatctacaacctcaaagcggtgttttgggcaatctgctactagcttgc

SEQ ID NO: 3484 - protein, 34 aa, Streptococcus pneumoniae
  box element
MKISSNHSRFTLDYIGQSYLQPQSGVLGNLLLAC

SEQ ID NO: 3485 - DNA, 1254 bp, Streptococcus pneumoniae; identical to SEQ ID NO: 2539

SEQ ID NO: 3486 - protein, 418 aa, Streptococcus pneumoniae; identical to SEQ ID NO: 2540
  IS1167, transposase; Cellular location: cytoplasm; Similar to strain R6 sequence 15903763 (0.E+01)

SEQ ID NO: 3487 - DNA, 2400 bp, Streptococcus pneumoniae
atgtcttatttcagaaatcgggatatagatatagagaggatcagtatgaatcggagtgttcaagaacgtaagtgtcgttatagcattaggaaactatcggtaggagcggtttctatgattgtaggagcagtggtatttggaacgtctcctgttttagctcaagaaggggcaagtgagcaacctctggcaaatgaaactcaactttcgggggagagctcaaccctaactgatacagaaaagagccagccttcttcagagactgaactttctggcaataagcaagaacaagaaaggaaagataagcaagaagaaaaaattccaagagattactatgcacgagatttggaaaatgtcgaaacagtgatagaaaaagaagatgttgaaaccaatgcttcaaatggtcagagagttgatttatcaagtgaactagataaactaaagaaacttgaaaacgcaacagttcacatggagtttaagccagatgccaaggccccagcattctataatctcttttctgtgtcaagtgctactaaaaaagatgagtacttcactatggcagtttacaataatactgctactctagaggggcgtggttcggatgggaaacagttttacaataattacaacgatgcacccttaaaagttaaaccaggtcagtggaattctgtgactttcacagttgaaaaaccgacagcagaactacctaaaggccgagtgcgcctctacgtaaacggggtattatctcgaacaagtctgagatctggcaatttcattaaagatatgccagatgtaacgcatgtgcaaatcggagcaaccaagcgtgccaacaatacggtttgggggtcaaatctacagattcggaatctcactgtgtataatcgtgctttaacaccagaagaggtacaaaaacgtagtcaactttttaaacgctcagatttagaaaaaaaactacctgaaggagcggctttaacagagaaaacggacatattcgaaagcgggcgtaacggtaacccaaataaagatggaatcaagagttatcgtattccagcacttctcaagacagataaaggaactttgatcgcaggtgcagatgaacgccgtctccattcgagtgactggggtgatatcggtatggtcatcagacgtagtgaagataatggtaaaacttggggtgaccgagtaaccattaccaacttacgtgacaatccaaaagcttctgacccatcgatcggttcaccagtgaatatcgatatggtgttggttcaagatcctgaaaccaaacgaatcttttctatctatgacatgttcccagaagggaagggaatctttggaatgtcttcacaaaaagaagaagcctacaaaaaaatcgatggaaaaacctatcaaatcctctaccgtgaaggagaaaagggagcttataccattcgagaaaatggtactgtctatacaccagatggtaaggcgacagactatcgcgttgttgtagatcctgttaaaccagcctatagcgacaagggtgatctatacaagggtgaccaattactaggaaatatctacttcacaacaaacaaaacttctccatttagaattgccaaggatagctatctatggatgtcctacagtgatgacgacgggaagacatggtcagctcctcaagatattactccgatggtcaaagccgattggatgaaattcttgggtgtaggtcctggaacaggaattgtacttcggaatgggcctcacaagggacggattttgataccggtttatacgactaataatgtatctcacttagatggctcgcaatcttctcgtgtcatctattcagatgatcatggaaaaacttggcatgctggagaagcggtcaacgataaccgtcaggtagacggtcaaaagatccactcttctacgatgaacaatagacgtgcgcaaaatacagaatcaacggtggtacaactaaacaatggagatgttaaactctttatgcgtggtttgactggagatcttcaggttgctacaagtaaagacggaggagtgacttgggagaaggatatcaaacgttatccacaggttaaagatgtctatgttcaaatgtctgctatccatacgatgcacgaaggaaaagaatacatcatcctcagtaatgcaggtggaccgaaacgtgaaaatgggatggtccacttggcacgtgtcgaagaaaatggtgagttgacttggctcaaacacaatccaattcaaaaaggagagtttgcctataattcgctccaagaattaggaaatggggagtatggcatcttgtatgaacatactgaaaaaggacaaaatgcctataccctatcatttagaaaatttaattgggaatttttgagcaaaaatctgatttctcctaccgaagcgaac

SEQ ID NO: 3488 - protein, 800 aa, Streptococcus pneumoniae
  neuraminidase A FRAMESHIFT (nanA)
MSYFRNRDIDIERISMNRSVQERKCRYSIRKLSVGAVSMIVGAVVFGTSPVLAQEGASEQPLANETQLSGESSTLTDTEKSQPSSETELSGNKQEQERKDKQEEKIPRDYYARDLENVETVIEKEDVETNASNGQRVDLSSELDKLKKLENATVHMEFKPDAKAPAFYNLFSVSSATKKDEYFTMAVYNNTATLEGRGSDGKQFYNNYNDAPLKVKPGQWNSVTFTVEKPTAELPKGRVRLYVNGVLSRTSLRSGNFIKDMPDVTHVQIGATKRANNTVWGSNLQIRNLTVYNRALTPEEVQKRSQLFKRSDLEKKLPEGAALTEKTDIFESGRNGNPNKDGIKSYRIPALLKTDKGTLIAGADERRLHSSDWGDIGMVIRRSEDNGKTWGDRVTITNLRDNPKASDPSIGSPVNIDMVLVQDPETKRIFSIYDMFPEGKGIFGMSSQKEEAYKKIDGKTYQILYREGEKGAYTIRENGTVYTPDGKATDYRVVVDPVKPAYSDKGDLYKGDQLLGNIYFTTNKTSPFRIAKDSYLWMSYSDDDGKTWSAPQDITPMVKADWMKFLGVGPGTGIVLRNGPHKGRILIPVYTTNNVSHLDGSQSSRVIYSDDHGKTWHAGEAVNDNRQVDGQKIHSSTMNNRRAQNTESTVVQLNNGDVKLFMRGLTGDLQVATSKDGGVTWEKDIKRYPQVKDVYVQMSAIHTMHEGKEYIILSNAGGPKRENGMVHLARVEENGELTWLKHNPIQKGEFAYNSLQELGNGEYGILYEHTEKGQNAYTLSFRKFNWEFLSKNLISPTEAN

SEQ ID NO: 3489 - DNA, 225 bp, Streptococcus pneumoniae
atgatatttaaggcattcaagacaaaaaagcagagaaaaagacaagttgaactacttttgacagtttttttcgacagttttctgattgatttatttcttcacttatttgggattgtcccctttaagctggataagattctgattgtgagcttgattatatttcccattatttctacaagtatttatgcttatgaaaagctatttgaaaaagtgttcgataaggat

SEQ ID NO: 3490 - protein, 75 aa, Streptococcus pneumoniae
  hypothetical protein; Cellular location: membrane; Similar to strain R6 sequence 15903580 (8.E-38)
MIFKAFKTKKQRKRQVELLLTVFFDSFLIDLFLHLFGIVPFKLDKILIVSLIIFPIISTSIYAYEKLFEKVFDKD

SEQ ID NO: 3491 - DNA, 105 bp, Streptococcus pneumoniae
gtgttaatacttttcaaaaatctcttcaaaccacgtcagcttcgccttgccgtaggtatggttactgacttcgtcagttctatccacaacctcaaaacagtgttt

SEQ ID NO: 3492 - protein, 35 aa, Streptococcus pneumoniae
  box element
MLILFKNLFKPRQLRLAVGMVTDFVSSIHNLKTVF

SEQ ID NO: 3493 - DNA, 978 bp, Streptococcus pneumoniae
atgaaaaatccagctttgctagaagaaattaagacctatagaggaagggatgaggttccggaagactttgatgatttctgggatggggaagtgaaaaatgtttccacgcttccatcctaccacttggaggaaagagatttccacattcctcaagtcaagtgctatgagttaacatttgaaggaagcaaggaaggaaaggtctatgcacgcattgttcttccaaagagtgaggagaaggtcccattaatcttccattttcatggttatatgggacgtggctgggactgggccgacatgctgggcttcaccgtagctggttacggtgttgtttccatggatgtgcggggccagtcaggttactcacaagacggcttgcgttctcctttaggaaataccgtgaaggggcatattatccgtggtgctgtggaaggtcgggaccacctcttttataaggatgtttatctggatatttaccagttggtcgaaattgttgctagtctgtctcaggttgatgagaagcgtctttctagctatggtgcctcacaaggaggggctctagctctagttgcagcagcgctcaatcctcgaattcagaaaacagttgccatttatcccttcttgtcagacttcagacgggtgattgagattggtaatactagcgaggcttacgacgaacttttccgttatttcaagtttcacgaccccttccatgaaacagaggaggaaatcatggcgacccttgcctatatcgatgtcaaaaatcttgcccatcgtatccaaggtgaggttaagatgattacgggcttggacgacgatgtttgctatcccattacccagtttgcgatttataatcgtctgacctgcgataaaacctatcgcatcatgcctgagtatgctcacgaagccatgaatgtatttgtcaatgaccaagtctacaactggctctgtggaagtgagattccttttaaatatctaaaa

SEQ ID NO: 3494 - protein, 326 aa, Streptococcus pneumoniae
  acetyl xylan esterase, putative; Cellular location: cytoplasm; Similar to strain R6 sequence 15903581 (0.E+01)
MKNPALLEEIKTYRGRDEVPEDFDDFWDGEVKNVSTLPSYHLEERDFHIPQVKCYELTFEGSKEGKVYARIVLPKSEEKVPLIFHFHGYMGRGWDWADMLGFTVAGYGVVSMDVRGQSGYSQDGLRSPLGNTVKGHIIRGAVEGRDHLFYKDVYLDIYQLVEIVASLSQVDEKRLSSYGASQGGALALVAAALNPRIQKTVAIYPFLSDFRRVIEIGNTSEAYDELFRYFKFHDPFHETEEEIMATLAYIDVKNLAHRIQGEVKMITGLDDDVCYPITQFAIYNRLTCDKTYRIMPEYAHEAMNVFVNDQVYNWLCGSEIPFKYLK

SEQ ID NO: 3495 - DNA, 105 bp, Streptococcus pneumoniae
ttggctcttatactagagtcatcaaaaagaaacgaggactctcatatgacagtaacgattaaagtaaattaccaaaccactttccaaaagaaggaagcaaaaaac

SEQ ID NO: 3496 - protein, 35 aa, Streptococcus pneumoniae
  hypothetical protein; Cellular location: cytoplasm
MALILESSKRNEDSHMTVTIKVNYQTTFQKKEAKN

SEQ ID NO: 3497 - DNA, 147 bp, Streptococcus pneumoniae
atgaaaatcaaagagcaaactaggaagctaaccgcaggttgctcaaaacactgttttgaggttgtggatgaaactgacgaagtcagctcaaaacaccgttttgaggtggcagatagaactgacgaagtcagtaacatatatatacgg

SEQ ID NO: 3498 - protein, 49 aa, Streptococcus pneumoniae
  box element
MKIKEQTRKLTAGCSKHCFEVVDETDEVSSKHRFEVADRTDEVSNIYIR

SEQ ID NO: 3499 - DNA, 2013 bp, Streptococcus pneumoniae
atgaatctacatcaacccttgcatgtcttgcctggtgtgggaccaaagtcagcagaaaaatacgccaaactaggaattgaaaacttgcaagatctcttgctctactttcctttccgttatgaagacttcaaaaccaagcaggtgctggagctggaagacggtgagaaggcagttctttctggtcaggtagtgactcctgctagtgtccagtattatggtttcaagcgcaatcgcctgcgttttagtctcaagcagggagaggtcgtttttgcggtgaatttctttaaccagccctatctggctgataaaatagagttgggagcaacccttgctgtctttggaaaatgggaccgcgctaaggctagtctgactgggatgaaggttctggctcaggtagaagatgacctccagcctgtctatcgtctggctcagggaatcagtcaggccagtctggtcaaggtcatcaagacggcttttgatcagggactggacctcttgatagaagaaaatctgccccagtctttactagacaaatacaaactcatgtcccgttgtcaggcagtccgtgctatgcattttccaaagtatttggcagaatacaagcaggctcttcgccgtataaagtttgaggaactcttttatttccaaatgcagctgcagatgctcaagtctgaaaatagagttcagggaagtggtctggttctgaattggtctcaggaaaaagtgacagcagttaaagtaagtcttccttttgccctgacccaagctcaggaaaagagtttgcaggaaattttaactgatatgaagtccgaccaccacatgaatcgtctcctacaaggggatgtggggagtggaaaaacggtagtcgctggcttggccatgtttgcggcagtgacagcaggttatcaggctgccctaatggtaccaacagaaatcctcgcagagcaacactttgagagtttacagaacctttttcccaatttgaaactggctctcttgacaggttccttgaaagctgcagaaaagagagaagtcttggagaccattgccaagggtgaggctgatttgattataggaactcacgctctgatacaagatggggtggagtatgctcgtcttggtttgattattatcgatgagcagcaccgttttggtgtagggcaaaggcgtattttacgggaaaaaggtgacaatccagatgtcctcatgatgacggcgactcccattccacggacgcttgccatcacagcctttggagatatggatgtttccattatcgaccagatgccagcaggtcggaagcctattgtgacgcgctggatcaaacatgagcaactacctcaggtcttgacttggttagagggggaaattcaaaaaggttcccaagtctatgtcatctctcctttgattgaagaatcagaagctctagatttgaaaaatgccattgccttatcagaggagttgacgactcattttgcaggcaaggcagaggtggctcttctacatggtaggatgaagagtgacgaaaaagaccagatcatgcaggatttcaaggagagaaagacggatattctggtttcgacgacggttattgaggttggggtcaacgttcccaatgcgactgtcatgattatcatggatgccgatcgcttcggtctcagtcaacttcaccagcttagaggtcgtgtcggtcggggggacaagcagtcctacgctgttctcgttgctaatcccaagacggattctgggaaagaccgcatgcgtatcatgacagaaacgaccaatggatttgtccttgcggaggaagatttgaaaatgcgtggttctggtgagatttttggaaccagacagtcaggacttccagagttccaagtggctgatattatcgaagattttccgattttagaagaagcaagaaaggttgctagctacattagttctatagaagcttggcaagaagatccagagtggcgcatgattgcccttcatctggaaaagaaagaacatctggat

SEQ ID NO: 3500 - protein, 671 aa, Streptococcus pneumoniae
  ATP-dependent DNA helicase RecG (recG); Cellular location: membrane; Similar to strain R6 sequence 15903582 (0.E+01)
MNLHQPLHVLPGVGPKSAEKYAKLGIENLQDLLLYFPFRYEDFKTKQVLELEDGEKAVLSGQVVTPASVQYYGFKRNRLRFSLKQGEVVFAVNFFNQPYLADKIELGATLAVFGKWDRAKASLTGMKVLAQVEDDLQPVYRLAQGISQASLVKVIKTAFDQGLDLLIEENLPQSLLDKYKLMSRCQAVRAMHFPKYLAEYKQALRRIKFEELFYFQMQLQMLKSENRVQGSGLVLNWSQEKVTAVKVSLPFALTQAQEKSLQEILTDMKSDHHMNRLLQGDVGSGKTVVAGLAMFAAVTAGYQAALMVPTEILAEQHFESLQNLFPNLKLALLTGSLKAAEKREVLETIAKGEADLIIGTHALIQDGVEYARLGLIIIDEQHRFGVGQRRILREKGDNPDVLMMTATPIPRTLAITAFGDMDVSIIDQMPAGRKPIVTRWIKHEQLPQVLTWLEGEIQKGSQVYVISPLIEESEALDLKNAIALSEELTTHFAGKAEVALLHGRMKSDEKDQIMQDFKERKTDILVSTTVIEVGVNVPNATVMIIMDADRFGLSQLHQLRGRVGRGDKQSYAVLVANPKTDSGKDRMRIMTETTNGFVLAEEDLKMRGSGEIFGTRQSGLPEFQVADIIEDFPILEEARKVASYISSIEAWQEDPEWRMIALHLEKKEHLD

SEQ ID NO: 3501 - DNA, 1122 bp, Streptococcus pneumoniae
gtgtcattttggaggaaaatcatgaaagctagtccacatagaccaaccaaggctctgattcatctgggagctattcgacaaaatattcagcaaatgggggctcatatccctcaaggaacgctcaagttggctgtggttaaggccaatgcttatggtcatggagctgttgccgttgccaaggcaattcaagatgatgttgatggcttttgcgtttccaatatcgatgaagccattgaactcagacaagctggactcagcaagccaatcctcattttaggagtttctgaaatcgaagctgttgctctagctaaagaatatgacttcaccttgacagtggctggactggagtggattcaagcactcttagataaggaagtggacctaactggattgacagtccacctcaagattgattcagggatgggacggattggttttagagaggcaagtgaggttgagcaggctcaagatttgctccaacaacacggtgtttgtgttgaaggaatctttacccactttgctactgctgatgaggaatcagatgactattttaatgcccagttagaacggtttaaaactattttagctagtatgaaggaagttccagagctggttcatgctagcaattctgcaacgactctttggcatgtagagactattttcaatgcggttcgtatgggagatgccatgtatggcctcaatccaagtggagcggtcttggatttgccttatgatttgataccggccttgaccttggagtctgctctggttcatgtcaagacagttccagctggagcttgcatgggctatggagcaacttatcaagcggatagcgagcaagtcatcgcgaccgtgccaatcgggtatgcagatggatggacaagagacatgcaaaatttctctgtcttggtagatggccaagcttgcccaattgtcggcagggtttcgatggaccaaatcactattcgattgcctaagctttatccgctaggaaccaaggtaaccttgattggctccaatggggataaggaaatcactgcaactcaggtagcgacctaccgcgtaaccattaactatgaggtggtttgcctcctcagcgaccgtattccgagagaatattat

SEQ ID NO: 3502 - protein, 374 aa, Streptococcus pneumoniae
  alanine racemase (alr); Cellular location: cytoplasm; Similar to strain R6 sequence 15903583 (0.E+01)
MSFWRKIMKASPHRPTKALIHLGAIRQNIQQMGAHIPQGTLKLAVVKANAYGHGAVAVAKAIQDDVDGFCVSNIDEAIELRQAGLSKPILILGVSEIEAVALAKEYDFTLTVAGLEWIQALLDKEVDLTGLTVHLKIDSGMGRIGFREASEVEQAQDLLQQHGVCVEGIFTHFATADEESDDYFNAQLERFKTILASMKEVPELVHASNSATTLWHVETIFNAVRMGDAMYGLNPSGAVLDLPYDLIPALTLESALVHVKTVPAGACMGYGATYQADSEQVIATVPIGYADGWTRDMQNFSVLVDGQACPIVGRVSMDQITIRLPKLYPLGTKVTLIGSNGDKEITATQVATYRVTINYEVVCLLSDRIPREYY

SEQ ID NO: 3503 - DNA, 360 bp, Streptococcus pneumoniae
atgatagttggacacggaattgacatcgaagaattggcttcgatagaaagcgcagttacacgacatgaaggatttgctaagcgtgtactgaccgctcaggaaatggagcgcttcaccagtctcaaaggacgcaggcaaatagaatatttagctggtcgctggtcggctaaggaggccttttccaaggctatgggaacgggcattagcaagctcggttttcaggatttggaagtcttgaacaatgaacgtggggcgccttattttagtcaggcaccattttcaggaaagatttggctgtctatcagccacaccgatcagtttgtgacagccagtgtcattttggaggaaaatcatgaaagc

SEQ ID NO: 3504 - protein, 120 aa, Streptococcus pneumoniae
  holo-(acyl-carrier protein) synthase (acpS); Cellular location: cytoplasm; Similar to strain R6 sequence 15903584 (5.E-65)
MIVGHGIDIEELASIESAVTRHEGFAKRVLTAQEMERFTSLKGRRQIEYLAGRWSAKEAFSKAMGTGISKLGFQDLEVLNNERGAPYFSQAPFSGKIWLSISHTDQFVTASVILEENHES

SEQ ID NO: 3505 - DNA, 1029 bp, Streptococcus pneumoniae
atggcatttattgaaaaaggtcaagaaatcgatatggaagtcatcaaggctgaaacccaattgtctgcggaagccttgagactcaaggaaagccgtgacagggaattggcagatattatttcaggggaagatgaccgtattctcttggtgattggtccttgctcttctgataatgaagaggcggtcttggaatatgctcgccgtttatctgccttgcaaaagaaggtagcggataagattttcatggtcatgcgcgtgtatactgctaagcctcgtaccaatggagacggctataaaggattagttcaccagccagatacttctaaggctccaagcctgattaatggcttgcaggctgtgcgccagttgcactaccgcgtgattacagagactggtttgacaacggcagatgagatgctttatccgtcaaatctgatcttggtggatgacttggtcagctaccatgccgttggagctcgttctgtggaagaccaagagcaccgctttgtggcttctgggattgatgcaccagtagggatgaaaaatccaacctcaggaaatttgggtgttatgtttaacgccatctatgctgctcaaaacaagcaaaccttcctttatcatgggcaggaagttgagacatcaggtaatcctttggcccatgttatcctccgtggagcagtcaacgagtatggcaattatatgccgaattactactatgaaaatctactccaagccattgaacgctatgaaaccatgggacttgaaaatccttttatcctcattgacaccaaccatgataactcaggcaagcaatatatggagcagattcgaattgttcgccagaccttgcagaatcgtgattggaatgagaaaattaaaaagacggttcgaggatttatgattgaatcttacctagcagatggtcgtcaaaaccaaccagagatctttggttgctctattactgacccttgcctaggttgggaaaatacagaggccttggtagaagagatttatgttaccttgacaaaa

SEQ ID NO: 3506 - protein, 343 aa, Streptococcus pneumoniae
  phospho-2-dehydro-3-deoxyheptonate aldolase; Cellular location: cytoplasm; Similar to strain R6 sequence 15903585 (0.E+01)
MAFIEKGQEIDMEVIKAETQLSAEALRLKESRDRELADIISGEDDRILLVIGPCSSDNEEAVLEYARRLSALQKKVADKIFMVMRVYTAKPRTNGDGYKGLVHQPDTSKAPSLINGLQAVRQLHYRVITETGLTTADEMLYPSNLILVDDLVSYHAVGARSVEDQEHRFVASGIDAPVGMKNPTSGNLGVMFNAIYAAQNKQTFLYHGQEVETSGNPLAHVILRGAVNEYGNYMPNYYYENLLQAIERYETMGLENPFILIDTNHDNSGKQYMEQIRIVRQTLQNRDWNEKIKKTVRGFMIESYLADGRQNQPEIFGCSITDPCLGWENTEALVEEIYVTLTK

SEQ ID NO: 3507 - DNA, 1029 bp, Streptococcus pneumoniae
atggtatttacagcaaaaagctctaaaataaatatagaagaagttcgtgccttgtcaaaattagaaggtcaggctttggagaggaaatcacagcgagatcaagagctagaagccattatacgtggagaagaccagcgaattctcttggtaatcgggccatgctcatctgacaacgaagaagctgtccttgaatacgctaagcgtttggcagtcctacaagaagaagtggcagatcgtatctttatggttatgcgtgtttatactgccaaaccccgtaccaacggagatggctataagggcttgattcaccagcctaacgcgacagaagcgcctagtcttatcaatggaatcaaagccgttcgccatcttcactatcgtgtcatcacagaaacagggatgacaactgctgatgaaatgctttatcctgaaaaccttccgcttgtagatgatttgatttcttacatggcagttggtgcccgttcagttgaagaccagcaacaccgctttgtggcaagtggggcaggattttctactggttttaaaaatccaacctctggaaatctcaatgtcatgtttaatgggatttatgctgctcaaaacaaacaaagtttccttttcttaggaaaagaagtagaaacaactgggaacccgctttcacacgctattcttcgtggtgctcttaatgagtatggaaaaaatattcccaactactattatgacaatttaattgataccattgcccagtatgagaaaatgggcttggaaaatccttttatcatcattgataccaatcatgacaattctggtaagcagtatattgaacagatccgaattgtccgccagaccttgattaaccgtgcttggaatgaaaaaattaagcagttcgttcgtggttttatgattgagtcttatctggaagatggtcgacaaaatgagccagaagtatttggtaagtctatcacagacccttgcctgggttgggataacacagaagctcttgtcagagaaatttacaaaacgttaggagaa

SEQ ID NO: 3508 - protein, 343 aa, Streptococcus pneumoniae
  phospho-2-dehydro-3-deoxyheptonate aldolase; Cellular location: cytoplasm; Similar to strain R6 sequence 15903586 (0.E+01)
MVFTAKSSKINIEEVRALSKLEGQALERKSQRDQELEAIIRGEDQRILLVIGPCSSDNEEAVLEYAKRLAVLQEEVADRIFMVMRVYTAKPRTNGDGYKGLIHQPNATEAPSLINGIKAVRHLHYRVITETGMTTADEMLYPENLPLVDDLISYMAVGARSVEDQQHRFVASGAGFSTGFKNPTSGNLNVMFNGIYAAQNKQSFLFLGKEVETTGNPLSHAILRGALNEYGKNIPNYYYDNLIDTIAQYEKMGLENPFIIIDTNHDNSGKQYIEQIRIVRQTLINRAWNEKIKQFVRGFMIESYLEDGRQNEPEVFGKSITDPCLGWDNTEALVREIYKTLGE

SEQ ID NO: 3509 - DNA, 2511 bp, Streptococcus pneumoniae
atggctaatattttaaaaacaattatcgaaaatgataaaggagaaatccgtcgtctggaaaagatggctgacaaggttttcaaatacgaagaccaaatggctgctttgactgacgaccaactaaaagcaaaaacagttgaatttaaggaacgttatcaaaatggagaatcactggattcattgctttacgaagcatttgcggttgtccgtgaaggtgccaaacgtgtcctaggtctcttcccttataaggttcaggtcatgggggggattgttcttcaccatggtgacgtgccagagatgcgtacaggggaagggaaaaccttgactgcgaccatgccggtatacctcaatgccctttcaggtaaaggggttcacgtagttacggttaatgaatacctgtcagaacgtgacgcgactgagatgggtgaattgtactcttggcttggtttgtcagtagggattaacttggctaccaaatctccaatggagaaaaaagaagcctatgagtgtgatattacttactcaactaactcagaaatcggatttgactaccttcgtgacaacatggtcgttcgcgccgaaaacatggtacaacgtccgcttaactatgccttggtcgatgaggttgactctatcttgattgacgaggctcgtacacctttgattgtatcaggtgccaatgcggttgaaaccagtcagttgtatcacatggcagaccactatgtaaaatctttgaacaaagatgactacatcatcgatgtgcagtctaagactattggtttgtctgattcagggattgacagggctgaaagctacttcaaacttgaaaacctctatgacatcgaaaacgtggctttgactcactttatcgataacgcccttcgtgccaactacatcatgcttctcgatattgactatgtggtgagcgaagagcaagaaatcttgattgtcgaccaatttacaggtcgtaccatggaaggtcgtcgttattctgatggattgcaccaagctattgaagccaaagaaggtgtgccaatccaggatgaaaccaagacatctgcctcaatcacgtaccaaaacctcttccgtatgtacaagaaattgtctggtatgacgggtacaggtaagactgaggaagaagaattccgtgaaatctacaacattcgtgttattccaatcccaacaaaccgtcctgttcaacgtattgaccactcagaccttctttatgcaagtatcgaatctaagtttaaagcggttgtcgaagacgttaaggctcgttaccaaaagggtcaacctgtcttggttggtacagtagcggttgaaactagtgactacatttctaagaaattggttgcagctggtgttcctcacgaagtcttgaatgccaaaaaccactatagagaagcccaaatcatcatgaatgctggtcaacgtggtgccgttaccatcgcaaccaacatggcgggtcgtggtaccgacatcaagcttggtgaaggtgttcgtgaacttggaggactttgtgttattggtacagaacgtcatgaaagtcgtcgtatcgataaccagcttcgtggacgttcaggtcgtcaaggagatccaggtgagtcacaattctacctatctcttgaagatgatttgatgaaacgttttggttctgaacgcttgaagggaatctttgaacgcttgaacatgtctgaagaggccattgagtctcgcatgttgacgcgtcaggttgaagcagctcagaaacgtgtcgaaggaaataactacgatacccgtaaacaagtccttcaatacgatgatgtcatgcgtgaacaacgtgagattatctatgctcaacgttacgatgtcatcactgcagatcgtgacttggcacctgaaattcagtctatgatcaaacgcacgattgaacgtgtcgttgatggtcatgcgcgtgccaaacaagatgaaaaactagaggcaattttgaactttgctaagtacaacttgcttcctgaagattctattacgatggaagacttgtcaggcttgtctgataaggccatcaaggaagagcttttccaacgttccttgaaggtttacgatagtcaggtttcaaaactacgcgatgaagaagcagttaaagaattccaaaaagttttgattctacgagtggtggataacaagtggacagatcatatcgatgcccttgatcaattgcgtaacgcggttggacttcgtggctatgctcagaacaaccctgttgttgagtatcaggcagaaggtttccgtatgtttaatgatatgattggttcgattgagtttgatgtgacacgcttgatgatgaaagcacaaattcatgaacaagaaagaccacaggcagaacgtcatatcagtacaacagcgactcgcaatatcgctgctcaccaagcaagtatgccagaagatttggatttgagccagattggacgcaatgaactttgcccatgtggttctggtaagaaatttaaaaactgtcacggtaaaagacaa

SEQ ID NO: 3510 - protein, 837 aa, Streptococcus pneumoniae
  preprotein translocase, SecA subunit (secA); Cellular location: cytoplasm; Similar to strain R6 sequence 15903587 (0.E+01)
MANILKTIIENDKGEIRRLEKMADKVFKYEDQMAALTDDQLKAKTVEFKERYQNGESLDSLLYEAFAVVREGAKRVLGLFPYKVQVMGGIVLHHGDVPEMRTGEGKTLTATMPVYLNALSGKGVHVVTVNEYLSERDATEMGELYSWLGLSVGINLATKSPMEKKEAYECDITYSTNSEIGFDYLRDNMVVRAENMVQRPLNYALVDEVDSILIDEARTPLIVSGANAVETSQLYHMADHYVKSLNKDDYIIDVQSKTIGLSDSGIDRAESYFKLENLYDIENVALTHFIDNALRANYIMLLDIDYVVSEEQEILIVDQFTGRTMEGRRYSDGLHQAIEAKEGVPIQDETKTSASITYQNLFRMYKKLSGMTGTGKTEEEEFREIYNIRVIPIPTNRPVQRIDHSDLLYASIESKFKAVVEDVKARYQKGQPVLVGTVAVETSDYISKKLVAAGVPHEVLNAKNHYREAQIIMNAGQRGAVTIATNMAGRGTDIKLGEGVRELGGLCVIGTERHESRRIDNQLRGRSGRQGDPGESQFYLSLEDDLMKRFGSERLKGIFERLNMSEEAIESRMLTRQVEAAQKRVEGNNYDTRKQVLQYDDVMREQREIIYAQRYDVITADRDLAPEIQSMIKRTIERVVDGHARAKQDEKLEAILNFAKYNLLPEDSITMEDLSGLSDKAIKEELFQRSLKVYDSQVSKLRDEEAVKEFQKVLILRVVDNKWTDHIDALDQLRNAVGLRGYAQNNPVVEYQAEGFRMFNDMIGSIEFDVTRLMMKAQIHEQERPQAERHISTTATRNIAAHQASMPEDLDLSQIGRNELCPCGSGKKFKNCHGKRQ

SEQ ID NO: 3511 - DNA, 285 bp, Streptococcus pneumoniae
atggcacatctaaaatcatttattacacgatattccaaggtttatattggtttagttctgctgatctggctgtctttcttctttatcccttgggataaaccacttctggggataaggattgacatcttcatcatacagaaaatcttgctagcttttggaattctgtccattctcatggccttgctgtccaagaaagtcagtctctttgtttttggactgatttgctgtctttctctttggattaacttatttatcacatttgccattttgccgatttttggcaat

SEQ ID NO: 3512 - protein, 95 aa, Streptococcus pneumoniae
  conserved domain protein; Cellular location: membrane; Similar to strain R6 sequence 15903588 (8.E-25)
MAHLKSFITRYSKVYIGLVLLIWLSFFFIPWDKPLLGIRIDIFIIQKILLAFGILSILMALLSKKVSLFVFGLICCLSLWINLFITFAILPIFGN

SEQ ID NO: 3513 - DNA, 630 bp, Streptococcus pneumoniae
atgagacttgaaattataaatggacagaaaatttatgggaaaagacctattttaaatcagttgaatttggtgtttcaatcaggaaaaatttatggacttaaaggtgataatggatctggcaagacggttcttttaaagatacttgctggttatattaagcttgacaaaggaaaagttcttcaagatggtaaagtttacggggtaaaaaatcattatattcaggatgcaggaattttaattgaaaaagtcgagtttttatctcatttatccctgagagaaaatttggaactgttaaggtatttttcatctaaagttacggaaaaaagaattgcctattggattcaatactatgatttacaggaatttgaagacattgaataccgtcatttatccttaggaacaaagcaaaaaatggccttgattcaagcctttatttcctctccttctatactctttctcgatgaacctatgaatgctttggatgagaagagtgtgaggttaaccaaacaggtcattttatcttacctgaaaaaagaaaatggtctggttatcctgacgtcgcacatatcggaagatatttcagacctttgtacagatgtattagttgtcgaaaatggacatatacaaatg

SEQ ID NO: 3514 - protein, 210 aa, Streptococcus pneumoniae
  ABC transporter, ATP-binding protein; Cellular location: cytoplasm; Similar to strain R6 sequence 15903589 (e-115)
MRLEIINGQKIYGKRPILNQLNLVFQSGKIYGLKGDNGSGKTVLLKILAGYIKLDKGKVLQDGKVYGVKNHYIQDAGILIEKVEFLSHLSLRENLELLRYFSSKVTEKRIAYWIQYYDLQEFEDIEYRHLSLGTKQKMALIQAFISSPSILFLDEPMNALDEKSVRLTKQVILSYLKKENGLVILTSHISEDISDLCTDVLVVENGHIQM

SEQ ID NO: 3515 - DNA, 639 bp, Streptococcus pneumoniae
atgtttaagaattttaacaatattttgctaaatagaaagattgttttactacttcgtatagttctgatgatgattttgataaaccatctattgtcaacagcggttcaaaagcaggatgctgttatctttttcaagagagaattgatttcaattttttcctataatgactattctgaagcgaatttagaaatccccaaactattgttaaacctttcgcttttcatggtaggatggctctctgtcattttacttgaaagtgatttggcagaccattaccatcacttgattcgctatcaatcaagctcctttttcgattatacaaggaaacgattggttgtcatttctaaattttttactcaagatttgtttgtctggtttcttggtttacttcctctaggaattcatttcaaaacagtcgcacttttctttttacttgctcagttaatgatgttgtacttactactgtcttatctgatagcactgattagtgcgggcgctggtttttccttttttctctattttttagcatttgtgggacaagaatggatgatggatcatattgtaacagtgtatttagtactcttaagtttattagttatgttgattgttagtcgcttggaagagaaatttaagaaagga

SEQ ID NO: 3516 - protein, 213 aa, Streptococcus pneumoniae
  hypothetical protein; Cellular location: membrane; Similar to strain R6 sequence 15903590 (e-114)
MFKNFNNILLNRKIVLLLRIVLMMILINHLLSTAVQKQDAVIFFKRELISIFSYNDYSEANLEIPKLLLNLSLFMVGWLSVILLESDLADHYHHLIRYQSSSFFDYTRKRLVVISKFFTQDLFVWFLGLLPLGIHFKTVALFFLLAQLMMLYLLLSYLIALISAGAGFSFFLYFLAFVGQEWMMDHIVTVYLVLLSLLVMLIVSRLEEKFKKG

SEQ ID NO: 3517 - DNA, 828 bp, Streptococcus pneumoniae
ttgagtattatattactttctatttgtaggaggtggcttatgaagattcctctcttaacttttgcaaggcataaatttgtttatgtcttgcttactttgctttttcttgctttggtttatcgtgatgttttgatgacttatttcttttttgatattcatgcgcccgatctagctaaattcgatggacaagcaattaaaaatgacttattaaaatcagcattagattttcgtattctccagttcaatctaggtttttatcaatcatttattattccaatcatcattgttttgctaggttttcaatatattgagctgaaaaataaagttttacgattgagtattggaagagaagtgagttatcaagggttaaaaagaaagttgactttgcaagttgcaagtatcccttgtttgatatatttagtgactgtgctgataattgcaattataacctatttctttgggactttttctcctcttggatggaattctctattttctgatggaagtggtttacaaagactcctagatggagagataaaaagctatttgttctttacttgtgtcctactaatcggtattttcatcaatgcaatctattttttacaaatagttgattatgtggggaatgtgactcgttcggcaatcacctatttgatgtttctttggcttggttctatgctgctttatagtgccttgccttactatatggttcctatgacgagtttgatgcaagctagctatggggatgtaagtttgatgaaactctttactccttatatcctttatattgtcccttacatggtgcttgaaaaatatgaagataatgtt

SEQ ID NO: 3518 - protein, 276 aa, Streptococcus pneumoniae
  hypothetical protein; Cellular location: membrane; Similar to strain R6 sequence 15903591 (e-148)
MSIILLSICRRWLMKIPLLTFARHKFVYVLLTLLFLALVYRDVLMTYFFFDIHAPDLAKFDGQAIKNDLLKSALDFRILQFNLGFYQSFIIPIIIVLLGFQYIELKNKVLRLSIGREVSYQGLKRKLTLQVASIPCLIYLVTVLIIAIITYFFGTFSPLGWNSLFSDGSGLQRLLDGEIKSYLFFTCVLLIGIFINAIYFLQIVDYVGNVTRSAITYLMFLWLGSMLLYSALPYYMVPMTSLMQASYGDVSLMKLFTPYILYIVPYMVLEKYEDNV

SEQ ID NO: 3519 - DNA, 336 bp, Streptococcus pneumoniae
gtgatggaacacttgtttaaaatgataatcttattaccctgtttttactttttcagctggattgacaaggataatagagaaagtaaatttttcccaattttttactatttttactggatttacatcaccctctatgctctttttagccttgcttggacagttttttcagttctgtttttcaatatcgtcttgagaaatttgacagatatcaagttatggggtatttggctattattactacttatcgcttttgctagtgactggttagcctatgtctttttcaaaaaaatgcttgacttgagacgggaactagggaagtctaaaggcggaaggcat

SEQ ID NO: 3520 - protein, 112 aa, Streptococcus pneumoniae
  hypothetical protein; Cellular location: membrane; Similar to strain R6 sequence 15903594 (9.E-58)
MMEHLFKMIILLPCFYFFSWIDKDNRESKFFPIFYYFYWIYITLYALFSLAWTVFSVLFFNIVLRNLTDIKLWGIWLLLLLIAFASDWLAYVFFKKMLDLRRELGKSKGGRH

SEQ ID NO: 3521 - DNA, 342 bp, Streptococcus pneumoniae
atgtcggtgatggaacatttgtttaaattcttacttttagcaccgtacttttattttgataactggattgaaaaggccaacagaaatagtaagttttttccaattttttattatttttactggttttacatccccttctattctctttttagccttgcttggacagttgtttcagttctgtttttcaataccgtcttgagaaatgtgacagatatcaagttatggggcatttggtttctttttattctgctagctattggtatgaattggttaacttattcctgtttcaaagaaatgtttcgcttgagacaggaactagggaagtctaagggtggaaggcat

SEQ ID NO: 3522 - protein, 114 aa, Streptococcus pneumoniae
  hypothetical protein; Cellular location: membrane; Similar to strain R6 sequence 15903595 (2.E-67)
MSVMEHLFKFLLLAPYFYFDNWIEKANRNSKFFPIFYYFYWFYIPFYSLFSLAWTVVSVLFFNTVLRNVTDIKLWGIWFLFILLAIGMNWLTYSCFKEMFRLRQELGKSKGGRH

SEQ ID NO: 3523 - DNA, 1308 bp, Streptococcus pneumoniae
atggccctaccaactattgccattgtaggacgtcccaatgttgggaaatcaaccctatttaatcggatcgctggtgagcgaatctccattgtagaagatgtcgaaggagtgacacgtgaccgtatttatgcaacgggtgagtggctcaatcgttcttttagcatgattgatacaggaggaattgatgatgtcgatgctcctttcatggaacaaatcaagcaccaggcagaaattgccatggaagaagcagatgttatcgtttttgtcgtgtctggtaaggaaggaattactgatgcagacgaatacgtagctcgtaagctttataagacccacaaaccagttatcctcgcagtcaacaaggtggacaaccctgagatgagaaatgatatatatgatttctatgctctcggtttgggtgaaccattgcctatctcatctgtccatggaatcggtacaggggatgtgctagatgcgatcgtagaaaatcttccaaatgaatatgaggaagaaaatccagatgtcattaagtttagcttgattggtcgtcctaacgttggaaaatcaagcttgatcaatgctatcttgggagaagaccgtgttattgctagtcctgttgctggaacaactcgtgatgccattgatacccactttacagatacagatggtcaagagtttaccatgattgatacggctggtatgcgtaagtctggtaaggtttatgaaaatactgagaaatactctgttatgcgtgccatgcgtgctattgaccgttcagatgtggtcttgatggtcatcaatgcggaagaaggcattcgtgagtacgacaagcgtatcgcaggatttgcccatgaagctggtaaagggatgattatcgtggtcaacaagtgggatacgcttgaaaaagataaccacactatgaaaaactgggaagaagatatccgtgagcagttccaatacctgccttacgcaccgattatctttgtatcagctttaaccaagcaacgtctccacaaacttcctgagatgattaagcaaatcagcgaaagtcaaaatacacgtattccatcagctgtcttgaacgatgtcatcatggatgccattgccatcaacccaacaccgacagacaaaggaaaacgtctcaagattttctatgcgacccaagtggcaaccaaaccaccaacctttgtcatctttgtcaatgaagaagaactcatgcacttttcttacctgcgtttcttggaaaatcaaatccgcaaggcctttgtttttgagggaacaccgattcatctcatcgcaagaaaacgcaaa

SEQ ID NO: 3524 - protein, 436 aa, Streptococcus pneumoniae
  phosphoglycerate dehydrogenase-related protein; Cellular location: cytoplasm; Similar to strain R6 sequence 15903596 (0.E+01)
MALPTIAIVGRPNVGKSTLFNRIAGERISIVEDVEGVTRDRIYATGEWLNRSFSMIDTGGIDDVDAPFMEQIKHQAEIAMEEADVIVFVVSGKEGITDADEYVARKLYKTHKPVILAVNKVDNPEMRNDIYDFYALGLGEPLPISSVHGIGTGDVLDAIVENLPNEYEEENPDVIKFSLIGRPNVGKSSLINAILGEDRVIASPVAGTTRDAIDTHFTDTDGQEFTMIDTAGMRKSGKVYENTEKYSVMRAMRAIDRSDVVLMVINAEEGIREYDKRIAGFAHEAGKGMIIVVNKWDTLEKDNHTMKNWEEDIREQFQYLPYAPIIFVSALTKQRLHKLPEMIKQISESQNTRIPSAVLNDVIMDAIAINPTPTDKGKRLKIFYATQVATKPPTFVIFVNEEELMHFSYLRFLENQIRKAFVFEGTPIHLIARKRK

SEQ ID NO: 3525 - DNA, 711 bp, Streptococcus pneumoniae
atgacagaaaccattaaattgatgaaggctcatacttcagtgcgcaggtttaaagagcaagaaattccccaagtagacttaaatgagattttgacagcagcccagatggcatcatcttggaagaatttccaatcctactctgtgattgtggtacgaagtcaagagaagaaagatgccttgtatgaattggtacctcaagaagccattcgccagtctgctgttttccttctctttgtcggagatttgaaccgagcagaaaagggagcccgacttcataccgacaccttccaaccccaaggtgtggaaggtctcttgattagttcggtcgatgcagctcttgctggacaaaacgccttgttggcagctgaaagcttgggctatggtggtgtgattatcggtttggttcgatacaagtctgaagaagtggcagagctctttaacctacctgactacacctattctgtctttgggatggcactgggtgtgccaaatcaacatcatgatatgaaaccgagactgccactagagaatgttgtctttgaggaagaataccaagaacagtcaactgaggcaatccaagcttatgaccgtgttcaggctgactatgctggggcgcgtgcgaccacaagctggagtcagcgcctagcagaacagtttggtcaagctgaaccaagctcaactagaaaaaatcttgaacagaagaaattattg

SEQ ID NO: 3526 - protein, 237 aa, Streptococcus pneumoniae
  nitroreductase family protein; Cellular location: membrane; Similar to strain R6 sequence 15903597 (e-129)
MTETIKLMKAHTSVRRFKEQEIPQVDLNEILTAAQMASSWKNFQSYSVIVVRSQEKKDALYELVPQEAIRQSAVFLLFVGDLNRAEKGARLHTDTFQPQGVEGLLISSVDAALAGQNALLAAESLGYGGVIIGLVRYKSEEVAELFNLPDYTYSVFGMALGVPNQHHDMKPRLPLENVVFEEEYQEQSTEAIQAYDRVQADYAGARATTSWSQRLAEQFGQAEPSSTRKNLEQKKLL

SEQ ID NO: 3527 - DNA, 894 bp, Streptococcus pneumoniae
atggaaagtgtcggagacgtactcaaacgtcaacccagccgtttttattatcaagatttggtccagaaaatcatgaaggaccctgatgttgcggcctttatccagcaagaatccttaactccaaaggaattaaatcgcagtatctccaagtttaatcagtacatcaccgagcgtgacaagtttctccgtggggatacggattatattgccaaaggctacaagccgattttggttaagaatcatggttatgcagatgtttcatatgaagaaactcctgagctaatcgcggctgaaaaagaagcggctattaagaaccgtctcaagttaatcaatctaccagccagtctcaagaaagctagtttggctcaagttgacttggatgatttggggcgcttaccagtttttgaaaagctactagccttcgtggagcaatatccagctattcgaaaaggtctttacttatatggagactttggtgtgggtaaaagtttcatggtggcggccttagctcatgatttatcagaaaaacgtggtgtttcatcaactctcctccactatcctagctttgtcattgatgtcaaaaatgctatcagtgatggcaatgttaagaccttggtggatgagattaagctgtctgaggtcctgattttagatgatattggcgccgagcaatcaaccgtttgggtgcgtgacgaaatcctgcaggtcattctccaatatcggatgcaggaaaatttaccgacctttttcacatccaacttcaactttgaagatttggagaagcattttgcgaaagtgaaacatggaaatgacgaaacctgggaagccagacgggtcatggaacgcatccgttatttggctgaggagactcgtttagaaggagtaaaccgtcga

SEQ ID NO: 3528 - protein, 298 aa, Streptococcus pneumoniae
  primosomal protein DnaI (dnaI); Cellular location: cytoplasm; Similar to strain R6 sequence 15903598 (e-151)
MESVGDVLKRQPSRFYYQDLVQKIMKDPDVAAFIQQESLTPKELNRSISKFNQYITERDKFLRGDTDYIAKGYKPILVKNHGYADVSYEETPELIAAEKEAAIKNRLKLINLPASLKKASLAQVDLDDLGRLPVFEKLLAFVEQYPAIRKGLYLYGDFGVGKSFMVAALAHDLSEKRGVSSTLLHYPSFVIDVKNAISDGNVKTLVDEIKLSEVLILDDIGAEQSTVWVRDEILQVILQYRMQENLPTFFTSNFNFEDLEKHFAKVKHGNDETWEARRVMERIRYLAEETRLEGVNRR

SEQ ID NO: 3529 - DNA, 1167 bp, Streptococcus pneumoniae
atgaagccaattgaccgtttttcttatctaaagaataatcgggtgtcgcaagatacctcatctctggtacagtgctacctcccgattatcggtcaggaggcactgagcctttatctttatacaatcagtttttgggataatggtagaaaggaatatcttttttcaagcattctcaaccatctcaactttgggatggatagactgataaaatcattgaaaatcttatctgcttttaatctcttgaccctctatcaaaagggtgatgtttatcagctagccctccatgctcctctatctagtcaagacttcttggggcatcctgtttatcgcagactcttagagaaaaagattggcgatgtagctgtggaggatttgaaagttgaaagtgctgatggtgaagaaatacctgtctcactcaatcaagtctttccagaattggcagaactaggcagtcaagaagaccttggtctcaagaagaaagtggccaatgattttgacttggaacattttcgccagctgatggctcgagatggacttcgttttgcggatgagcagtccgatgtcttaaacctctttgctattgccgaggagaagaaatggacttggtttgaaacctatcaattggccaagtcaacagctgtttcccaggttatttcaaccaaacgcatgcgtgaaaaaattgctcaaaaaccagtttcctctgactttagtcttaaggaagcgaccattatcaaagaagctaaaagtaaaactgccctgcagttcttagcagaaatcaagcaaacacgcaagggaaccattacccaaacagaaagagaactcttgcaacagatggctggcttgggcttactggacgaagtcatcaatattattctcttattgacctttaataaggtggattcggcaaatatcaatgagaaatatgccatgaaggtagccaatgactatgcctatcaaaagattcattcggcagaagaggccgttttacgaattcgtgatcgagggcagaaagcaaaaacacaaaaacagaatcagactgccccagaaaaaaccaatgttcctaaatggagtaatcctgaatataagaatgaaaccagcgaggaaactcgtctggaactagaacgtaagaagcaagaactattagctcgattagaaaaaggaggagat

SEQ ID NO: 3530 - protein, 389 aa, Streptococcus pneumoniae
  hypothetical protein (Chromosome replication); Cellular location: membrane; Similar to strain R6 sequence 15903599 (0.E+01)
MKPIDRFSYLKNNRVSQDTSSLVQCYLPIIGQEALSLYLYTISFWDNGRKEYLFSSILNHLNFGMDRLIKSLKILSAFNLLTLYQKGDVYQLALHAPLSSQDFLGHPVYRRLLEKKIGDVAVEDLKVESADGEEIPVSLNQVFPELAELGSQEDLGLKKKVANDFDLEHFRQLMARDGLRFADEQSDVLNLFAIAEEKKWTWFETYQLAKSTAVSQVISTKRMREKIAQKPVSSDFSLKEATIIKEAKSKTALQFLAEIKQTRKGTITQTERELLQQMAGLGLLDEVINIILLLTFNKVDSANINEKYAMKVANDYAYQKIHSAEEAVLRIRDRGQKAKTQKQNQTAPEKTNVPKWSNPEYKNETSEETRLELERKKQELLARLEKGGD

SEQ ID NO: 3531 - DNA, 471 bp, Streptococcus pneumoniae
atgcgttgtccaaaatgtggggctaccaagtcaagtgttatcgatagtcgccaagcagaagaagggaacaccattcgtagaagacgtgagtgcgacgaatgccaacaccgttttacaacctacgaacgagtagaagaaagaaccttagtggttgttaaaaaagatggcacacgggaacaattctccagagataaaatctttaatgggattatccgctcagcccagaaacgtcctgtgtcaagtgatgaaatcaacatggtagtcaatcgtatcgaacagaaactccgtggtcgaaatgaaaatgaaattcaaagtgaggacattggttcactcgtcatggaggagttggctgaattggacgagattacctatgtacgttttgctagtgtctatcgtagttttaaggatgtcagtgagttagagagcttgctccaacaaatcacccagtcctctaaaaagaaaaaggaaaga

SEQ ID NO: 3532 - protein, 157 aa, Streptococcus pneumoniae
  conserved hypothetical protein; Cellular location: cytoplasm; Similar to strain R6 sequence 15903600 (1.E-85)
MRCPKCGATKSSVIDSRQAEEGNTIRRRRECDECQHRFTTYERVEERTLVVVKKDGTREQFSRDKIFNGIIRSAQKRPVSSDEINMVVNRIEQKLRGRNENEIQSEDIGSLVMEELAELDEITYVRFASVYRSFKDVSELESLLQQITQSSKKKKER

SEQ ID NO: 3533 - DNA, 363 bp, Streptococcus pneumoniae
atgtcctggacatttgacaacaaaaaacccatctatttacagattatggagaaaatcaagcttcagattgtttcccatacactggaacccaatcaacaacttccaaccgtgagggagctagctagcgaggctggtgtcaatcccaataccatccaaagagccttatcagaccttgaacgagaaggatttgtctacagcaagcgaacaactggacgatttgtgactaaggataaggagctaatcgcccagtcacgcaaacaattatcagaagaagaattggaacacttcgtttcctccatgacccattttggctatgaaaaagaagaactaccaggcgtagtcagtgattatattaaaggagtt

SEQ ID NO: 3534 - protein, 121 aa, Streptococcus pneumoniae
  transcriptional regulator, GntR family; Cellular location: cytoplasm; Similar to strain R6 sequence 15903601 (6.E-66)
MSWTFDNKKPIYLQIMEKIKLQIVSHTLEPNQQLPTVRELASEAGVNPNTIQRALSDLEREGFVYSKRTTGRFVTKDKELIAQSRKQLSEEELEHFVSSMTHFGYEKEELPGVVSDYIKGV

SEQ ID NO: 3535 - DNA, 1503 bp, Streptococcus pneumoniae
gtgattatattaaaggagtttaagcctatgtcattactagtatttgaaaatgtatccaaatcatatggagcaacaccagcccttgaaaatgtttctcttgacattccagctggaaaaattgtcggccttcttgggccaaacggctcaggaaaaacaaccctgattaaactaattaatggcctcttacaaccagatcaaggacgtgtcctcatcaacgacatggacccaagcccagcaaccaaggccgttgtagcttatttgcctgatacgacctatctcaatgagcaaatgaaggtcaaagaagccctaacctacttcaagaccttctataaagatttcaatcttgaacgcgcccatcatctacttgcagacctgggcattgatgaaaatagtcgtctcaagaaactatcaaaagaaaacaaagaaaaggttcaactgattttggttatgagccgtgatgctcgtctctatgttttggacgaacccattggtggggtggatccagcagcccgtgcttatatcctcaataccattatcaacaactactcaccaacttctaccgttttgatttctacccacttgatttctgatatcgagccaatcttggatgaaattgtcttcctaaaagacggaaaagtcgtccgtcaaggaaatgtagatgatattcgctacgagtcaggtgaatccattgaccaactcttccgtcagaatttaaggcctaagcaaaggagattatttatgttttggaatttagttcgctacgaatttaaaaatgttaacaagtggtatttagccctctacgcagccgtgctagtcctttctgccctcatcggaatacagacacaaggctttaaaaatctaccttaccaagaaagtcaggctactatgctactttttctagctacagtctttggtggcttgatgcttacacttgggatttcaaccattttcttgattattaaacgcttcaaaggtagtgtctacgaccgacaaggctatctgactttgaccttgccagtttctgaacaccatatcatcacagccaaactaatcggtgcctttatctggtcattgattagcaccgctgtattggctctaagtgctgttattattctggctttaacagctccagaatggattcctctttcttatgtgattacatttgtagaaacacatctccctcagatctttcttacaggtatatccttcctactaaatactatttcaggaatcctctgcatctacctggctatttccattggacagcttttcaatgaataccgtacagcactcgctgttgcagtctacattggtatccaaatcgtcattggatttattgaacttttcttcaatcttagttctaatttctatgtcaattcactggtaggactcaatgaccatttctatatgggagcaggtatagccattgttgaagaactcatattcatagctatcttttatctcggaacctactacatcttgagaaataaggttaatttgctt

SEQ ID NO: 3536 - protein, 501 aa, Streptococcus pneumoniae
  ABC transporter, ATP-binding protein; Cellular location: membrane; Similar to strain R6 sequence 15903603 (e-147)
MIILKEFKPMSLLVFENVSKSYGATPALENVSLDIPAGKIVGLLGPNGSGKTTLIKLINGLLQPDQGRVLINDMDPSPATKAVVAYLPDTTYLNEQMKVKEALTYFKTFYKDFNLERAHHLLADLGIDENSRLKKLSKENKEKVQLILVMSRDARLYVLDEPIGGVDPAARAYILNTIINNYSPTSTVLISTHLISDIEPILDEIVFLKDGKVVRQGNVDDIRYESGESIDQLFRQNLRPKQRRLFMFWNLVRYEFKNVNKWYLALYAAVLVLSALIGIQTQGFKNLPYQESQATMLLFLATVFGGLMLTLGISTIFLIIKRFKGSVYDRQGYLTLTLPVSEHHIITAKLIGAFIWSLISTAVLALSAVIILALTAPEWIPLSYVITFVETHLPQIFLTGISFLLNTISGILCIYLAISIGQLFNEYRTALAVAVYIGIQIVIGFIELFFNLSSNFYVNSLVGLNDHFYMGAGIAIVEELIFIAIFYLGTYYILRNKVNLL

SEQ ID NO: 3537 - DNA, 1197 bp, Streptococcus pneumoniae
atgagaaatatgtgggttgtaatcaaggaaacctatcttcgacatgtcgagtcatggagtttcttctttatggtgatttcgccgttcctctttttaggaatctctgtaggaattgggcatctccaaggttcttctatggctaaaaataataaagtggcagtagtgacaacagtgccatctgtagcagaaggactgaagaatgtaaatggtgttaacttcgactataaagacgaagcaagtgccaaagaagcaattaaagaagaaaaattaaaaggttatttgaccattgatcaagaagatagtgttctaaaggcagtttatcatggcgaaacatcgcttgaaaatggaattaaatttgaggttacaggtacactcaatgaactgcaaaatcagcttaatcgttcaactgcttccttgtctcaagagcaggaaaaacgcttagcgcagacaattcaattcacagaaaagattgatgaagccaaggaaaataaaaagtttattcaaacaattgcagcaggtgccttaggattctttctttatatgattctgattacctatgcgggtgtaacagctcaggaagttgccagtgaaaaaggcaccaaaattatggaagtcgttttttctagcataagggcaagtcactatttctatgcgcggatgatggctctgtttctagtgattttaacgcatattgggatctatgttgtaggtggtctggctgccgttttgctctttaaagatttgccattcttggctcagtctggtattttggatcacttgggagatgctatctcactgaataccttgctctttattttgatcagtcttttcatgtacgtagtcttggcagccttcctaggatctatggtttctcgtcctgaggactcagggaaagccttgtcgcctttgatgattttgattatgggtggtttttttggagtgacagctctaggtgcagctggtgacaatctcctcttgaagattggttcttatattccctttatttcgaccttctttatgccgtttcgaacgattaatgactatgcggggggagcagaagcatggatttcacttgctattacagtgatttttgcggtggtagcaacaggatttatcggacgcatgtatgctagtctcgttcttcaaacggatgatttagggatttggaaaacctttaaacgtgccttatcttataaa

SEQ ID NO: 3538 - protein, 399 aa, Streptococcus pneumoniae
  conserved hypothetical protein (ABC transporter); Cellular location: membrane; Similar to strain R6 sequence 15903604 (0.E+01)
MRNMWVVIKETYLRHVESWSFFFMVISPFLFLGISVGIGHLQGSSMAKNNKVAVVTTVPSVAEGLKNVNGVNFDYKDEASAKEAIKEEKLKGYLTIDQEDSVLKAVYHGETSLENGIKFEVTGTLNELQNQLNRSTASLSQEQEKRLAQTIQFTEKIDEAKENKKFIQTIAAGALGFFLYMILITYAGVTAQEVASEKGTKIMEVVFSSIRASHYFYARMMALFLVILTHIGIYVVGGLAAVLLFKDLPFLAQSGILDHLGDAISLNTLLFILISLFMYVVLAAFLGSMVSRPEDSGKALSPLMILIMGGFFGVTALGAAGDNLLLKIGSYIPFISTFFMPFRTINDYAGGAEAWISLAITVIFAVVATGFIGRMYASLVLQTDDLGIWKTFKRALSYK

SEQ ID NO: 3539 - DNA, 890 bp, Streptococcus pneumoniae
atgctagaagtaagaagtctagagaaaagttttggatccaagcaagttttgtttggtattgactttcaagcgcgaccaggtcgtattttgggactagtcggaaaaaatggtgctggaaaaacaacgattttccatagtattttgaaattcctagaatatcagggagaaatcggtctggatggtcaggatattcgtcaggagacctatgctcggattggttatctgcctgaagaacgcatctcatgcctaaattgacagttcttgaacaagttcgctacttggcgactctaaaaggcatggatgccaaagaagtcaaagaaaaactccctcaatggatgaagaggttggaagtgaaaggaaagctgacagataaaatcaagagtctgtcaaaaggaaatcagcagaagattcagctcattattactctgattcatgaaccagacctgattatcttggatgagccttttagtggattggacccagttaatacagaattgctcaaacaagtcatttttcaggaaaaagagcgcggagcaaccattatcttttctgaccatgtcatgaccaatgttgaggaactttgtgacgatattctgatgatccgagatggccgtgtggtcttgcacggaccagttcaggatgtccgcaatcaatacgggaaaacgcgtctctttgtttcaagtgaacgaagcaaggaagaattggaaaatcttcctcatgtcaaacaggtgagcttgaccaaacaaggcagttggaaattgattttggaggatgagagcgctggaagggaactcttctcaatcttgactcaaggtcaatatatcgcaacatttgaccaacaagcgccaactatcgatgaaatctttaaactagaatcaggagtggaagta

SEQ ID NO: 3540 - skipped

SEQ ID NO: 3541 - DNA, 102 bp, Streptococcus pneumoniae
ttgattttcattgagtataaaagtgctccaggccatattttacacagcaatagtcttctaaaaatggacaaaaaacattgtaaaggctatcaaaaaggagta

SEQ ID NO: 3542 - protein, 34 aa, Streptococcus pneumoniae
  box element
MIFIEYKSAPGHILHSNSLLKMDKKHCKGYQKGV

SEQ ID NO: 3543 - DNA, 189 bp, Streptococcus pneumoniae
atgaaaatcaaagagcaaactaggaagctagccgtagactgctcaaagtacagctttgaggttgcagataaaactgacgaagtcgactcaaaacactgttttgaggttgtggatagaactgacgaagtcgataactatatctacggcaaggcgaagctgacgtggtttgaagagattttcgaagagtat

SEQ ID NO: 3544 - protein, 63 aa, Streptococcus pneumoniae
  box element
MKIKEQTRKLAVDCSKYSFEVADKTDEVDSKHCFEVVDRTDEVDNYIYGKAKLTWFEEIFEEY

SEQ ID NO: 3545 - DNA, 99 bp, Streptococcus pneumoniae
atgaacttgtttcttataaaaatgttgtctgaaactattagcctttttccagaagttttagaggaagaaaactttacgaggaaaaaggagttactcaaa

SEQ ID NO: 3546 - protein, 33 aa, Streptococcus pneumoniae
  hypothetical protein (ABC transporter); Cellular location: cytoplasm; Similar to strain R6 sequence 15903605 (e-166)
MNLFLIKMLSETISLFPEVLEEENFTRKKELLK

SEQ ID NO: 3547 - DNA, 615 bp, Streptococcus pneumoniae
atgtcacaggataaacaaatgaaagctgtttctccccttctgcagcgagttatcaatatctcatcgattgtcggtggggttgggagtttgattttctgtatttgggcttatcaggctgggattttacaatccaaggaaaccctctctgcctttatccagcaggcaggcatctggggtccacctctctttatctttttacagattttacagactgtcgtccctatcattccaggggccttgacctcggtggctggggtctttatctacgggcacatcatcgggactatctacaactatatcggcatcgtgattggctgtgccattatcttttatctagtgcgcctatacggagctgcctttgtccagtctgtcgtcagcaagcgcacctacgacaagtacatcgactggctagataagggcaatcgttttgaccgcttctttatttttatgatgatttggcccattagcccagctgactttctctgtatgctggctgccctgaccaagatgagcttcaagcgctacatgaccatcatcattctgaccaaaccctttaccctcgtggtttatacctacggtctgacctatattattgactttttctggcaaatgctt

SEQ ID NO: 3548 - protein, 205 aa, Streptococcus pneumoniae
  conserved hypothetical protein; Cellular location: membrane; Similar to strain R6 sequence 15903607 (e-116)
MSQDKQMKAVSPLLQRVINISSIVGGVGSLIFCIWAYQAGILQSKETLSAFIQQAGIWGPPLFIFLQILQTVVPIIPGALTSVAGVFIYGHIIGTIYNYIGIVIGCAIIFYLVRLYGAAFVQSVVSKRTYDKYIDWLDKGNRFDRFFIFMMIWPISPADFLCMLAALTKMSFKRYMTIIILTKPFTLVVYTYGLTYIIDFFWQML

SEQ ID NO: 3549 - DNA, 885 bp, Streptococcus pneumoniae
atgacaaaattatatggaagcttggaagcgggcggtacaaagtttgtctgtgctgtcggtgatgaaaactttaacgttgtagaaaaaacacaatttccaacaacaactccaatcgaaacaatcgataaaaccattgagttcttctcaaaattcgataaccttgctggtcttgcagttggttcatttgggccgattgatattgacaaaaactcaaaaacttatggctttatcacgacgactccaaaaccaaactgggcaaatgtagacttgcttggtgcccttcgtcgcgccctaaacgtgccaatgtacttcacaacagacgtaaacagctctgcttacggtgaaatggttgcccgtaacaatgctggtggtcgtatcgaaaacttggtttactacacaatcggtacaggtatcggtgcaggcgtcatccaacgtggtgagtttatcggtggtgtgggtcaccctgaaatgggtcattattatgttgctagacacccaatggatattgaaaaagagtttaagggtgtttgtcctttccataagggatgtctagaaggttatgcagctggtccaagtttggaagctcgtacaggtgtacgtggggaaactattgaactcaacaaccctgtttgggatgttcaagcctactatatcgctcaagctgcggttaatgcgacagtgactttccgcccagacgtgattgtctttggtggaggggtcatggctcaacaacatatgctggaccgtgtccgtgagaaatttacatctcttcttaatggttacctaccagtaccagatgtgcgtgactatatcgtgacgccagcagtcgcaggaaatggttctgccacacttgggaactttgttcttgcaaaagaagtttcaaaa

SEQ ID NO: 3550 - protein, 295 aa, Streptococcus pneumoniae
  fructokinase (scrK); Cellular location: cytoplasm; Similar to strain R6 sequence 15903608 (e-173)
MTKLYGSLEAGGTKFVCAVGDENFNVVEKTQFPTTTPIETIDKTIEFFSKFDNLAGLAVGSFGPIDIDKNSKTYGFITTTPKPNWANVDLLGALRRALNVPMYFTTDVNSSAYGEMVARNNAGGRIENLVYYTIGTGIGAGVIQRGEFIGGVGHPEMGHYYVARHPMDIEKEFKGVCPFHKGCLEGYAAGPSLEARTGVRGETIELNNPVWDVQAYYIAQAAVNATVTFRPDVIVFGGGVMAQQHMLDRVREKFTSLLNGYLPVPDVRDYIVTPAVAGNGSATLGNFVLAKEVSK

SEQ ID NO: 3551 - DNA, 1002 bp, Streptococcus pneumoniae
ttgattggtggggttcaccaattgatcgtcgtgtcaggtgtgcaccacatcttcaacttgcttgaagtgcaattacttgctgctgaccatgctaacccattcaacgctatcatcacagctgctatgacagctcaaggtgctgctactgttgcggttggtgttaaaacaaaaaatccaaaactgaaaacacttgctttcccggctgctctttctgccttcctaggtattacagagcctgctatcttcggggtgaacttgcgcttccgtaaaccattcttcctttcattgattgctggtgcaatcggtggtggattggcttctatccttggacttgctggtactggtaatggtatcaccatcatccctggtacaatgctttatgttggtaacggacaacttccacaataccttcttatggtagctgtatcatttgcccttggttttgctcttacttacatgtttggttacgaagatgaagtagacgcaactgcagctgcaaaacgagctgaagtggctgaagaaaaagaagaagttgcgccagcagctcttcaaaatgaaacacttgtaactcctatcgtcggtgatgttgtcgctcttgctgatgtcaatgacccagtcttctcaagtggagctatgggacaaggtatcgttgtgaaaccaagccaaggcgtggtctatgcaccagctgatgctgaagtttcaattgcctttccaacagggcacgcttttggtttgaaaacaagaaatggtgctgaagttttgattcatgttggtattgatactgtatctatgaacggtgacggttttgaaacaaaagttgctcaaggtaataaggtgaaagctggcgatgttcttggaacatttgactcaaacaaaatcgctgcagctggacttgatgatacaacaatggttatcgttacaaatacaggtgactacgcttcagtagctccagtcgcaacaggttcagttgctaagggggatgctgtgatcgaagtgaaaatc

SEQ ID NO: 3552 - protein, 334 aa, Streptococcus pneumoniae
  PTS system, IIAC components; Cellular location: membrane; Similar to strain R6 sequence 15903609 (0.E+01)
MIGGVHQLIVVSGVHHIFNLLEVQLLAADHANPFNAIITAAMTAQGAATVAVGVKTKNPKLKTLAFPAALSAFLGITEPAIFGVNLRFRKPFFLSLIAGAIGGGLASILGLAGTGNGITIIPGTMLYVGNGQLPQYLLMVAVSFALGFALTYMFGYEDEVDATAAAKRAEVAEEKEEVAPAALQNETLVTPIVGDVVALADVNDPVFSSGAMGQGIVVKPSQGVVYAPADAEVSIAFPTGHAFGLKTRNGAEVLIHVGIDTVSMNGDGFETKVAQGNKVKAGDVLGTFDSNKIAAAGLDDTTMVIVTNTGDYASVAPVATGSVAKGDAVIEVKI

SEQ ID NO: 3553 - DNA, 747 bp, Streptococcus pneumoniae
ttgcaaatgaacaatcaggaaattgcaaaaaaagtcatcgatgccttgggcggacgtgaaaatgtcaatagtgttgcccactgtgcgactcgtctacgtgtcatggtcaaagatgaagagaaaatcaataaagaagtgattgagaacttggaaaaagttcaaggtgctttctttaactcagggcaataccaaattatctttggtacaggtacagttaacaaaatgtacgatgaagttgttgtacttggattaccaacatcatctaaggatgacatgaaagcagaagttgctaaacaagggaactggttccaacgtgctatccgtacttttggtgatgttttcgttccaatcatcccagttatcgtagcgacaggtctcttcatgggtgtgcgtggtcttttcaacgctcttgaaatgccacttccaggtgactttgcaacttacacacaaatcttgacagatacagccttcatcatcttgccaggtttggttgtgtggtcaaccttccgtgtatttggtggaaatcctgccgttggtatcgttcttggtatgatgcttgtctctggctcacttccaaacgcttgggcagttgctcaaggtggtgaagtaacagcgatgaacttctttggtttcatccctgttgttggtttgcaaggttccgttcttccagccttcatcatcggggttgtcggagctaaatttgaaaaagctgtccgcaagttgttccagatgtcattgacctcttgg

SEQ ID NO: 3554 - protein, 249 aa, Streptococcus pneumoniae
  PTS system, enzyme IIB; Cellular location: membrane
MQMNNQEIAKKVIDALGGRENVNSVAHCATRLRVMVKDEEKINKEVIENLEKVQGAFFNSGQYQIIFGTGTVNKMYDEVVVLGLPTSSKDDMKAEVAKQGNWFQRAIRTFGDVFVPIIPVIVATGLFMGVRGLFNALEMPLPGDFATYTQILTDTAFIILPGLVVWSTFRVFGGNPAVGIVLGMMLVSGSLPNAWAVAQGGEVTAMNFFGFIPVVGLQGSVLPAFIIGVVGAKFEKAVRKLFQMSLTSW

SEQ ID NO: 3555 - DNA, 195 bp, Streptococcus pneumoniae
atgcaagccttttatgttaaaaaagaggaaaaactgtcaaaggattatcataaaataaatacaggaaatcaatcaaatttttacgaaaatgtgaaagataatgaaataaaatactttttaaccaaggtttcaaacttatttttcaaggaattcctgatgaaacagtcaaaaacaatcaatctaaagcttgcccac

SEQ ID NO: 3556 - protein, 65 aa, Streptococcus pneumoniae
  hypothetical protein; Cellular location: cytoplasm
MQAFYVKKEEKLSKDYHKINTGNQSNFYENVKDNEIKYFLTKVSNLFFKEFLMKQSKTINLKLAH

SEQ ID NO: 3557 - DNA, 1452 bp, Streptococcus pneumoniae
atggaatggacaactgagcgtcgttacagactttatcaagattggacgcaagaagaaattcaacatataaaggaaaatatggcacaatctccatggcatactcattaccatgttgagccaaaaacaggacttctcaacgacccaaatggcttttcttactttgatggcaagtggatcctcttttaccagaattttccttttggtgcagcccacggtttaaaatcttgggcacagctagaaagtgatgatttgattcactttaaagaaactggaatcaaagttttaccagatactccattagatagccacggtgcctactctggttctgccatgcaatttggcgataacttattcctattttatacaggaaatgttcgcgataaaaactggatccgtcacccataccagatcggtgctttgatggacaaggagggtaagattacaaagattgacaagatcttgattgaccagccagcagactctactgaccacttccgcgatccacaaatttttaactttcagggtcaatattatgccattgtcggcggacaagacttggagaaaaaaggtttcgttcgtctctacaaggctgtcaataacgactacacaaactggcaagcagttggcgaccttgactttgctaacgaccgtactgcctacatgatggaatgtcctaatttggtctttgtagaggaacaacctgtccttctctactgtccacaaggattggataagaaagttctagactacgataatatctttccaaatatgtataagatcggggcttcctttgaccctaaaaatgccaaaatggtagatgtgtctcaacttcaaaacatggattacggtttcgaagcctatgcaactcaagccttcaacgctcctgatgggcgtgctctagcagttagctggcttggtttgccagatgtttcttacccatctgaccgttttgaccaccaaggaaccttctctttggtcaaggaactcactatcaaagacgacaagctctaccagtatccagtcgctgctattaaggaccttcgtgcttctgaagaagccttctcaaaccgttcccaaaccaagaacacttacgaacttgaactcaacttggaagctaatagccagagcgagattgtcttacttgctgataaagaaggtaagggactttcaatcaactttgaccttgtaaacggtcaagtaacagtggatcgtagccaggctggagaacagtatgcccaagaatttgggacaactcgttcttgccctatcgagaatcaggctactactgctacaatcttcatcgataactctgtctttgaaattttcatcaataaaggagaaaaagtattttctggtcgtgtcttcccacatgcggaccaaaatggtatcctgattaaatctggaaacccaactggaacttactatgaattagattatggtcgcaaaactaac

SEQ ID NO: 3558 - protein, 484 aa, Streptococcus pneumoniae
  sucrose-6-phosphate hydrolase (scrB); Cellular location: cytoplasm; Similar to strain R6 sequence 15903610 (0.E+01)
MEWTTERRYRLYQDWTQEEIQHIKENMAQSPWHTHYHVEPKTGLLNDPNGFSYFDGKWILFYQNFPFGAAHGLKSWAQLESDDLIHFKETGIKVLPDTPLDSHGAYSGSAMQFGDNLFLFYTGNVRDKNWIRHPYQIGALMDKEGKITKIDKILIDQPADSTDHFRDPQIFNFQGQYYAIVGGQDLEKKGFVRLYKAVNNDYTNWQAVGDLDFANDRTAYMMECPNLVFVEEQPVLLYCPQGLDKKVLDYDNIFPNMYKIGASFDPKNAKMVDVSQLQNMDYGFEAYATQAFNAPDGRALAVSWLGLPDVSYPSDRFDHQGTFSLVKELTIKDDKLYQYPVAAIKDLRASEEAFSNRSQTKNTYELELNLEANSQSEIVLLADKEGKGLSINFDLVNGQVTVDRSQAGEQYAQEFGTTRSCPIENQATTATIFIDNSVFEIFINKGEKVFSGRVFPHADQNGILIKSGNPTGTYYELDYGRKTN

SEQ ID NO: 3559 - DNA, 963 bp, Streptococcus pneumoniae
atggtcgcaaaactaactgatgtcgccaaacttgcaggcgtcagtcctactaccgtttctcgggttatcaataaaaaagggtatctatctgagaaaaccatccaaaaagtcaatgaagccatgcgagaattgggctataaacccaacaacctggctcgtagtctgcaaggaaaatcagctaagttaatcggcttgattttccccaatatttccaatgttttctatgcagaattgattgataaattggaacaccaactcttcaaaaatggttacaagaccatcatctgcaacagtgaacatgattctgagaaggaacgcgaatacatcgaaatgttggaagccaatcaggtggacggcatcatttctggtagtcacaacctaggaatcgaagactacaatcgtgtgacagcgccgattatttcctttgaccgaaacctatcgccagacatccctgtcgtctcctctgacaactatgctggtggggttcttgctgcccaaaccttggtcaagacaggtgcccagtctatcatcatgattacagggaatgacaattctaattcgccaaccggactgcgccacgctggttttgcatccgtactcccaaaagctcctattatcaatgtttccagtgacttttctcccgtcagaaaagaaatggaaatcaagaatatcttgacccgggaaaaaccagatgccatttttgcttcggatgatttgacagctattctggtcattaaaatcgctcaagaattgggcatttctgtcccaaaagagctcaaggtcatcggctatgatgggacctactttatcgaaaattactaccctcaattggctactatcaagcaacctttggaagagattgcttgtctcactattgatcttctcttgcaaaagattgaaggcaaggaagtcgccacaactggttacttcttaccagttacgctattaccaggaaaaagtatt

SEQ ID NO: 3560 - protein, 321 aa, Streptococcus pneumoniae
  sucrose operon repressor (scrR); Cellular location: membrane; Similar to strain R6 sequence 15903611 (0.E+01)
MVAKLTDVAKLAGVSPTTVSRVINKKGYLSEKTIQKVNEAMRELGYKPNNLARSLQGKSAKLIGLIFPNISNVFYAELIDKLEHQLFKNGYKTIICNSEHDSEKEREYIEMLEANQVDGIISGSHNLGIEDYNRVTAPIISFDRNLSPDIPVVSSDNYAGGVLAAQTLVKTGAQSIIMITGNDNSNSPTGLRHAGFASVLPKAPIINVSSDFSPVRKEMEIKNILTREKPDAIFASDDLTAILVIKIAQELGISVPKELKVIGYDGTYFIENYYPQLATIKQPLEEIACLTIDLLLQKIEGKEVATTGYFLPVTLLPGKSI

SEQ ID NO: 3561 - DNA, 1272 bp, Streptococcus pneumoniae
atgaagataagttggaatggattttctaaaaaatcataccaagagcgcctcgagctgttaaaagctcaggcgctccttagtcctgagagacaagctagtctggagaaggatgaacagatgagcgtgactgtggcagaccagctgagtgagaatgtagtgggaactttttctctgccttattcactggttccggaggtacttgtcaacggtcaggaatacaccgttccctatgtgacagaagaaccctctgtggttgcggcggccagctatgccagcaaaatcatcaagcgtgcaggtggttttactgcacaagtccatcagcgacagatgattgggcaggtagccctttatcaagttgctaatcctaaactagcgcaagagaagattgccagcaagaaagcggagctcttggagcttgccaatcaagcctatccttctatcgttaaacgtggaggtggggcgcgtgatctgcatgtcgagcagataaaaggcgaaccagactttctcgttgtttatattcatgtcgatacccaggaagccatgggtgccaatatgctcaacaccatgctggaagccttgaaaccagtcttagaagaactcagtcagggacagagtctcatgggaatcctgtccaactacgcgaccgattctctggtgactgcaagctgtcgcatcgcctttcgctacttgagccgccaaaaggatcaaggacgagagattgcggagaaaattgcgttggctagtcagtttgcgcaggctgatccttaccgagctgctactcataataaaggaatttttaatggtattgatgcgattttgattgccactggtaatgactggcgtgccatcgaagctggggcccatgcctttgccagtcgagatggacgctatcaaggtcttagctgctggacgctggaccttgaaagagaagaattggtcggtgagatgaccctgcccatgcctgtagcgactaagggtggctctatcggcctcaacccacgtgtagttctcagtcatgatctactaggaaatccttctgccagagaattagcccagattatcgtgtccatcggtcttgctcaaaattttgcagccctcaaagccttggtaagtacgggcatccagcaaggccacatgaaactacaggccaaatccctagctctcctagctggggctagtgaatctgaagttgctcccctagtagagcgcctcatctcagataaaacctttaacctagagacagcccagcgctatctcgaaaatttaagatca

SEQ ID NO: 3562 - protein, 424 aa, Streptococcus pneumoniae
  3-hydroxy-3-methylglutaryl-CoA reductase; Cellular location: membrane; Similar to strain R6 sequence 15903612 (0.E+01)
MKISWNGFSKKSYQERLELLKAQALLSPERQASLEKDEQMSVTVADQLSENVVGTFSLPYSLVPEVLVNGQEYTVPYVTEEPSVVAAASYASKIIKRAGGFTAQVHQRQMIGQVALYQVANPKLAQEKIASKKAELLELANQAYPSIVKRGGGARDLHVEQIKGEPDFLVVYIHVDTQEAMGANMLNTMLEALKPVLEELSQGQSLMGILSNYATDSLVTASCRIAFRYLSRQKDQGREIAEKIALASQFAQADPYRAATHNKGIFNGIDAILIATGNDWRAIEAGAHAFASRDGRYQGLSCWTLDLEREELVGEMTLPMPVATKGGSIGLNPRVVLSHDLLGNPSARELAQIIVSIGLAQNFAALKALVSTGIQQGHMKLQAKSLALLAGASESEVAPLVERLISDKTFNLETAQRYLENLRS

SEQ ID NO: 3563 - DNA, 1194 bp, Streptococcus pneumoniae
atgaatgataaaacagaggtaaatatgacaatcggtattgataagattggttttgcgaccagtcaatatgtcttgaaattacaagacttagcagaagcgaggggaattgaccctgaaaaattaagtaaaggactcttactcaaggaattgagtattgcgcccctaactgaggatatcgtgaccttggcggccagtgctagtgactctattttaactgagcaagaaagacaagaagttgacatggtcattgtggcgaccgagtcaggaattgaccagagtaaggctgcggccgtctttgtgcatggcttgctgggcatccagccctttgctcgtagtttcgagattaaagaagcctgctacggagcgactgctgccctccattatgccaaattgcatgtggaaaattctccggagtccaaggtcttggtcattgccagtgatattgccaaatacggtattgaaactccaggagaaccaactcaaggtgctggaagtgtagctatgttgattacacaaaatccacgcatgatggcctttaataatgacaatgtagctcagacccgtgacatcatggatttctggcgaccaaattactcgacaactccttatgtaaatggtgtctattctacccaacaatacttggatagtttgaaaacgacttggcttgaatatcaaaaacgctaccagcttactttggatgattttgcggctgtttgtttccacttgccttatcctaaattagcgctaaaaggcttgaaaaaaatcatggataagagcctgcctcaagagaaaaaagacctcttacaaaagcattttgaccagtctattctctacagtcaaaaggtggggaatatctacacaggttcacttttccttggacttttgtctctcttggaaaatacagatagcttgaaagctggggataaaatcgccctttatagttacggaagtggagctgtggctgagttcttcagtggtgaattggttgaaggatatgaagcttatttggataaagaccgtttgaacaagctcaaccaacgaactgccctatccgttgcagactatgaaaaggtcttttttgaggaagtaaacttggatgaaactaactctgcccagtttgctggctatgaaaatcaagattttgccttggttgaaattctcgaccaccaacgccgttatagcaaggttgaaaaa

SEQ ID NO: 3564 - protein, 398 aa, Streptococcus pneumoniae
  hydroxymethylglutaryl-CoA synthase (mvaS); Cellular location: cytoplasm; Similar to strain R6 sequence 15903613 (0.E+01)
MNDKTEVNMTIGIDKIGFATSQYVLKLQDLAEARGIDPEKLSKGLLLKELSIAPLTEDIVTLAASASDSILTEQERQEVDMVIVATESGIDQSKAAAVFVHGLLGIQPFARSFEIKEACYGATAALHYAKLHVENSPESKVLVIASDIAKYGIETPGEPTQGAGSVAMLITQNPRMMAFNNDNVAQTRDIMDFWRPNYSTTPYVNGVYSTQQYLDSLKTTWLEYQKRYQLTLDDFAAVCFHLPYPKLALKGLKKIMDKSLPQEKKDLLQKHFDQSILYSQKVGNIYTGSLFLGLLSLLENTDSLKAGDKIALYSYGSGAVAEFFSGELVEGYEAYLDKDRLNKLNQRTALSVADYEKVFFEEVNLDETNSAQFAGYENQDFALVEILDHQRRYSKVEK

SEQ ID NO: 3565 - DNA, 285 bp, Streptococcus pneumoniae
ttgtctgtaaatctactgaccttgttgtttatcccagtcatggtttctagttcgggctcagagtttcaaagtggatggcaagagcatcaattgattgctgagaaggttagtaaaacacttgataagacatttgataaggatgtcagagaaattccgaccagtcagttttatcaaaaatttgtagatgagatgggaaggacttactcaggaaatttgatcctccaggagctgataactgtgaatggagcttataaagctacttatatcggtgaactctctagcaac

SEQ ID NO: 3566 - protein, 95 aa, Streptococcus pneumoniae
  hypothetical protein; Cellular location: outside; Similar to strain R6 sequence 15903614 (2.E-49)
MSVNLLTLLFIPVMVSSSGSEFQSGWQEHQLIAEKVSKTLDKTFDKDVREIPTSQFYQKFVDEMGRTYSGNLILQELITVNGAYKATYIGELSSN

SEQ ID NO: 3567 - DNA, 618 bp, Streptococcus pneumoniae
gtgcgagaataccgcacttatgaagaaattgcggctgattttggtatccacgaaagcaacttaatccgtcggagccaatgggttgaagtaactcttgttcaaagtggtgttacgatttcaagaactcctctcagctttgaggacacgataatgattgatgtgacggaagtaaaaatcaatcgccctaaaaaacaattagcgaatgattctggtaaaaagaaatttcacgctatgaaggctcaagcgattgtcacaagtcaagggagaattgtttctttggatatcgctgtgaactatagtcatgatatgaagttgttcaaaatgagttgcagaaatatcggacaagctggtaaaatcttggctgacagtgattatcaagggctcatgaagatatatcctcaagcacaaactccacgtaaatccagcaaactcaagccgctaacagctgaagataaagcctgtaaccatgcgctatctaaggagagaagcaaggttgagaacatctttgccaaagtaaaaacgtttaaaatgttttcaacaacctatcgaaatcatcgtaaacgcttcggattacgaatgaatttgattgctggtattatcaatcatgaactaggattc

SEQ ID NO: 3568 - protein, 206 aa, Streptococcus pneumoniae
  IS1381, transposase OrfA/OrfB, truncation; Cellular location: cytoplasm; Similar to strain R6 sequence 15903038 (6.E-68)
MREYRTYEEIAADFGIHESNLIRRSQWVEVTLVQSGVTISRTPLSFEDTIMIDVTEVKINRPKKQLANDSGKKKFHAMKAQAIVTSQGRIVSLDIAVNYSHDMKLFKMSCRNIGQAGKILADSDYQGLMKIYPQAQTPRKSSKLKPLTAEDKACNHALSKERSKVENIFAKVKTFKMFSTTYRNHRKRFGLRMNLIAGIINHELGF

SEQ ID NO: 3569 - DNA, 447 bp, Streptococcus pneumoniae
atgacactaacaacctttttattacaagcagtagcaagttttcttgccattatcacttttttaatcgtactcaatgtgcaacggtctatgctcttacctggagggattttgggcatgactgtctggctaatctatctcttgctcaaggaaccgaccaatgtcattgtagctaccttcattgcagccattattggttcttgtgtcagccagattttaagtattctttataagacacctgctgtggtctttatcttggccattttggcaccgctggttccaggttatctctcctaccgaacaactgccttttttgtgacaggggactataataaagcactggcaagtgcgaccttggttgtcatgttggctttggtaatctctattggaatggctagcggaacagtgattctcagactctatcattatataaaaacacatcgagtatcg

SEQ ID NO: 3570 - protein, 149 aa, Streptococcus pneumoniae
  hypothetical protein; Cellular location: membrane; Similar to strain R6 sequence 15903617 (3.E-77)
MTLTTFLLQAVASFLAIITFLIVLNVQRSMLLPGGILGMTVWLIYLLLKEPTNVIVATFIAAIIGSCVSQILSILYKTPAVVFILAILAPLVPGYLSYRTTAFFVTGDYNKALASATLVVMLALVISIGMASGTVILRLYHYIKTHRVS

SEQ ID NO: 3571 - DNA, 756 bp, Streptococcus pneumoniae
atggaagaatcaaaagaattaaatgccgtcattgatgtgattatgctagcggggactattctccttaaaagtggctcagaaatccatcgtgtagaagataccatgattcgaatcgcgcattcgcaggggattgtggattgcaatgtccttgccatgcctgccgctatctttttctctattgaaaataccaatatttcgcgcatgaagcgcgtgacctcctcttcttataacatcgaaaaagtctgcgatgtgaaccagatttctcgtcagctagttggggggcagattgacttagaaacagcctttaagcaattgacggccttgcaagccaaaccccttccctatactaagttgcaggtaactctggctgcgacctttagtgctcctttcttttcagttatgtttagcggaaatatctacgacgcacttggggcaggagtggcgaccttatttggttttgccttttccctctatgtggaaaaatttatccgaattccctttgtgacagcctttgctggagcctttgtctttgggataattgcccagttttgggctcgctacacaggttttccttcaacggcagatttgattatagctggtgcggtcatgccgtttgtaccaggtattgccttgaccaatgcggtccgtgatattatgaccaaccacataaactctggtatgagtaagatgtttgaatccctgctcattaccctcgctttaggggcaggaacttctgtcgccttggtattgatgaac

SEQ ID NO: 3572 - protein, 252 aa, Streptococcus pneumoniae
  conserved hypothetical protein; Cellular location: membrane; Similar to strain R6 sequence 15903618 (e-138)
MEESKELNAVIDVIMLAGTILLKSGSEIHRVEDTMIRIAHSQGIVDCNVLAMPAAIFFSIENTNISRMKRVTSSSYNIEKVCDVNQISRQLVGGQIDLETAFKQLTALQAKPLPYTKLQVTLAATFSAPFFSVMFSGNIYDALGAGVATLFGFAFSLYVEKFIRIPFVTAFAGAFVFGIIAQFWARYTGFPSTADLIIAGAVMPFVPGIALTNAVRDIMTNHINSGMSKMFESLLITLALGAGTSVALVLMN

SEQ ID NO: 3573 - DNA, 1977 bp, Streptococcus pneumoniae
atgatccaaatcggcaagatttttgccggacgctatcggattgtcaaacagattggtcgaggaggtatggcggatgtctacctagccaaagacttaatcttagatggggaagaagtggcagtgaaggttctgaggaccaactaccagacggacccgatagctgtagctcgttttcagcgtgaagcgagagctatggcagatctagaccatcctcatatcgttcggataacagatattggcgaggaagacggtcaacagtacctagctatggagtatgtggctggactggacctcaaacgctatatcaaggaacattatcctctttctaatgaagaagcagtccgtatcatgggacaaattctcttggctatgcgcttggcccatactcgaggaattgttcacagggacttgaaacctcaaaatatcctcttgacaccagatgggactgccaaggtcacagactttgggattgctgtagcctttgcagagacaagtctgacccagactaactcgatgttgggctcagttcattacttgtcaccagagcaggcgcgtggttcgaaggcgactgtgcagagtgatatctatgccatggggattattttctatgagatgctgacaggccatatcccttatgacggggatagcgcggtgaccattgccctccagcatttccagaaacccctgccgtccgttattgcagaaaatccatctgtacctcaggctttagaaaatgttattatcaaggcaactgctaaaaagttgaccaatcgctaccgctcggtttcagagatgtatgtggacttgtctagtagcttgtcctacaatcgtagaaatgaaagtaagttaatctttgatgaaacgagcaaggcagataccaagaccttgccgaaggtttctcagagtaccttgacatctattcctaaggttcaagcgcaaacagaacacaaatcaatcaaaaacccaagccaggctgtgacagaggaaacttaccaaccacaagcaccgaaaaaacatagatttaagatgcgttacctgattttgttggccagccttgtattggtggcagcttctcttatttggatactatccagaactcctgcaaccattgccattccagatgtggcaggtcagacagttgcagaggccaaggcaacgctcaaaaaagccaattttgagattggtgaggagaagacagaggctagtgaaaaggtggaagaagggcggattatccgtacagatcctggcgctggaactggtcgaaaagaaggaacgaaaatcaatttggttgtctcatcaggcaagcaatctttccaaattagtaattatgtcggtcggaaatcctctgatgtcattgcggaattaaaagagaaaaaagttccagataatttgattaaaattgaggaagaagagtcgaatgagagtgaggctggaacggtcctgaagcaaagtctaccagaaggtacgacctatgacttgagcaaggcaactcaaattgttttgacagtagctaaaaaagctacgacgattcaattagggaactatattggacggaactctacagaagtaatctcagaactcaagcagaagaaggttcctgagaatttgattaagatagaggaagaagagtccagcgaaagcgaaccaggaacgattatgaaacaaagtccaggtgccggaacgacttatgatgtgagtaaacctactcaaattgtcttgacagtagctaaaaaagttacaagtgttgccatgccgagttacattggttctagcttggagtttactaagaacaatttgattcaaattgttgggattaaggaagctaatatagaagttgtagaagtgacgacagcgcctgcaggtagtgcagaaggcatggttgttgaacaaagtcctagagcaggtgaaaaggtagacctcaataagactagagtcaagatttcaatctacaaacctaaaacaacttcagctactcct

SEQ ID NO: 3574 - protein, 659 aa, Streptococcus pneumoniae
  serine/threonine protein kinase; Cellular location: membrane; Similar to strain R6 sequence 15903619 (0.E+01)
MIQIGKIFAGRYRIVKQIGRGGMADVYLAKDLILDGEEVAVKVLRTNYQTDPIAVARFQREARAMADLDHPHIVRITDIGEEDGQQYLAMEYVAGLDLKRYIKEHYPLSNEEAVRIMGQILLAMRLAHTRGIVHRDLKPQNILLTPDGTAKVTDFGIAVAFAETSLTQTNSMLGSVHYLSPEQARGSKATVQSDIYAMGIIFYEMLTGHIPYDGDSAVTIALQHFQKPLPSVIAENPSVPQALENVIIKATAKKLTNRYRSVSEMYVDLSSSLSYNRRNESKLIFDETSKADTKTLPKVSQSTLTSIPKVQAQTEHKSIKNPSQAVTEETYQPQAPKKHRFKMRYLILLASLVLVAASLIWILSRTPATIAIPDVAGQTVAEAKATLKKANFEIGEEKTEASEKVEEGRIIRTDPGAGTGRKEGTKINLVVSSGKQSFQISNYVGRKSSDVIAELKEKKVPDNLIKIEEEESNESEAGTVLKQSLPEGTTYDLSKATQIVLTVAKKATTIQLGNYIGRNSTEVISELKQKKVPENLIKIEEEESSESEPGTIMKQSPGAGTTYDVSKPTQIVLTVAKKVTSVAMPSYIGSSLEFTKNNLIQIVGIKEANIEVVEVTTAPAGSAEGMVVEQSPRAGEKVDLNKTRVKISIYKPKTTSATP

SEQ ID NO: 3575 - DNA, 738 bp, Streptococcus pneumoniae
atggaaatttcattattaacagatgttggtcagaaacgaacaaataaccaagactatgtcaaccactatgtcaatagagctggacgtaccatgattattttagctgatgggatgggaggtcatcgcgcagggaatatcgctagtgaaatggcggtcacagacctgggtgtagcttgggttgatacccagatcgatacagtcaatgaagtgcgtgaatggttcgcccattacctagaaattgaaaatcaaaagattcaccagcttggtcaggatgaagcttacagaggcatgggaactactttggaagtccttgctattattgataatcaggctatctatgctcatattggtgattcgcgtatcggcttgattcgtggagaagaataccatcagttgacgagcgatcattccttggttaatgaattgctcaaggctggtcaattgacaccagaagaggcagaagctcatccgcaaaaaaatattatcacccagtctattgggcaaaaagatgaaattcagcctgattttgggacagttatccttgagtcaggtgactatctcttgctcaatagtgacggcttgaccaacatgatttcaggcagtgagattcgtgatattgtaaccagtgatattcctttagcagataaaacggagacacttgttcgttttgctaacaatgcaggaggtttagacaacattacggttgcccttgtttctatgaacgaggaggatgcagaa

SEQ ID NO: 3576 - protein, 246 aa, Streptococcus pneumoniae
  phosphatase, putative; Cellular location: cytoplasm; Similar to strain R6 sequence 15903620 (e-139)
MEISLLTDVGQKRTNNQDYVNHYVNRAGRTMIILADGMGGHRAGNIASEMAVTDLGVAWVDTQIDTVNEVREWFAHYLEIENQKIHQLGQDEAYRGMGTTLEVLAIIDNQAIYAHIGDSRIGLIRGEEYHQLTSDHSLVNELLKAGQLTPEEAEAHPQKNIITQSIGQKDEIQPDFGTVILESGDYLLLNSDGLTNMISGSEIRDIVTSDIPLADKTETLVRFANNAGGLDNITVALVSMNEEDAE

SEQ ID NO: 3577 - DNA, 1314 bp, Streptococcus pneumoniae
ttggtgactaaagtagaaacggctagaagtttagctctagcagtgctagaggatgtttttgtgaaccaagcatattcaaatatcgccttaaataagcatctaaagggaagtcaacttttggcagcagacaagggcttagtgaccgagctggtctatggaacggtagcccgtaaactgactctggaatggtacctatcccactttatcgaagacagagaccagttagacagctggctctatgtccttcttctcatgagtgcctaccaactccgctatttggacaagattccagatcatgctgtggttaatgaagcagtggaattggccaaactccgtaaaaaaggcagtgaaaaattggtcaacgctgtccttcgccgtatcttgcgtgaaggctggccagatattgctagcatcaagcgaaaaaacaagcgtgactccattgcctattctctcccagtttggctagttgccaaactcaaggaagaatacggagaggagagagcaaaagccatctttgaaagcctgttagtgcgaaacaaagccagtattcgtgtaacagacctaagtcgaaaagaggaaatccaagccttgttggaggcgaataattcccttttagcaaccactggtctggttaaggagcaggggcattttgcagggcataatttgtttgcggatggagccattaccatccaagatgagtccagtcagctggttgctccgacgcttgatttacaaggtgatgagcgagtgcttgatgcctgtgcggctccaggtgggaaaacagcccatatagcctcttatcttacgacaggtcaggttactgctctggacttgtacgaccacaagttggatttaattcaagaaaatgcccaacgtctgggagttgaagatcgggttcaaactcaaaaattggatgccagaaaggtgcatgagttttttgaccaggattcctttgataagattttggtggatgctccttgttcaggaatcggtcttttgcgccgaaaaccagatatcaaatacaataaagaaacggcagatttcgcgtccttgcaggaaattcagttagaaatattaggtagtgtttgtcaaatactaggcaaaggtggtataataacttatagcacctgcactatcgtctcagaggagaattttcaagtcgttaaggcctttttagagagtcatcccgagttcgagcaggtaaaactagaacatgaatgtaaggatatcatgaaagacggctgtatcctcattacacctgaattgtatggaagtgatggattcttcatcagtcaatttcgcaagatatcggat

SEQ ID NO: 3578 - protein, 438 aa, Streptococcus pneumoniae
  rRNA methyltransferase RsmB (rsmB); Cellular location: cytoplasm; Similar to strain R6 sequence 15903621 (0.E+01)
MVTKVETARSLALAVLEDVFVNQAYSNIALNKHLKGSQLLAADKGLVTELVYGTVARKLTLEWYLSHFIEDRDQLDSWLYVLLLMSAYQLRYLDKIPDHAVVNEAVELAKLRKKGSEKLVNAVLRRILREGWPDIASIKRKNKRDSIAYSLPVWLVAKLKEEYGEERAKAIFESLLVRNKASIRVTDLSRKEEIQALLEANNSLLATTGLVKEQGHFAGHNLFADGAITIQDESSQLVAPTLDLQGDERVLDACAAPGGKTAHIASYLTTGQVTALDLYDHKLDLIQENAQRLGVEDRVQTQKLDARKVHEFFDQDSFDKILVDAPCSGIGLLRRKPDIKYNKETADFASLQEIQLEILGSVCQILGKGGIITYSTCTIVSEENFQVVKAFLESHPEFEQVKLEHECKDIMKDGCILITPELYGSDGFFISQFRKISD

SEQ ID NO: 3579 - DNA, 933 bp, Streptococcus pneumoniae
atgacaaaactaatctttatggggacccccgacttttcagcaacagtcttaaaaggacttttgacagatgaccgttacgaaattctagccgttgtgacccagccagaccgtgctgttggtcgtaaaaaagttatccaagaaaccccagtcaagcaggctgccaaggaagcaggactatctatctaccaacctgaaaaattatctggaagtccagagatggaagatcttatgaagctaggagcagatggaattgtgactgctgcttttgggcagtttctcccaagcaaactccttgatagcatggactttgctgtcaacgttcatgcctccctccttcctagacaccgtggtggtgcgcctatccattatgccttgattcaaggggatgaggaagctggtgtgaccatcatggaaatggttaaggaaatggatgcaggagatatgatttctcgtcgcagcattccgatcacagatgaggacaatgttggcaccttgtttgaaaaattggcgctagttggtcgtgatttgcttttggacactctgcctgcctatattgctggtgatatcaaacctgaaccgcaggatacgagtcaggttaccttctctccaaatataaagccagaggaagaaaaactggactggaacaaaaccaatcgtcaactctttaaccaaattcgtggaatgaacccctggcctgttgcccatactttccttaagggcgaccgctttaagatttatgaagccctaccagtagaaggtcagggaaatccaggtgagattctctctatcggcaagaaagaattgattgtcgcaacggctgaaggggctctatccctcaaacaagtgcagccagctggtaagcctaagatggacattgcttccttcctcaacggagttggacgtacattgactgtaggagaacgatttggtgac

SEQ ID NO: 3580 - protein, 311 aa, Streptococcus pneumoniae
  methionyl-tRNA formyltransferase (fmt); Cellular location: cytoplasm; Similar to strain R6 sequence 15903622 (e-176)
MTKLIFMGTPDFSATVLKGLLTDDRYEILAVVTQPDRAVGRKKVIQETPVKQAAKEAGLSIYQPEKLSGSPEMEDLMKLGADGIVTAAFGQFLPSKLLDSMDFAVNVHASLLPRHRGGAPIHYALIQGDEEAGVTIMEMVKEMDAGDMISRRSIPITDEDNVGTLFEKLALVGRDLLLDTLPAYIAGDIKPEPQDTSQVTFSPNIKPEEEKLDWNKTNRQLFNQIRGMNPWPVAHTFLKGDRFKIYEALPVEGQGNPGEILSIGKKELIVATAEGALSLKQVQPAGKPKMDIASFLNGVGRTLTVGERFGD

SEQ ID NO: 3581 - DNA, 2394 bp, Streptococcus pneumoniae
atggccctagctaagattatcgtagatgtgcccttgatgcagacggaccagccctatagttacaggattccggaggaatttgagggaatgctggaagttgggatgcgggttcatgtgccttttggtaagggtaatcgcctgattcaagggattgttcttggtttgaagtcccaatcagatggagaagagatggagcaagatttaaaagatattgcagaggtgctggatttttctcctgttctcacgccagaacaactctggctggctgaggagttacgcaaatctgtcttctcctacaaaatctctatcctcaaggccatgcttccagggtttctgaattctagctatgacaagattctctatcctctggaaggcttgagtcaggaagaacgagtgcgcctgtttggttcagaagattcgctagccttttcttcactagaccttgccaagcaagctgaaatgatgcgtttgactagaaaaggcctgcttggtctggaatatcaggcagtcgatcaaaagaaggtcaagacccagtcttggtatgaggttgaccatgctcaattagaaggtgttgagatttctacacgtgccaagaaaaagttggaactgagagattatctgctgtctcatccagagagcgcttccttggctagcttgttagagtcctactcgcgagagcaagtcaacttctttgtggatcaaggtgctgttaccatagtccaaaaggaagttcaacgctcggctgcttattttgaaggaattgaagcaagtagacctttggagttaaatccagaacaaagacaggcgcgtgatgcggttgtgagttctattggcagttctcaacctccctttctacttcaagggattacaggaagtgggaagaccgaggtttacttgcagattatccaaggtgccctggataagggcaagacagctattttgctggtacctgagatttccttgactcctcagatgaccgagcgttttatagcacgttttggggacaaggtagccattcttcactcaggattatccaatggtgaaaagtatgatgaatggcgcaaggtggagcgtggcgatgcccaagttgttgttggtgccagatctgctatctttgctcctctgaaaaatctgggtgtcatgattattgatgaagagcatgaagcggcttataagcaggacagcaatccccgttaccatgccagagaggtagctattttacgggctcagtataatcaagcaactctggtacttggatctgcaacgccgagcttagagagccgggcacgtgctggcaaaggcgtctatcaacacttacgtctaacccaacgtgccaatcctttggctacaatccctgaggttcaagtgattgactttcgagactatatcggacaaaatgagacgtcaaactttacgcctcctttgctagaggctatccaagaccgtctggttaaaaaagagcaggtggttctcatgctcaatcgccgtggttattctagctttgtcatgtgtcgggagtgtgggacggtggatacttgtcccaactgcgatatttctctgaccttgcatatggataccaagactatgaactgccattattgtggtttctcgaaggatattcctcaggtctgtcctaactgtaagagccgcagtattcgttactatgggacgggaactcagaaggcttatgatgagctagcagaactctttccccaagctcgcattctgaggatggatgtggatacgactcgaaagaaaggcagtcaccaagccttgcttgaccagtttgggcgaggggaagcggatattttacttggtactcagatgattgcaaagggtttggattttcccaatgttaccctagtcggagttctaaatgcggatacggccttgaatctgcctgatttccgttcttctgagagaaccttccagctcttgactcaggtggcaggtcgatcaggtcgggctgaaaaggcaggtcaagtcttgatacagtcctacaatccgcagcactatgctattcgatttgccaaggatcaagattacgaaggcttttatgcctatgaaatgggaatcagacgacaactcggctatccaccttactatttcacgattggtattaccctttctcacaagaaagaagaagaggttttcaaacgtgcctatgaagtcatgaacattttgcggtcaggcttgtcagagaccagtcccattctggggccaacgccaaaaccgattgcccgtacccacaacctctatcattaccagattttaattaaataccgtttagaagatgagctggggtcgaccctcaaccaggttttagccttgactcaagaacgggaaaatagtgagctccgtctcagcattgaccatgagccgcagcaattttta

SEQ ID NO: 3582 - protein, 798 aa, Streptococcus pneumoniae
  primosomal protein N' (priA); Cellular location: cytoplasm; Similar to strain R6 sequence 15903623 (0.E+01)
MALAKIIVDVPLMQTDQPYSYRIPEEFEGMLEVGMRVHVPFGKGNRLIQGIVLGLKSQSDGEEMEQDLKDIAEVLDFSPVLTPEQLWLAEELRKSVFSYKISILKAMLPGFLNSSYDKILYPLEGLSQEERVRLFGSEDSLAFSSLDLAKQAEMMRLTRKGLLGLEYQAVDQKKVKTQSWYEVDHAQLEGVEISTRAKKKLELRDYLLSHPESASLASLLESYSREQVNFFVDQGAVTIVQKEVQRSAAYFEGIEASRPLELNPEQRQARDAVVSSIGSSQPPFLLQGITGSGKTEVYLQIIQGALDKGKTAILLVPEISLTPQMTERFIARFGDKVAILHSGLSNGEKYDEWRKVERGDAQVVVGARSAIFAPLKNLGVMIIDEEHEAAYKQDSNPRYHAREVAILRAQYNQATLVLGSATPSLESRARAGKGVYQHLRLTQRANPLATIPEVQVIDFRDYIGQNETSNFTPPLLEAIQDRLVKKEQVVLMLNRRGYSSFVMCRECGTVDTCPNCDISLTLHMDTKTMNCHYCGFSKDIPQVCPNCKSRSIRYYGTGTQKAYDELAELFPQARILRMDVDTTRKKGSHQALLDQFGRGEADILLGTQMIAKGLDFPNVTLVGVLNADTALNLPDFRSSERTFQLLTQVAGRSGRAEKAGQVLIQSYNPQHYAIRFAKDQDYEGFYAYEMGIRRQLGYPPYYFTIGITLSHKKEEEVFKRAYEVMNILRSGLSETSPILGPTPKPIARTHNLYHYQILIKYRLEDELGSTLNQVLALTQERENSELRLSIDHEPQQFL

SEQ ID NO: 3583 - DNA, 309 bp, Streptococcus pneumoniae
atgttaaaaccctctattgataccttgctcgacaaggttccttcaaaatattcactcgtaatcttggaagcaaaacgtgcccacgaattggaagcaggtgccccagcaactcaaggtttcaagtctgaaaaatcaactcttcgcgctttagaagaaatcgaatcaggaaacgttacaattcacccagatccagaaggaaaacgtgaagcagtgcgtcgccgtatcgaagaagaaaaacgccgcaaagaagaagaagaaaagaaaatcaaagagcaaattgctaaagaaaaagaagatggtgaaaaaatt

SEQ ID NO: 3584 - protein, 103 aa, Streptococcus pneumoniae
  DNA-directed RNA polymerase, omega subunit, putative; Cellular location: cytoplasm; Similar to strain R6 sequence 15903624 (9.E-54)
MLKPSIDTLLDKVPSKYSLVILEAKRAHELEAGAPATQGFKSEKSTLRALEEIESGNVTIHPDPEGKREAVRRRIEEEKRRKEEEEKKIKEQIAKEKEDGEKI

SEQ ID NO: 3585 - DNA, 624 bp, Streptococcus pneumoniae
atggcagaccgaggcttactaatcgttttttctggtccttcaggggttggaaaaggaacggttagaagagagatttttgagagttctgaaaaccaatttcaatattctgtatcgatgacgacacgcgcacaacgtcctggagaagtggacggtgttgactatttcttccgtactcgtgaagaatttgaagagctgattcgtcaaggacagatgttggaatacgcagaatatgtcggtaactactatggaactcctctgacctatgtcaatgaaaccttggacaagggaatcgatgttttccttgaaattgaagttcagggtgctcttcaggtcaagaaaaaggttccagatgctgtctttatcttcctgacaccaccagatttggatgaattgcaagatcgcttggtaggtcgtggaacagatagtgcagaagtgattgcccaacgaatcgaaaaggccaaggaagaaattgccctcatgcgtgagtatgattatgcgattgtcaacgatcaggtacccctagctgctgaacgtgtcaaatgtgtgattgaagcagaacacttctgtgtggatcgtgtcattggtcactatcaggagatgttaccaaaatctccaactacccga

SEQ ID NO: 3586 - protein, 208 aa, Streptococcus pneumoniae
  guanylate kinase (gmk); Cellular location: cytoplasm; Similar to strain R6 sequence 15903625 (e-117)
MADRGLLIVFSGPSGVGKGTVRREIFESSENQFQYSVSMTTRAQRPGEVDGVDYFFRTREEFEELIRQGQMLEYAEYVGNYYGTPLTYVNETLDKGIDVFLEIEVQGALQVKKKVPDAVFIFLTPPDLDELQDRLVGRGTDSAEVIAQRIEKAKEEIALMREYDYAIVNDQVPLAAERVKCVIEAEHFCVDRVIGHYQEMLPKSPTTR

SEQ ID NO: 3587 - DNA, 1611 bp, Streptococcus pneumoniae
atggaaatcatgtcgcttgcgattgctgtttttgccgtcatcattggtttagtcattggatatgtcagcatctcagctaagatgaaatcatctcaggaagctgcagagttgatgcttttaaatgctgaacaagaagcaactaatttacgtggacaagctgagcgtgaagcggatttacttgttaatgaagccaaacgtgaaagcaagtctcttaaaaaagaagcactattggaggccaaagaagaagccagaaaataccgtgaagaagtggacgctgaattcaaatcagaacgtcaagaactcaaacaaatcgaaagtcgtttgacagagagagctactagccttgaccgtaaggacgacaatttgacgagtaaagaacaaacacttgaacaaaaagaacaaagtatttctgatagagcgaaaaaccttgatgcgcgtgaagagcaattagaggaagtcgaaagacaaaaagaagcagaactagagcgtattggtgcgctgtctcaggcagaagcacgagatattatcttggctcagacagaggaaaacttgaccagggagattgccagtcgcattcgcgaagctgagcaagaggtcaaggaacgttctgacaaaatggccaaggacatcttggttcaagctatgcaacgtatcgctggtgaatatgtagcggagtcaacaaactcaacagttcatctgccagacgatactatgaagggacgcattattggtcgtgaaggtcgtaacattcgtacctttgaaagtttgacaggggtcgatgtgattatcgacgatacaccagaagtggtgaccttgtcaggatttgatccgattcgtcgtgagattgcccgtatgactatggaaatgttgctcaaagatggtcgtatacatccagctcgtatcgaagagttggttgagaaaaaccgtcaagagattgacaataagattcgtgaatacggtgaggctgctgcctatgaaattggtgcgccaaaccttcatccagacttgatgaagattatgggacgtttgcagttccgtacttcatatggacaaaatgttttgcgccattcgattgaggttgctaagttggctggtatcatggcgagcgaacttggtgaaaatgcggctcttgcccgtcgtgctggattccttcacgatatcgggaaagccattgaccatgaggttgaaggtagccacgttgaaatcggtatggaattggcccgtaagtacaaggaacccccagttgtggtgaatacgattgctagtcaccacggagatgttgaagctgagagcgtgatagcagttatcgtcgctgcagcagatgccttgagcgcagcccgtccaggtgctcgtagtgagtctcttgaaagctacatcaagcgtctccatgatttggaagaaattgctaacggctttgaaggagtgcaaactagctttgcccttcaagcaggacgtgaaattcgtatcatggtcaatccaggaaaaatcaaggacgacaaagtcacaatcttggctcacaaagttcgtaagaaaattgaaaacaatctcgattatccaggaaatatcaaggtaaccgtgattcgcgagcttcgtgcagtagattatgctaaa

SEQ ID NO: 3588 - protein, 537 aa, Streptococcus pneumoniae
  KH domain protein; Cellular location: outside; Similar to strain R6 sequence 15903626 (0.E+01)
MEIMSLAIAVFAVIIGLVIGYVSISAKMKSSQEAAELMLLNAEQEATNLRGQAEREADLLVNEAKRESKSLKKEALLEAKEEARKYREEVDAEFKSERQELKQIESRLTERATSLDRKDDNLTSKEQTLEQKEQSISDRAKNLDAREEQLEEVERQKEAELERIGALSQAEARDIILAQTEENLTREIASRIREAEQEVKERSDKMAKDILVQAMQRIAGEYVAESTNSTVHLPDDTMKGRIIGREGRNIRTFESLTGVDVIIDDTPEVVTLSGFDPIRREIARMTMEMLLKDGRIHPARIEELVEKNRQEIDNKIREYGEAAAYEIGAPNLHPDLMKIMGRLQFRTSYGQNVLRHSIEVAKLAGIMASELGENAALARRAGFLHDIGKAIDHEVEGSHVEIGMELARKYKEPPVVVNTIASHHGDVEAESVIAVIVAAADALSAARPGARSESLESYIKRLHDLEEIANGFEGVQTSFALQAGREIRIMVNPGKIKDDKVTILAHKVRKKIENNLDYPGNIKVTVIRELRAVDYAK

SEQ ID NO: 3589 - DNA, 252 bp, Streptococcus pneumoniae
atgctgctcaagtttacagaagatgcctgggcagattattgctactggcaaaatcaggataagaaaacgttaaaaagaatcaataaactaatcaaggatattcaacgtgatccctttacaggaataggtaaaccagaaccactcaaatatgattaccaaggagcctggtcacggcgtattgatgcagaaaatcgcttgatttatatgatggatggagatagcgtggctttcttgtcctttaaagatcattac

SEQ ID NO: 3590 - protein, 84 aa, Streptococcus pneumoniae
  conserved hypothetical protein; Cellular location: cytoplasm; Similar to strain R6 sequence 15903627 (3.E-48)
MLLKFTEDAWADYCYWQNQDKKTLKRINKLIKDIQRDPFTGIGKPEPLKYDYQGAWSRRIDAENRLIYMMDGDSVAFLSFKDHY

SEQ ID NO: 3591 - DNA, 168 bp, Streptococcus pneumoniae
gtggtcaataaaaatccagatgaggacattgtagtcctttcaaagagtgagtgggatagtatccaagaaaccctgagaattgctcaaaataaggaactttctgataaggttttgcgaggaatggctcaagttcgtgctggaagtactcaggtccatgttattgaggag

SEQ ID NO: 3592 - protein, 56 aa, Streptococcus pneumoniae
  conserved hypothetical protein; Cellular location: cytoplasm; Similar to strain R6 sequence 15903628 (6.E-44)
MVNKNPDEDIVVLSKSEWDSIQETLRIAQNKELSDKVLRGMAQVRAGSTQVHVIEE

SEQ ID NO: 3593 - DNA, 1095 bp, Streptococcus pneumoniae
atgaccataacaggtattatcgcggagttcaatccttttcataatggccataaatacctgctggatcaggcagagggactgaaaattgttgccatgtcagggaatttcatgcagcgtggagagcctgctattgtggataagtggacaaggacccagatggcgctggaaaatggcgcagacttggtagtggaattgccctttttagtcagtgttcaggcagctgatttctttggtcaaggagctatggatatcttggatcgcttgggcattgatagtctagtttttgggacagaggaagttcgagattatcagaaaattgctgacttatacacagagaaaggtgctgagatggagaaatttgtggaaaatctgcctgattccctttcctatccccagaaaacccaagctatgtggaaggaatttgctggtcttgatttttcaggtaatacccccaatcatgttcttgctctggcctatgccaaggcggttgcaggacggaatatcaagctgcatccgattcagcgtcagggggcaggttaccattctgtgaataaagatgtggactttgcctcggcgacagccctccgtcaacatcagaaggaccaagatttcttagaacgttttatgccttctgttgccctatttgagcaggccagtaaggtgatctgggaagactattttcccttgctccgctatcaaatcttgtcaaatcccgacctaaccaccatctatcaggtcaatcaagaaatggctgtgcgcattaaagaagctattaaaacagcccagtctgtggaagaattggtcgagttagtgactaccaaacgttacaccaaggcgcgtgtcagacgcctattgacctatattttgatgcaggctagagaaagtgacttgccagaagccattcatgtccttggatttactgaaaaaggtaggcaacatctcaagtctttgaaaggtcaggtcagtctagtcagccgaattggcaaagaaccttgggatgctatgacccaaaaagcagaccagatttaccaactagggaagccaagtatagcagagcaaaattttggaagagtgccgattagaatagaaacaaac

SEQ ID NO: 3594 - protein, 365 aa, Streptococcus pneumoniae
  conserved hypothetical protein; Cellular location: membrane; Similar to strain R6 sequence 15903629 (0.E+01)
MTITGIIAEFNPFHNGHKYLLDQAEGLKIVAMSGNFMQRGEPAIVDKWTRTQMALENGADLVVELPFLVSVQAADFFGQGAMDILDRLGIDSLVFGTEEVRDYQKIADLYTEKGAEMEKFVENLPDSLSYPQKTQAMWKEFAGLDFSGNTPNHVLALAYAKAVAGRNIKLHPIQRQGAGYHSVNKDVDFASATALRQHQKDQDFLERFMPSVALFEQASKVIWEDYFPLLRYQILSNPDLTTIYQVNQEMAVRIKEAIKTAQSVEELVELVTTKRYTKARVRRLLTYILMQARESDLPEAIHVLGFTEKGRQHLKSLKGQVSLVSRIGKEPWDAMTQKADQIYQLGKPSIAEQNFGRVPIRIETN

SEQ ID NO: 3595 - DNA, 744 bp, Streptococcus pneumoniae
atgattatggcgacttatgaaacctttgcggcggtctatgatgcggtcatggacgatagtttatacgacaaatggacgaatttttctctgcgtcatttgcctaagaccaaggagagaaagaaactcttggaattggcttgtgggacaggaattcaatcagtgcgcttctctcaggctggttttgatgtgactggacttgacttgagtgcggatatgttgaagattgcggagaagagagcaacttcagccaagcaaaagattgcttttatagaaggtaatatgctgaatttgtccaaggcagggaaatacgattttgtcacgtgttattcggactctatctgctatatgcaggatgaggtggaagtaggggacgtctttaaggacgtgtacaatgcgctgaatgaagagggagttttcatctttgacgtgcactcgacctaccagacagatgaagtattccctggctattcctaccatgaaaatgcggaagattttgccatgctttgggatacatatgaggacgaagttcctcactccatcgtgcatgagctgactttctttatcaaggaggctgacggttcctttagtcgccacgatgaagtacatgaggagaggacctatgagatcttgacctatgatatcttgctggaacaggctggatttaagtccttcaaactctatgcagactttgaggataaggagccaacagaaactagcacccgttggttttttgtggcgcagaag

SEQ ID NO: 3596 - protein, 248 aa, Streptococcus pneumoniae
  conserved hypothetical protein; Cellular location: cytoplasm; Similar to strain R6 sequence 15903630 (e-145)
MIMATYETFAAVYDAVMDDSLYDKWTNFSLRHLPKTKERKKLLELACGTGIQSVRFSQAGFDVTGLDLSADMLKIAEKRATSAKQKIAFIEGNMLNLSKAGKYDFVTCYSDSICYMQDEVEVGDVFKDVYNALNEEGVFIFDVHSTYQTDEVFPGYSYHENAEDFAMLWDTYEDEVPHSIVHELTFFIKEADGSFSRHDEVHEERTYEILTYDILLEQAGFKSFKLYADFEDKEPTETSTRWFFVAQK

SEQ ID NO: 3597 - DNA, 351 bp, Streptococcus pneumoniae
atgaacgaaaaagaattactagaactagtcgtgaaagcggctgatgagaaacgtgcggaggatatcctcgcacttgatgtacaagatttgactagtgtgacggactacttggtcatcactagctcaatgaatagccgtcagttggacgctatcgcagctaatatccgtgaaaaagtagctcaagcaggctttaaaggtagccatgtcgaaggcgatgcagctggaggctgggtcttactggacctcggtgctgttgtcgtgcatatcttttcagaagaaatgcgtgcccattataatctagagaagctatggcatgaggcgaattcagtagatatttcagaagctcttgct

SEQ ID NO: 3598 - protein, 117 aa, Streptococcus pneumoniae [sequence omitted]

SEQ ID NO: 3599 - DNA, 498 bp, Streptococcus pneumoniae
atgaagacggcttttataatcattgatgttcagaatgttttagtagaaactgggttccagacaaaaagtctattggaaaaaatttcttatttacaaaaccaggctagaagcaagaatattgaaattatctatgttcaacatattgagaactctgaagctcaaacatcagaagattggcagttatctgcgcttttaaatcgaaaacctgctgaaaaggtctttcagaagaagtataacagtattttcaaagaaactggcttaaaagaatacttggataagcaggggattgaaaaattagttttatgtggtatgcagacagaatattgtgtggatacctctgtcaaggttgcctttgaatatggctatcagcttattgttccagaaggtgctgtcacaacctttgatggggatgacattccagcagaaacgattaatgaattttatgaggacatttgggaggagcgctttgcagatgttctagattacaaacatattttc

SEQ ID NO: 3600 - protein, 166 aa, Streptococcus pneumoniae
  isochorismatase family protein; Cellular location: cytoplasm; Similar to strain R6 sequence 15903632 (9.E-93)
MKTAFIIIDVQNVLVETGFQTKSLLEKISYLQNQARSKNIEIIYVQHIENSEAQTSEDWQLSALLNRKPAEKVFQKKYNSIFKETGLKEYLDKQGIEKLVLCGMQTEYCVDTSVKVAFEYGYQLIVPEGAVTTFDGDDIPAETINEFYEDIWEERFADVLDYKHIF

SEQ ID NO: 3601 - DNA, 591 bp, Streptococcus pneumoniae
atgtcctatcaagactatatcaactgctcccgtgaggccttgttggaaaaaatggcagagcttctacctgagaaacgtctaacccattgtctaggtgtggagcgtgccgctatggaattagctcagcgctttggtgtagatgttgagaaagcaagtctagcaggtcttcttcatgactatgctaaaaagttgtcagatcaggaatttctagtcttgattgaccgttaccagctagaccctgacctcaaaaactggggcaataatgtctggcatggtatggtcggaatttacaaaattcaggaagatttggatttgcatgattctgaaattctgcgagccattgaaattcatacagtcggagctggtcaaatgacagacctagataaggtcatctacgtcgcagactatatcgagcacaatcgagcctttcctggagtagatgtggcgcgtgagattgcaagtctatcgctcaataaggcggtggcctacgaaacagctcgtaccgtggagtatctagctcatcagggattccccatctatccccaaacccttgaaacctataacgcctttgtgcactatttgaaagaggac

SEQ ID NO: 3602 - protein, 197 aa, Streptococcus pneumoniae
  conserved hypothetical protein; Cellular location: cytoplasm; Similar to strain R6 sequence 15903633 (e-110)
MSYQDYINCSREALLEKMAELLPEKRLTHCLGVERAAMELAQRFGVDVEKASLAGLLHDYAKKLSDQEFLVLIDRYQLDPDLKNWGNNVWHGMVGIYKIQEDLDLHDSEILRAIEIHTVGAGQMTDLDKVIYVADYIEHNRAFPGVDVAREIASLSLNKAVAYETARTVEYLAHQGFPIYPQTLETYNAFVHYLKED

SEQ ID NO: 3603 - DNA, 627 bp, Streptococcus pneumoniae
atgacaatcgaactattgactccctttaccaaggtagagttggagccagaaatcaaggagaaaaaacgcaaacaagttgggattttaggggggaattttaaccctgttcacaatgcccatctcattgttgcggatcaagtacggcaacagttgggactggatcaagttcttctcatgcctgaataccaacctcctcacgttgataaaaaggaaaccatccctgaacaccatcgtctcaagatgcttgagttggcaattgagggaattgacggcctagtcattgaaaccattgagttggagcgcaagggtatttcctacacctacgacaccatgaagattttgacagagaagaatccagatacggattattactttatcatcggtgccgacatggttgactatctgcctaagtggtaccgaattgatgaactggttgacatggttcagtttgtgggggttcagcgtccacgctacaaggtagggacttcctatccagttatctgggtggacgtaccgctcatggatatctcgtccagcatggtgcgggacttccttgcccaaggtcggaaacccaactttctcctacctcagccagtgctagactacatcgagaaggaagggctctac

SEQ ID NO: 3604 - protein, 209 aa, Streptococcus pneumoniae
  conserved hypothetical protein; Cellular location: cytoplasm; Similar to strain R6 sequence 15903634 (e-121)
MTIELLTPFTKVELEPEIKEKKRKQVGILGGNFNPVHNAHLIVADQVRQQLGLDQVLLMPEYQPPHVDKKETIPEHHRLKMLELAIEGIDGLVIETIELERKGISYTYDTMKILTEKNPDTDYYFIIGADMVDYLPKWYRIDELVDMVQFVGVQRPRYKVGTSYPVIWVDVPLMDISSSMVRDFLAQGRKPNFLLPQPVLDYIEKEGLY

SEQ ID NO: 3605 - DNA, 309 bp, Streptococcus pneumoniae
atgtcattaacatcaaaacaacgtgccttcctcaacagccaggcacacaccctcaaacctatcatccaaatcgggaaaaatggactcaacgaccaaatcaaaaccagcgtccgtcaagctcttgatgcgcgtgaattaatcaaggttactctcttacaaaacacagatgaaaacatccacgaagtagctgaaattttggaagaagaaatcggtgtggatacagtccaaaaaataggacgcatcttgattttgtttaaacaatctagcaagaaagaaaatcgcaagatttctaagaaagtcaaagaaatc

SEQ ID NO: 3606 - protein, 103 aa, Streptococcus pneumoniae
  conserved hypothetical protein; Cellular location: cytoplasm; Similar to strain R6 sequence 15903635 (3.E-52)
MSLTSKQRAFLNSQAHTLKPIIQIGKNGLNDQIKTSVRQALDARELIKVTLLQNTDENIHEVAEILEEEIGVDTVQKIGRILILFKQSSKKENRKISKKVKEI

SEQ ID NO: 3607 - DNA, 1104 bp, Streptococcus pneumoniae
atggaagaaattctctgtattggttgtggagcaaccattcagacgacagataaagctggtcttggttttaccccccagtcggcacttgaaaaaggtttggagactggcgaagtctattgccaacgctgtttccgtctccgccactacaatgaaatcacagatgtccagttgacgaacgatgatttcctcaagctcttgcacgaggtgggagacagtgatgctttagtggtcaatgttattgatatctttgattttaatggatctgtcatcccaggtttaccacgtttcgtctcgggcaatgatgtcctcttggtaggaaataaaaaagatatccttcctaagtcagttaagtctggtaagattagccagtggctcatgaaacgtgcccatgaagaaggtcttcgtccagtcgatgtggtcctaacttcagcacaaaataaacatgccattaaggaagtcattgacaagattgaacactaccgtaagggccgcgatgtctatgtggtcggtgtgaccaacgttggaaaatcaactctaatcaatgctattatccaagaaatcacgggtgatcagaatgtcatcactacttcacgcttcccagggacaaccttggacaaaatagagattccgcttgacgacggatcttatatttacgatacgccgggaattatccaccgccaccagatggctcactacttgacggccaaaaacctcaagtatgtcagtcctaaaaaggaaatcaagcctaagacctatcagcttaatcctgagcaaaccctatttttaggtggtttgggacgctttgactttatagcaggagaaaagcaaggatttactgctttctttgataatgaactcaaactccatcgtagcaagcttgaaggagctagtgctttctacgataagcacctgggaactcttctgacaccaccaaatagcaaggaaaaagaagatttcccaaggctagtccagcatgtctttaccattaaagataagacagacctagttatctcaggcctaggatggattcgtgtaacaggcatagcaaaagtcgccgtctgggcaccagaaggcgtcgccgtcgtcacacgaaaagcaattatt

SEQ ID NO: 3608 - protein, 368 aa, Streptococcus pneumoniae
  GTP-binding protein; Cellular location: cytoplasm; Similar to strain R6 sequence 15903636 (0.E+01)
MEEILCIGCGATIQTTDKAGLGFTPQSALEKGLETGEVYCQRCFRLRHYNEITDVQLTNDDFLKLLHEVGDSDALVVNVIDIFDFNGSVIPGLPRFVSGNDVLLVGNKKDILPKSVKSGKISQWLMKRAHEEGLRPVDVVLTSAQNKHAIKEVIDKIEHYRKGRDVYVVGVTNVGKSTLINAIIQEITGDQNVITTSRFPGTTLDKIEIPLDDGSYIYDTPGIIHRHQMAHYLTAKNLKYVSPKKEIKPKTYQLNPEQTLFLGGLGRFDFIAGEKQGFTAFFDNELKLHRSKLEGASAFYDKHLGTLLTPPNSKEKEDFPRLVQHVFTIKDKTDLVISGLGWIRVTGIAKVAVWAPEGVAVVTRKAII

SEQ ID NO: 3609 - DNA, 525 bp, Streptococcus pneumoniae
atggcgattgaaaattatataccagattttgctgtggaagcagtctatgatctgacagtcccaagcctgcaggcgcagggaataaaggctgttttggtcgatttggataataccctcattgcttggaacaaccctgatggaacgccagagatgaagcaatggctacatgaccttcgggacgcgggtattggcattatcgtagtgtcaaataacaccaaaaaacgcgttcaacgagcagttgagaaatttgggattgattacgtttactgggccttgaagcccttcacatttggtattgaccgtgctatgaaggaattccactatgacaaaaaggaagtggtcatggttggtgaccaactcatgacagatatacgagcagcccaccgtgcagggattcggtcaattttagtcaaacccttggtccaacatgactcaatcaaaacgcagattaaccgaactcgtgagcgtcgtgttatgagaaaaatcactgaaaagtacggaccgattacatataaaaaaggaatt

SEQ ID NO: 3610 - protein, 175 aa, Streptococcus pneumoniae
  conserved hypothetical protein; Cellular location: cytoplasm; Similar to strain R6 sequence 15903637 (7.E-99)
MAIENYIPDFAVEAVYDLTVPSLQAQGIKAVLVDLDNTLIAWNNPDGTPEMKQWLHDLRDAGIGIIVVSNNTKKRVQRAVEKFGIDYVYWALKPFTFGIDRAMKEFHYDKKEVVMVGDQLMTDIRAAHRAGIRSILVKPLVQHDSIKTQINRTRERRVMRKITEKYGPITYKKGI

SEQ ID NO: 3611 - DNA, 906 bp, Streptococcus pneumoniae
atggttttagaaaagcagttgggcaatggttgtacctggatagacctagacctaggaaagttgaataaactagaagacctttctgaaatttacggtttggacaaggaaaccattgaatacgcactggatagaaacgagcgcgcccacatggactaccaccgtgaaagtgagacggttacctttatctataatgtcttagacgtaaaaaaggacaaggcctactatgagacttttcccatgacctttattgtcgagcatcgtcgcctgattaccattagtaataccaagaacgcctatgtcattgaacagatgactcgttatctggagaaccatgacacgctttcgatttataagtttctctttgccagtctggaaatcatcagcaatgcctactatcctgtcattgagcagatggacaagagtagggatgaggtcaatgacctcttgcgccagcgaactaccaagaaaaacctctttgtcctgtctgatttggagactggtatggtttatctgacggcagctgccaaacaaaatcggattttgttagagcatattcaaggtcatgccttgtatcgtagttttgatgagattgagagagaacagtttgatgatgccatgattgaggctcatcagctggtatccatgacagacctaatctctcagattttacagcagctttcagcctcttacaacaatattctaaacaataatctgaatgacaatttgacaaccttgactatcatttcagtcttgctagctgttttggcagtcgtgacaggctttttcggaatgaatgttcccttacctttaacagatgagccccatgcttggctctatatcagtttggctagtgcaggtttgtggattgttttatccttgttactaaggaaaattgcgaaaaaaagt

SEQ ID NO: 3612 - protein, 302 aa, Streptococcus pneumoniae
  magnesium transporter, CorA family, putative; Cellular location: membrane; Similar to strain R6 sequence 15903638 (e-166)
MVLEKQLGNGCTWIDLDLGKLNKLEDLSEIYGLDKETIEYALDRNERAHMDYHRESETVTFIYNVLDVKKDKAYYETFPMTFIVEHRRLITISNTKNAYVIEQMTRYLENHDTLSIYKFLFASLEIISNAYYPVIEQMDKSRDEVNDLLRQRTTKKNLFVLSDLETGMVYLTAAAKQNRILLEHIQGHALYRSFDEIEREQFDDAMIEAHQLVSMTDLISQILQQLSASYNNILNNNLNDNLTTLTIISVLLAVLAVVTGFFGMNVPLPLTDEPHAWLYISLASAGLWIVLSLLLRKIAKKS

SEQ ID NO: 3613 - DNA, 603 bp, Streptococcus pneumoniae
atgagactgatgaaaatatggtataatgaaataaaggagttttatatgcaaaaatttattcaggcttatattgaaaagctagatgtgacaaccattatcgagaatattctaaccaaggtcatttctcttttactgcttttaattgtattttatattgctaaaaaaatgcttcataccatggtgcagagaattgtcaaaccttctctaaaaatgtctcgtcatgatgttggacgccaaaaaaccatctcacgtttactagaaaatgtgtttaattatacgctatatttctttttactctactgcattttgtcgattttaggtttgccagtttctagtttgctggctggagctggtattgctggggtagcgattggtatgggagcccaaggctttctgtctgatgtcatcaatggctttttcatcctctttgaacgtcaactggatgtgggagatgaggtcgttctgacaaatggaccgattactgtatcgggtaaggttgtcagtgtgggaattcgtacgacacagcttcgtagcgaggagcaagcccttcactttgtccctaaccgaaatatcacagttgttagcaatttctcacgcacagac

SEQ ID NO: 3614 - protein, 201 aa, Streptococcus pneumoniae
  conserved domain protein; Cellular location: membrane; Similar to strain R6 sequence 15903639 (e-109)
MRLMKIWYNEIKEFYMQKFIQAYIEKLDVTTIIENILTKVISLLLLLIVFYIAKKMLHTMVQRIVKPSLKMSRHDVGRQKTISRLLENVFNYTLYFFLLYCILSILGLPVSSLLAGAGIAGVAIGMGAQGFLSDVINGFFILFERQLDVGDEVVLTNGPITVSGKVVSVGIRTTQLRSEEQALHFVPNRNITVVSNFSRTD

SEQ ID NO: 3615 - DNA, 186 bp, Streptococcus pneumoniae
ttgtggggaatcctaggactgacccttcctaatctctcagggattgggctactcgaggatttattcgttggaggtctaaaagctgttgctcctatcctagtctttgctctcgttgccaatgccctttcccaacatcaaaagggacaagatagcaatatgaaaactgttgttttcttgtatatccta

SEQ ID NO: 3616 - protein, 62 aa, Streptococcus pneumoniae
  sodium/dicarboxylate symporter family protein-related
MWGILGLTLPNLSGIGLLEDLFVGGLKAVAPILVFALVANALSQHQKGQDSNMKTVVFLYIL

SEQ ID NO: 3617 - DNA, 957 bp, Streptococcus pneumoniae
atgatagggactttcgccgctgctcttgtagctgtactagcaaatttcatcgtccctattgaaattaccccaaatagtgccaatactgaaattgcaccaccagatgggattgggcaggttctcagcaacctcttgctcaaactggttgacaacccagtcaacgccctgcttactgctaactatattagaatcttatcttgggcagtcatttttggaatcgctatgagagaagccagtaaaaatagtcaagaattgctaaaaactatcgctgacgtgacttctaaaattgtcgaatggatcatcaatctggctccatttggaatccttggtcttgtttttaaaaccatttctgacaagggagtcggaagccttgccaactacggtattttattggttctattagtaacgactatgctttttgttgcccctgtggtcaaccctttgattgccttcttctttatgagacgcaatccttaccctctagtttggaactgcctccgtgtcagcggtgtgacagcctttttcactcgtagttctgcgactaacattcctgtcaacatgaaactctgccatgaccttggactcaacccagatacctattctgtttctatcccactcggttctactatcaatatggctggagtagcgattaccattaaccttttgacccttgctgcagttaacactcttggaattcctgttgactttgccacagcctttgtcctcagtgtggtagcagctatctcatcctgtgatgcttcaggtattgccggaggttccctccttcttatcccagttgcttgtagccttttcggtatttctaacgatattgccatacaaattgttggggttggttttgtgattggtgtcatccaagactcatgtgaaacagcccttaactcttctacagatgtcctctttaccgccgttgccgaatacgcagcaacccgtaaaaaa

SEQ ID NO: 3618 - protein, 319 aa, Streptococcus pneumoniae
  sodium/dicarboxylate symporter family protein
MIGTFAAALVAVLANFIVPIEITPNSANTEIAPPDGIGQVLSNLLLKLVDNPVNALLTANYIRILSWAVIFGIAMREASKNSQELLKTIADVTSKIVEWIINLAPFGILGLVFKTISDKGVGSLANYGILLVLLVTTMLFVAPVVNPLIAFFFMRRNPYPLVWNCLRVSGVTAFFTRSSATNIPVNMKLCHDLGLNPDTYSVSIPLGSTINMAGVAITINLLTLAAVNTLGIPVDFATAFVLSVVAAISSCDASGIAGGSLLLIPVACSLFGISNDIAIQIVGVGFVIGVIQDSCETALNSSTDVLFTAVAEYAATRKK

SEQ ID NO: 3619 - DNA, 951 bp, Streptococcus pneumoniae
atgtctattagccaacgtacgaccaagctcatcttagctacctgtcttgcctgcctgcttgcttattttctcaatctttcgtcagcagtttcggctggaattatcgctctcttgagcctatctgatacgcgtagaagtactttaaaactggctcgcaatcgtcttttttctatgcttctagctctggctatcggtgttctagcttttcacttgagcggatttcatatctggagtctcggcctctatctggccttctacgttcctttagcctacaagatgggctgggaaattggcatcacaccaagcactgttttggttagccatctcttggttcaagagtcaacctctccagaccttctagtcaatgaattccttctctttgctattggtacaggatttgccttgcttgttaatctctatatgccttcacgagaagaggaaatccagcactaccacacgctggtggaagaaaagttaaaagatatcctccagcgcttcaaatactatttatccagaggagacggacgcaaccgagcacagctggtagcagaattagacacgcttttgaaagaagccctcagactggtctatttggatcactctgaccacctctttcaccagacagactaccatatccactactttgagatgagacagcgacaaagtcgtatcctgagaaacatggcccaacagattaacacttgtcaccttgccgccagtgaaagcctgatcttagcgcaactcttttcaaaaattgcaggtcaactgagccagaccaatcctgcttctgatttgctagatgaaattgaacgttatctggaagtcttccggaaccgcagtctgcccaagacaagagaagaatttgaaacccgcgccacccttcttcaactcctacgtgaagccaaaaccttcatccaagtaaaagttgatttttaccaaaaatatagacag

SEQ ID NO: 3620 - protein, 317 aa, Streptococcus pneumoniae
  conserved hypothetical protein; Cellular location: membrane; Feature of note: RGD motif; Similar to strain R6 sequence 15903641 (e-178)
MSISQRTTKLILATCLACLLAYFLNLSSAVSAGIIALLSLSDTRRSTLKLARNRLFSMLLALAIGVLAFHLSGFHIWSLGLYLAFYVPLAYKMGWEIGITPSTVLVSHLLVQESTSPDLLVNEFLLFAIGTGFALLVNLYMPSREEEIQHYHTLVEEKLKDILQRFKYYLSRGDGRNRAQLVAELDTLLKEALRLVYLDHSDHLFHQTDYHIHYFEMRQRQSRILRNMAQQINTCHLAASESLILAQLFSKIAGQLSQTNPASDLLDEIERYLEVFRNRSLPKTREEFETRATLLQLLREAKTFIQVKVDFYQKYRQ

SEQ ID NO: 3621 - DNA, 372 bp, Streptococcus pneumoniae
ttgtggattggtctgaagttttcttttttatactcaatgaaaatcaaagagcaaactaggaagctagccgcaggctgctcaaaacaccgttttgaggttgtagatataactgacgaagtcagctcaaaacaccgttttgaggttgtagatataactgacgaagtcagctcaaaacaccgttttgaggttgtggatagaactgacgaagtcagctcaaaacaccgttttgaggttgtggatagaactgacgaagtcagctcaaaacaccgttttgaggttgtggatagaactgacgaagtcagctcaaaacaccgttttgaggttgtggatagaactgacgaagtcagtaacatatatacagcaaggcgacgc

SEQ ID NO: 3622 - protein, 124 aa, Streptococcus pneumoniae
  box element
MWIGLKFSFLYSMKIKEQTRKLAAGCSKHRFEVVDITDEVSSKHRFEVVDITDEVSSKHRFEVVDRTDEVSSKHRFEVVDRTDEVSSKHRFEVVDRTDEVSSKHRFEVVDRTDEVSNIYTARRR

SEQ ID NO: 3623 - DNA, 222 bp, Streptococcus pneumoniae
atgattgaaatactaattgttttagctattatcctatctcttgctttgattgtattggtaactatacaaccccgtcaaaatcaactattttccatggatgccactagtaatattggtaaaccaagctactggcagagcaacaccttggtcaaggtgctcactttattggtgagtttggctttatttattctactattaacctttatggtgattacttataaa

SEQ ID NO: 3624 - protein, 74 aa, Streptococcus pneumoniae
  hypothetical protein; Cellular location: membrane
MIEILIVLAIILSLALIVLVTIQPRQNQLFSMDATSNIGKPSYWQSNTLVKVLTLLVSLALFILLLTFMVITYK

SEQ ID NO: 3625 - DNA, 177 bp, Streptococcus pneumoniae
atgtcagaggaagatttattttacaaagacgttgaaggccgcatggaagagttgaaacaaaaacccatcaagaaggaaaaagaaacccgaggggaaaagattagtaagactttttcacttttactgggtttgatgattctgattggtttgctctttactttgctgggaattttgagg

SEQ ID NO: 3626 - protein, 59 aa, Streptococcus pneumoniae
  conserved domain protein; Cellular location: membrane
MSEEDLFYKDVEGRMEELKQKPIKKEKETRGEKISKTFSLLLGLMILIGLLFTLLGILR

SEQ ID NO: 3627 - DNA, 1335 bp, Streptococcus pneumoniae
atgattgaactttatgatagttacagtcaagaaagtcgagatttacatgaaagtctaggcgctactggtctttctcaacttggagtggtcatcgatgcagatggttttctgcctgatggtctgctttctccttttacctattatctaggttacgaggatggaaaacctctctattttaatcaagttcccgtttcagatttttgggaaattttaggagataatcagtctgcttgtattgaagatgtgacgcaggagagggctgtcattcattatgctgatggaatgcaggctcgcttggttaaacaggtagactggaaagacctagaaggtcgagtacgtcaggttgaccactacaatcgcttcggagcttgttttgctacaacgacttatagcgcagatagcgagccgattatgacagtttaccaagatgtcaatggtcaacaagttttactggaaaaccatgtgacgggtgatatcttattgactttgccaggtcagtccatgcgttactttgcaaataaagttgaatttatcaccttctttttgcaagatttggaaatagataccagtcagcttatctttaatactctagcgactcctttcttggtttccttccatcatccagataaatctggctcggatgtcttggtatggcaggaacctctctatgatgccattccaggtaatatgcagttgattttggaaagtgataatgtgcgtactaagaagatcatcattccaaataaggcgacttatgagcgcgctttagagttaactgacgagaaataccatgatcagtttgtgcacttgggttatcattaccagttcaaacgtgataatttcctaagacgagatgccttaatcttgaccaattcagatcagattgagcaagtagaagcaatcgcaggagccttgcctgatgtcactttccgtattgcagcggtgacagagatgtcttctaagctcttagacatgctttgctatcctaatgtggccctttaccagaacgctagtccacagaagattcaggagctgtatcaactgtcggatatttacttggatataaaccacagtaatgagttgctacaggcagtgcgtcaggcctttgagcacaatctcttgattcttggctttaatcagacggtgcacaatagactttatatcgctccagaccatctatttgaaagtagtgaagttgctgctttggttgagaccattaaattggccctttcagatgttgatcaaatgcgtcaggcacttggcaaacaaggccaacatgcaaattatgttgacttggtgagatatcaggaaaccatgcaaactgttttaggaggc

SEQ ID NO: 3628 - protein, 445 aa, Streptococcus pneumoniae
  conserved hypothetical protein; Cellular location: cytoplasm
MIELYDSYSQESRDLHESLGATGLSQLGVVIDADGFLPDGLLSPFTYYLGYEDGKPLYFNQVPVSDFWEILGDNQSACIEDVTQERAVIHYADGMQARLVKQVDWKDLEGRVRQVDHYNRFGACFATTTYSADSEPIMTVYQDVNGQQVLLENHVTGDILLTLPGQSMRYFANKVEFITFFLQDLEIDTSQLIFNTLATPFLVSFHHPDKSGSDVLVWQEPLYDAIPGNMQLILESDNVRTKKIIIPNKATYERALELTDEKYHDQFVHLGYHYQFKRDNFLRRDALILTNSDQIEQVEAIAGALPDVTFRIAAVTEMSSKLLDMLCYPNVALYQNASPQKIQELYQLSDIYLDINHSNELLQAVRQAFEHNLLILGFNQTVHNRLYIAPDHLFESSEVAALVETIKLALSDVDQMRQALGKQGQHANYVDLVRYQETMQTVLGG

SEQ ID NO: 3629 - DNA, 1509 bp, Streptococcus pneumoniae
atgacaatttacaatataaatttaggaattggttgggctagtagcggtgttgaatacgctcaagcctatcgtgctggtgtttttcggaaattaaatctgtcctctaagtttatctttacagatatgattttagccgataatattcagcacttaacagccaatattggttttgatgataatcaggttatctggctttataatcatttcacagatatcaaaattgcacctactagcgtgacagtggatgatgtcttggcttactttggtggtgaagaaagtcacagagaaaaaaatggcaaggttttacgtgtattcttttttgaccaagataagtttgtaacctgttatttggttgatgagaacaaggacttggttcaacatgccgagtatgtttttaagggaaacctgattcggaaggattacttttcttatacgcgttattgtagcgagtattttgctcccaaggacaatgttgcagtcttataccaacgaactttttataatgaagacgggactccagtctatgatatcttgatgaatcaagggaaggaagaagtttatcatttcaaggataagattttctatggaaagcaagcttttgtgcgtgcctttatgaaatctttgaatttgaataagtctgatttggtcattctcgatagggagacaggtattggacaggttgtgtttgaggaagcacagacagcacatctagcggtagttgttcatgcggagcattatagtgaaaatgctacaaatgaggactatatcctttggaataactattatgactatcagtttaccaatgcagataaggttgacttctttatcgtgtctactgatagacaaaatgaagttctacaagagcaatttgccaaatatactcagcatcagccaaagattgttaccattcctgtaggcagtattgattccttgacagattcaagtcaagggcgcaaaccattttcattgattacggcttcacgtcttgccaaagaaaagcacattgattggcttgtgaaagctgtgattgaagctcataaggagttaccggaactaacctttgatatctatggtagtggtggagaagattctctgcttagagaaattattgcaaatcatcaggcagaggactatatccaactcaaggggcatgcggaactttcgcagatttatagccagtatgaggtctacttaacggcttctaccagcgaaggatttggtctgaccttgatggaagctattggttcaggtctacctctaattggttttgatgtgccttatggtaatcagacctttatagaggatgggcaaaatggttatttgattccaagttcatctgaccatgtagaagaccaaatcaagcaagcttatgccgctaagatttgtcaattgtatcaagaaaatcgtttggaagctatgcgtgcctattcttaccaaattgcagaaggcttcttgaccaaagaaattttagaaaagtggaagaaaacagtagaggaggtgctccatgat

SEQ ID NO: 3630 - protein, 503 aa, Streptococcus pneumoniae
  glycosyl transferase, group 1; Cellular location: cytoplasm; Similar to strain R6 sequence 15903267 (1.E-10)
MTIYNINLGIGWASSGVEYAQAYRAGVFRKLNLSSKFIFTDMILADNIQHLTANIGFDDNQVIWLYNHFTDIKIAPTSVTVDDVLAYFGGEESHREKNGKVLRVFFFDQDKFVTCYLVDENKDLVQHAEYVFKGNLIRKDYFSYTRYCSEYFAPKDNVAVLYQRTFYNEDGTPVYDILMNQGKEEVYHFKDKIFYGKQAFVRAFMKSLNLNKSDLVILDRETGIGQVVFEEAQTAHLAVVVHAEHYSENATNEDYILWNNYYDYQFTNADKVDFFIVSTDRQNEVLQEQFAKYTQHQPKIVTIPVGSIDSLTDSSQGRKPFSLITASRLAKEKHIDWLVKAVIEAHKELPELTFDIYGSGGEDSLLREIIANHQAEDYIQLKGHAELSQIYSQYEVYLTASTSEGFGLTLMEAIGSGLPLIGFDVPYGNQTFIEDGQNGYLIPSSSDHVEDQIKQAYAAKICQLYQENRLEAMRAYSYQIAEGFLTKEILEKWKKTVEEVLHD

SEQ ID NO: 3631 - DNA, 2370 bp, Streptococcus pneumoniae
gtgtttagacgtttaggtcaagatttccagcttaggaaagtgaaaaagattttaaagcagattaatgccctgaaaggcaagatgtcctctctttcggatcaagaattagtagctaaaacagtagagtttcgtcagcgtctttccgagggagaaagtctagacgatattttggttgaagcttttgctgtggtgcgtgaagcagataagcggattttagggatgtttccttatgatgttcaagtcatgggagctattgtcatgcactatggaaatgttgctgagatgaatacgggggaaggtaagaccttgacagctaccatgcctgtctatttgaacgctttttcaggagaaggagtgatggttgtgactcctaatgagtatttatcaaagcgtgatgccgaggaaatgggtcaagtttatcgttttctaggattgaccattggtgtaccatttacggaagatccaaagaaggagatgaaagctgaagaaaagaagcttatctatgcttcggatatcatctacacaaccaatagtaatttaggttttgattatctaaatgataacctagcctcgaatgaagaaggtaagtttttacgaccgtttaactatgtgattattgatgaaattgatgatatcttgcttgatagtgcacaaactcctctgattattgcgggttctcctcgtgttcagtctaattactatgcgatcattgatacacttgtaacaaccttggtcgaaggagaggattatatctttaaagaggagaaagaggaggtttggctcactactaagggggccaagtctgctgagaatttcctagggattgataatttatacaaggaagagcatgcgtcttttgctcgtcatttggtttatgcgattcgagctcataagctctttactaaagataaggactatatcattcgtggaaatgagatggtactggttgataagggaacagggcgtctaatggaaatgactaaacttcaaggaggtctccatcaggctattgaagccaaggaacatgtcaaattatctcctgagacgcgggctatggcctcgatcacctatcagagtctttttaagatgtttaataagatatctggtatgacagggacaggtaaggtcgcggaaaaagagtttattgaaacttacaatatgtctgtagtacgcattccaaccaatcgtccgagacaacggattgactatccagataatctatatatcactttacctgaaaaagtgtatgcatccttggagtacatcaagcaataccatgctaagggaaatcctttactcgtttttgtaggctcagttgaaatgtctcaactctattcgtctctcttgtttcgtgaagggattgcccataatgtcctaaatgctaataatgcggcgcgtgaggctcagattatctccgagtcaggtcagatgggggctgtgacagtggctacctctatggcaggacgtggtacggatatcaagcttggtaaaggagtcgcagagcttgggggcttgattgttattgggactgagcggatggaaagtcagcggatcgacctacaaattcgtggccgttctggtcgtcagggagatcctggtatgagtaaattttttgtatccttagaggatgatgttatcaagaaatttggtccatcttgggtgcataaaaagtacaaagactatcaggttcaagatatgactcaaccggaagtattgaaaggtcgtaaataccggaaactagtcgaaaaggctcagcatgccagtgatagtgctggacgttcagcacgtcgtcagactctggagtatgctgaaagtatgaatatacaacgggatatagtctataaagagagaaatcgtctaatagatggttctcgtgacttagaggatgttgttgtggatatcattgagagatatacagaagaggtagcggctgatcactatgctagtcgtgaattattgtttcactttattgtgaccaatattagttttcatgttaaagaggttccagattatatagatgtaactgacaaaactgcagttcgtagctttatgaagcaggtgattgataaagaactttctgaaaagaaagaattacttaatcaacatgacttatatgaacagtttttacgactttcactgcttaaagccattgatgacaactgggtagagcaggtagactatctacaacagctatccatggctatcggtggtcaatctgctagtcagaaaaatccaatcgtagagtactatcaagaagcctacgcgggctttgaagctatgaaagaacagattcatgcggatatggtgcgtaatctcctgatggggctggttgaggtcactccaaaaggtgaaatcgtgactcattttcca

SEQ ID NO: 3632 - protein, 790 aa, Streptococcus pneumoniae
  preprotein translocase, SecA subunit (secA); Cellular location: cytoplasm; Similar to strain R6 sequence 15903587 (0.E+01)
MFRRLGQDFQLRKVKKILKQINALKGKMSSLSDQELVAKTVEFRQRLSEGESLDDILVEAFAVVREADKRILGMFPYDVQVMGAIVMHYGNVAEMNTGEGKTLTATMPVYLNAFSGEGVMVVTPNEYLSKRDAEEMGQVYRFLGLTIGVPFTEDPKKEMKAEEKKLIYASDIIYTTNSNLGFDYLNDNLASNEEGKFLRPFNYVIIDEIDDILLDSAQTPLIIAGSPRVQSNYYAIIDTLVTTLVEGEDYIFKEEKEEVWLTTKGAKSAENFLGIDNLYKEEHASFARHLVYAIRAHKLFTKDKDYIIRGNEMVLVDKGTGRLMEMTKLQGGLHQAIEAKEHVKLSPETRAMASITYQSLFKMFNKISGMTGTGKVAEKEFIETYNMSVVRIPTNRPRQRIDYPDNLYITLPEKVYASLEYIKQYHAKGNPLLVFVGSVEMSQLYSSLLFREGIAHNVLNANNAAREAQIISESGQMGAVTVATSMAGRGTDIKLGKGVAELGGLIVIGTERMESQRIDLQIRGRSGRQGDPGMSKFFVSLEDDVIKKFGPSWVHKKYKDYQVQDMTQPEVLKGRKYRKLVEKAQHASDSAGRSARRQTLEYAESMNIQRDIVYKERNRLIDGSRDLEDVVVDIIERYTEEVAADHYASRELLFHFIVTNISFHVKEVPDYIDVTDKTAVRSFMKQVIDKELSEKKELLNQHDLYEQFLRLSLLKAIDDNWVEQVDYLQQLSMAIGGQSASQKNPIVEYYQEAYAGFEAMKEQIHADMVRNLLMGLVEVTPKGEIVTHFP

SEQ ID NO: 3633 - DNA, 438 bp, Streptococcus pneumoniae
atgattattacacagagacagtctattcattggggagaagttggtgggacttatatgtatggaacaactgtatcttattaccctgacaaaagtgttcgtctgtataatcctctattgccatctggtgagattctaaagacttggttttctagtgtcaattaccaggctgcacgaacccaacctcagcttcccttattaaaaagaaagcaggagtatcaactatcactggtttttgactgtcagcctgaaaatggagtttataccaagataactttttttgaccgctatggtgatattttagaaaaaaaggtagaaaaagtgaaagatttcatatttacttatccagaagatagttatacttatcgagtttctcttttaagtgctggatttgagtccttaactttttatcatttttctatcaaggagatcagaagtgtt

SEQ ID NO: 3634 - protein, 146 aa, Streptococcus pneumoniae
  conserved domain protein; Cellular location: cytoplasm
MIITQRQSIHWGEVGGTYMYGTTVSYYPDKSVRLYNPLLPSGEILKTWFSSVNYQAARTQPQLPLLKRKQEYQLSLVFDCQPENGVYTKITFFDRYGDILEKKVEKVKDFIFTYPEDSYTYRVSLLSAGFESLTFYHFSIKEIRSV

SEQ ID NO: 3635 - DNA, 1533 bp, Streptococcus pneumoniae
atgtcaaaggaacttaatattttacagataggacttgccaattgggaaaatcactatgacatacctgaaaatatgagttggtattatttttacccaaactcatcaaaagcccttcgtgaaataattgaaaaagaggatattaaccgttttcatgcagttttaatagaagatggtcagtattccagagacttattttcctatgtaaaatattttgaaccttatactttattttataaccagaatctacaaataaatgatagagaggttgtggattttctaaaaaaacgatgtgcacaagcaattgattttttaagtccccaacaactaatcaatgatttaagtaaatctctttttggcggtgggtatggtgataaactctttcctccgacgatacaagtcaatccaaattttacaggagctatttcttatcaaggattggattatgtcagtttggaaggtgagtttgggcaagattttgcccagcttgcctattgggcttataatattatggtgcaaaaaacactccctattgagttgtggcttgaatatgagaaggaaggcaattgtgactttcgtttagtaatccgtaaaatgtggagtgggtctgttgatgatttctttgaagaagtaatagtatctgaaaaagacttggagcaagcactttttatggatagtcgagacggagactactttctctcgatatctgttgaagcaagaggtcgtggaactatcaaactaggtaatcttcaccaacgatggagtcgaaaacaatttggtaagtttgtacttggtggaaatatcctacatgattccaagcgtgatgaaataaactatttcttccatccaggtgattttaaaccgcctttgactgtctattttgcaggttatcgacctgcagaaggattcgagggttactttatgatgaaaactcttggatgtcccttcattttattttctgatccacgtttagaggggggagctttttatctcggaacggatgagctagagggaaaagtaaaggatacgatcactcactatcttgattatttaggctttgatcataaggatttgattttatcaggtctttctatgggaacgtttccggctctctattatggtgcttcttttgaaccccatgccatcatagttggtaagcccttggctaatttaggaactatagctagtcgtggacgtttggacgcaccgggtgtctctaacttagcttttgattgtttaattcatcatacaggtgggacaagttctcaagatatgacggagttggatcagcgtttttggaaaatttttaaacaagcaaatttttcaaagacaacctttggtttatcctatatgaaagatgaagaaatggatccacaagcctatgaacaattagtgtcttatctgtgtaatacaggtgcgaagattttatctaaaggaactgctggacgacacaatgatgatacagataccaatatttcttggtttttgcacttttatagaatggtcttagagactggttttggaagggagaaaaga

SEQ ID NO: 3636 - protein, 511 aa, Streptococcus pneumoniae
  hypothetical protein; Cellular location: cytoplasm
MSKELNILQIGLANWENHYDIPENMSWYYFYPNSSKALREIIEKEDINRFHAVLIEDGQYSRDLFSYVKYFEPYTLFYNQNLQINDREVVDFLKKRCAQAIDFLSPQQLINDLSKSLFGGGYGDKLFPPTIQVNPNFTGAISYQGLDYVSLEGEFGQDFAQLAYWAYNIMVQKTLPIELWLEYEKEGNCDFRLVIRKMWSGSVDDFFEEVIVSEKDLEQALFMDSRDGDYFLSISVEARGRGTIKLGNLHQRWSRKQFGKFVLGGNILHDSKRDEINYFFHPGDFKPPLTVYFAGYRPAEGFEGYFMMKTLGCPFILFSDPRLEGGAFYLGTDELEGKVKDTITHYLDYLGFDHKDLILSGLSMGTFPALYYGASFEPHAIIVGKPLANLGTIASRGRLDAPGVSNLAFDCLIHHTGGTSSQDMTELDQRFWKIFKQANFSKTTFGLSYMKDEEMDPQAYEQLVSYLCNTGAKILSKGTAGRHNDDTDTNISWFLHFYRMVLETGFGREKR

SEQ ID NO: 3637 - DNA, 1578 bp, Streptococcus pneumoniae
atgtattattttattccagcttggtatgggtcagaaagaacatggcatgcagatatcactccatggtatttttctcattttcgtctagagtttgatgatacctttcaccagattcggctctttcaagagcaagatatagattctcgtctattagtattagcttaccagcctcatctacgttattttttatatagacatggtgtgttagaaatggatacttattccgtttttgatgttatgcaagattttcataatctccatacccaagttttaagcattagagatattgagtgggatgatgactgtgaatttatttatagtccctttacgattatcgttcaaaaaaatgggaagaaatttgctaaggttgaacatggagttgaaggcttcatcagtgatatacagtattttgaaccaaatggtcaaatacatatgcaccatatcgtggatgatcgtgggtttgtatcgagcattatcttttttgaagatgggcaagcagcctatcaagaatatctgaacctcaagggagagtggcaattcagagagcgtttaaaagaaggaggacaggtagaagtcaatccaattttgggttatcgctttaaaatgcttacctatcaaaatatgggagatctggtggcagaattttttgagaattatctgcaaacgtatgtgaaggatcaggatatttttatgcttccttctcattctcatcatgaccagttggtactagatcgtttacctagtactaatcctaaactgttgagtctgttcattggacgtaatcctcaagatacctttagggatttagatgtaacttttgaaaaatcggatttgattttggtggatagagaggatagtttacgattgttgcaggagttgtatcctgaacgaatgcatcaatgttatcatttatcatcttttgacacccgattacgattgggacgaagccaaactaagaaagaatccatcatttattttcaactggattttgagcaggggattgataatcaagctctgcttcaagtcttgtcctttgtcgctgaaaataaggatactgaggtgatttttggagcctttgctgctagtcaggagcaaatgaatgaggttgaagggattgttgagtctttcatccaagaaaacattcaatccgaaaatctgggaaaggcgattgattatggtgatgcagaaaatcctctggaagaaaatcaacaccaggacttacgcttacagtttgttaacttgaatgatgagttagatttgataaaaacactagaatttgtccgtttgattgtggatttaaatagacatcctcatctctacacacagattgctgggattagtgcaggaattcctcaaatcaacctagttgaaaccgtctatgttgaacatttaaaaaatggttatttgttagcagatgttacagaattttctaaggctgcacattattacacagataggttgaaggagtggaatgagtccttgatatattcaattgataagattaaggagcacacaggacaacaatttcttggaaaattagagaaatggatagaggaggttaaaaatgtcaaaggaact

SEQ ID NO: 3638 - protein, 526 aa, Streptococcus pneumoniae
  hypothetical protein; Cellular location: cytoplasm
MYYFIPAWYGSERTWHADITPWYFSHFRLEFDDTFHQIRLFQEQDIDSRLLVLAYQPHLRYFLYRHGVLEMDTYSVFDVMQDFHNLHTQVLSIRDIEWDDDCEFIYSPFTIIVQKNGKKFAKVEHGVEGFISDIQYFEPNGQIHMHHIVDDRGFVSSIIFFEDGQAAYQEYLNLKGEWQFRERLKEGGQVEVNPILGYRFKMLTYQNMGDLVAEFFENYLQTYVKDQDIFMLPSHSHHDQLVLDRLPSTNPKLLSLFIGRNPQDTFRDLDVTFEKSDLILVDREDSLRLLQELYPERMHQCYHLSSFDTRLRLGRSQTKKESIIYFQLDFEQGIDNQALLQVLSFVAENKDTEVIFGAFAASQEQMNEVEGIVESFIQENIQSENLGKAIDYGDAENPLEENQHQDLRLQFVNLNDELDLIKTLEFVRLIVDLNRHPHLYTQIAGISAGIPQINLVETVYVEHLKNGYLLADVTEFSKAAHYYTDRLKEWNESLIYSIDKIKEHTGQQFLGKLEKWIEEVKNVKGT

SEQ ID NO: 3639 - DNA, 1215 bp, Streptococcus pneumoniae
atgactaagatttattcgtcaatagcagtaaaaaaaggactatttacctcatttctactgtttatctatgtattgggaagtcgtattattctcccttttgttgacctaaatactaaagattttttaggaggttcaacagcctatctagccttctcagccgccctaacaggtgggaatctaagaagtttatcaattttttctgttggattatccccttggatgtccgccatgattttatggcagatgttttctttttctaaacggttgggtttaacatctacgtctatagaaatacaagatcgccgtaaaatgtacctgaccttgctaattgctgtgattcaatccttggcagttagcttgagactgccagtacaatcctcctattctgcaatattggttgttctaatgaatacaatattgctgatagcaggaacattttttcttgtttggttgtcagatttaaatgcgagtatggggattggaggttctattgtaatcctcctatccagtatggttttaaatattcctcaggatgttttggaaacatttcagacagtacacattccaacagggattattgtgttacttgctttattaacccttgtcttttcttatttacttgcccttatgtatcgagctcgctatttggttcctgttaataaaattggcttacacaatcgatttaaacgctattcttatctcgaaatcatgttgaatcctgcaggtgggatgccttatatgtatgtgatgagttttcttagtgtaccagcttatttgttcatcttgttgggatttattttccctaatcattcagggttagcggctttatcaaaggaatttatggttggaaagcctttgtgggtctatgtttatatttcggtcttatttttatttagtatcatttttgcttttgttacgatgaatggagaagagattgcagaccgtatgaaaaaatctggagaatacatttatggtatttatccaggtgcggatactagtcgatttattaatcgattggtccttcgtttctcagtcataggtggtctctttaatgtgattatggcaggtggtcccatgctttttgttttgtttgatgaaaagttattacgattggcaatgattccaggcttatttatgatgttcgggggcatgatttttacgattagagacgaggtcaaggctttaaggctaaatgagacctatagacctttgatt

SEQ ID NO: 3640 - protein, 405 aa, Streptococcus pneumoniae
  preprotein translocase SecY family protein; Cellular location: membrane; Similar to strain R6 sequence 15902253 (5.E-35)
MTKIYSSIAVKKGLFTSFLLFIYVLGSRIILPFVDLNTKDFLGGSTAYLAFSAALTGGNLRSLSIFSVGLSPWMSAMILWQMFSFSKRLGLTSTSIEIQDRRKMYLTLLIAVIQSLAVSLRLPVQSSYSAILVVLMNTILLIAGTFFLVWLSDLNASMGIGGSIVILLSSMVLNIPQDVLETFQTVHIPTGIIVLLALLTLVFSYLLALMYRARYLVPVNKIGLHNRFKRYSYLEIMLNPAGGMPYMYVMSFLSVPAYLFILLGFIFPNHSGLAALSKEFMVGKPLWVYVYISVLFLFSIIFAFVTMNGEEIADRMKKSGEYIYGIYPGADTSRFINRLVLRFSVIGGLFNVIMAGGPMLFVLFDEKLLRLAMIPGLFMMFGGMIFTIRDEVKALRLNETYRPLI

SEQ ID NO: 3641 - DNA, 903 bp, Streptococcus pneumoniae
atgagtgaattaattagtgttgtggtaccgatatacaatacgggaaaatatttagtggagtgtgtcgagcatattctgaagcaaacctatcaaaatatagaaattattttagttgatgacggttctacggataattctggggaaatttgtgatgcttttatgatgcaagataatcgtgtgcgagtattgcatcaagaaaataaggggggggcagcacaagctaaaaatatggggattagtgtagctaagggagagtacatcacgattgttgattcagatgatatcgtaaaagaaaatatgattgaaactctttatcagcaagtccaagaaaaggatgcagatgttgttatagggaattactataattatgacgaaagtgacgggaatttttatttttatgtaacagggcaagatttttgcgtcgaagaattagctatacaagaaattatgaaccgtcaagcaggagattggaaattcaatagctcggcctttatattgccgacatttaagttgattaaaaaagaattattcaatgaagttcacttttcaaatggtcgccgctttgatgatgaagcaactatgcatcgcttttatcttttagcctctaaaatcgtctttataaacgataatctctatctgtatagaagacgttcaggaagcatcatgagaacggaatttgatctttcctgggcaagagatattgttgaagtgttttctaagaaaatatcggattgtgtcttggctggtttggatgtctccgttctgcgtattcgatttgtcaatcttttaaaagattataagcaaactttagaataccatcaattaacagatactgaggaatataaagatatttgtttcagattaaagttgttttttgatgcagaacaaagaaatggtaaaagt

SEQ ID NO: 3642 - protein, 301 aa, Streptococcus pneumoniae
  glycosyl transferase, family 2; Cellular location: cytoplasm; Similar to strain R6 sequence 15903266 (2.E-37)
MSELISVVVPIYNTGKYLVECVEHILKQTYQNIEIILVDDGSTDNSGEICDAFMMQDNRVRVLHQENKGGAAQAKNMGISVAKGEYITIVDSDDIVKENMIETLYQQVQEKDADVVIGNYYNYDESDGNFYFYVTGQDFCVEELAIQEIMNRQAGDWKFNSSAFILPTFKLIKKELFNEVHFSNGRRFDDEATMHRFYLLASKIVFINDNLYLYRRRSGSIMRTEFDLSWARDIVEVFSKKISDCVLAGLDVSVLRIRFVNLLKDYKQTLEYHQLTDTEEYKDICFRLKLFFDAEQRNGKS

SEQ ID NO: 3643 - DNA, 1194 bp, Streptococcus pneumoniae
atgagaaaatcaatagtattagcggcagataatgcctatcttattcctttagagacgactataaagtctgtattgtatcacaatagagatgttgatttttatattctcaacagtgatatagctcctgaatggtttaaattattggggagaaaaatggaagttgtgaattctacaattcgcagtgtacacattgataaagaactttttgaaagctataaaacaggacctcatataaattatgcttcttactttagattttttgcgacagaagtggttgaatctgatagggtattgtatctggattccgatatcattgtaactggggaactagctactttgtttgagatagatctcaaaggatattcaattggtgctgttgatgatgtctatgcctatgaaggacgaaaatctggatttaatactggtatgttactaatggatgttgcaaagtggaaagaacattctattgtcaatagtttattggaattagcggccgagcagaatcaagttgttcatcttggggatcagagtattttaaatatttattttgaggataattggctagccttagataaaacatataattatatggtgggtattgatatttatcaccttgctcaagaatgtgaacgtctagatgacaatccacctacaattgttcactatgctagtcatgataaaccttggaatacatatagtatatctagactacgtgaattatggtgggtttatagagatttggattggtcagagattgcttttcaacgttccgatttaaattattttgaaagaagcaatcagtctaaaaaacaagtgatgcttgtgacatggagtgcagatataaaacatttagagtatttagtacaacggttacctgattggcattttcatttggctgcaccgtgtgattgttctgaggagctgacctctctatcacagtatacgaatgtaacagtatatcaaaatgtattacatagtagaattgattggctattggacgattctatagtttatttagatattaatacaggtggagaggtttttaatgtagttacaagggcacaagaaagtggcaagaaaatcttcgcttttgatatcacacgtaaaagtatggatgatggactctatgacggtattttttctgtggagagaccagatgatttagtggatagaatgaagaatatagagatagag

SEQ ID NO: 3644 - protein, 398 aa, Streptococcus pneumoniae
  glycosyl transferase, family 8; Cellular location: cytoplasm; Similar to strain R6 sequence 15902441 (8.E-31)
MRKSIVLAADNAYLIPLETTIKSVLYHNRDVDFYILNSDIAPEWFKLLGRKMEVVNSTIRSVHIDKELFESYKTGPHINYASYFRFFATEVVESDRVLYLDSDIIVTGELATLFEIDLKGYSIGAVDDVYAYEGRKSGFNTGMLLMDVAKWKEHSIVNSLLELAAEQNQVVHLGDQSILNIYFEDNWLALDKTYNYMVGIDIYHLAQECERLDDNPPTIVHYASHDKPWNTYSISRLRELWWVYRDLDWSEIAFQRSDLNYFERSNQSKKQVMLVTWSADIKHLEYLVQRLPDWHFHLAAPCDCSEELTSLSQYTNVTVYQNVLHSRIDWLLDDSIVYLDINTGGEVFNVVTRAQESGKKIFAFDITRKSMDDGLYDGIFSVERPDDLVDRMKNIEIE

SEQ ID NO: 3645 - DNA, 1218 bp, Streptococcus pneumoniae
atgagaaataccaaacgcgctgtagtatttgcaggtgattacgcttatattcgacaaatcgaaacggcgatgaagtcactctgtagacacaatagtcatttgaaaatttatctgctaaatcaggacattcctcaggaatggtttagtcaaataagaatatatttacaagagatggggggcgacttgattgactgcaagttaattggctcacagtttcaaatgaattggtctaataaattacctcatatcaatcatatgacatttgcacgctattttattccagattttgtaacagaagataaagttctctatctagatagtgatttgattgtgactggtgatttgaccgatttgtttgaattagacttaggtgaaaattatttggcagcagctcgttcttgctttggagcaggagtcggcttcaatgctggtgttctcttgattaacaacaaaaaatggggatctgaaactattcgacaaaaattgattgacttaacagaaaaagaacatgagaatgtggaagaaggagaccagtcaattttgaatatgttgtttaaagatcaatatagttcccttgaagatcaatataattttcaaataggatatgattatggggcggcaacctttaaacatcaattcatttttgatattccgctcgaaccactgccactaattttacactatatttctcaggataagccttggaatcaattttctgttggacgtctaagagaagtttggtgggaatactctttgatggattggtctgttattttaaatgaatggttttcaaagagtgtgaagtaccctagtaaatcacaaatatttaagttgcaatgtgttaatttaacgaattcttggtgtgtcgagaaaatcgattatttggcggagcaattgccagaagttcattttcatattgttgcttatacaaatatggcaaatgaactactagctttaacgcgttttcctaatgttaccgtatatccaaattccttaccaatgttattggaacaaatagtaatagcttcagatttgtatttggatttgaatcatgatcgaaaattagaagatgcatatgagtttgtgcttaagtacaaaaaaccaatgatagctttcgacaatacttgctctgaaaatctttctgagatttcatatgaaggtatctatccaagctccattccgaaaaaaatggttgcagcaatcagatcttacatgagg

SEQ ID NO: 3646 - protein, 406 aa, Streptococcus pneumoniae
  glycosyl transferase, family 8; Cellular location: cytoplasm; Similar to strain R6 sequence 15902441 (8.E-31)
MRNTKRAVVFAGDYAYIRQIETAMKSLCRHNSHLKIYLLNQDIPQEWFSQIRIYLQEMGGDLIDCKLIGSQFQMNWSNKLPHINHMTFARYFIPDFVTEDKVLYLDSDLIVTGDLTDLFELDLGENYLAAARSCFGAGVGFNAGVLLINNKKWGSETIRQKLIDLTEKEHENVEEGDQSILNMLFKDQYSSLEDQYNFQIGYDYGAATFKHQFIFDIPLEPLPLILHYISQDKPWNQFSVGRLREVWWEYSLMDWSVILNEWFSKSVKYPSKSQIFKLQCVNLTNSWCVEKIDYLAEQLPEVHFHIVAYTNMANELLALTRFPNVTVYPNSLPMLLEQIVIASDLYLDLNHDRKLEDAYEFVLKYKKPMIAFDNTCSENLSEISYEGIYPSSIPKKMVAAIRSYMR

SEQ ID NO: 3647 - DNA, 2442 bp, Streptococcus pneumoniae
atgaacaaaacaattgtactagcaggggatcgcaattacaccaggcagttagaaacaacgataaaatctattttataccacaatcgagatgttaagatttatattttgaatcaagatatcatgccagattggtttcgcaaaccacgaaaaatagctcgcatgttaggtagtgagattatcgatgttaaactacctgaacaaactgtgtttcaagattgggaaaagcaagatcacattagtagcattacttatgctagatattttattgcagattatatccaagaagataaggttttatatttagacagtgatttgattgtaaatacttctttagagaaattatttagtatttgtttagaagaaaaatcactcgcagcagttaaagatacagatggaattacatttaatgcaggtgttttattaatcaacaataaaaaatggcgtcaagagaaattaaaagaacgactaattgaacagagcattgttacaatgaaggaagttgaagaaggccgtttcgagcattttaatggtgatcaaacgatttttaatcaggtcttgcaagatgattggttagaactaggtcgagcttataatttacaagtagggcatgatattgtggctttgtataacaattggcaggaacatctggcttttaatgataaaccagtggtgattcattttacgacctacagaaaaccctggactaccttgacagccaatcgttatcgtgatttatggtgggaattccatgatttggagtggagtcagattttacaacaccatatgggagaatttgaactaatatcgcctctagataaggaattttcttgcttaaccttaacgaattcccaagatttagaaggaatagaagagctagttacagctctacctgaggtggtatttcatatcgcagcttggacggatatgggagataaattaaaaaaattagctgtatataataatgtgagattgcatccacaaattgttccaccggtcttagataagctgaaaaagtcaacaaatctatatttggatatcaatcatggtagtgcagatgagaactttttaaaatctttgcaagaacaagaaaaaacgctactagcttttcaatcgactcagcacggagagttaggacaaatcgttttcgaaaatgggaaagtttcctttatgattgatacgattaaagattttaagaaaaacggacatcttacctgttttcgacaacttccaagtttaacttgtttaacgtttacggcttctcagtatatcgaacaattggattacttggctggacagttgccaaatgttgtttttcaaattgctgcttggacagctatggggccaaaattatatgatttgtctaatcgttatcctaatattcagctctatccggcaatttctagagataagctagacgagttgaaggagaagatggatgcttatttagatatcaacctactgacttcaacatccgatatcgttgcagaaatggctcatctatctaaacctatactagccttttataaatctcaaaatgggaataatggccaaaggttgtattcaagtgaacatcctgaacgaatgttggctgatttgcaaaaattgataactaaggatatgctagaaaaaccgcttgatataatccaggtgaaagggatagatgaaaccttggattatattattgaacacaactcttctttagttcgttttggagatggggaaatcaatatgcttgcagggcattcaattccctaccaggattatgatgaagagttggtttcaatcatgagggacattatcggccaagaaagtcgagaagatttagtagtgtgccttcctgatgcttttacagatcgttttaggtttacatcgtgggcgattccattttggaaagatcacatggatcattatatggatttttacagagagttatgcagtgattcatggtatggctcaacctttgtatctcgcccttatatcgattttgaagacaagagtcaagctaaagctcaatttgaaaaattgaaaagcatttgggaaaaccgtgacttactgatagtcgaaggtgcgacttctcgttcaggtgtcggaaatgatttattcgatgaggcaaattctattaagcgaattatctgtccttctcatagtgccttttctagagttcatgaacttgaacaagaaattgaaaagtatgctggtggtcgcttgattttatgtatgcttggacctacagcaaaagttctgagttataatctatgccagatgggctatcaagttttggatgtaggccatattgactcagagtatgaatggatgaaaatgggagctaaaactaaggttaaattttctcataaacatactgcagaacataatttcgaccaagatattgaatttattgatgatgaaacctataacagtcagattgttgcacgaatattaaac

SEQ ID NO: 3648 - protein, 814 aa, Streptococcus pneumoniae
  glycosyl transferase, family 8; Cellular location: cytoplasm; Similar to strain R6 sequence 15902441 (8.E-27)
MNKTIVLAGDRNYTRQLETTIKSILYHNRDVKIYILNQDIMPDWFRKPRKIARMLGSEIIDVKLPEQTVFQDWEKQDHISSITYARYFIADYIQEDKVLYLDSDLIVNTSLEKLFSICLEEKSLAAVKDTDGITFNAGVLLINNKKWRQEKLKERLIEQSIVTMKEVEEGRFEHFNGDQTIFNQVLQDDWLELGRAYNLQVGHDIVALYNNWQEHLAFNDKPVVIHFTTYRKPWTTLTANRYRDLWWEFHDLEWSQILQHHMGEFELISPLDKEFSCLTLTNSQDLEGIEELVTALPEVVFHIAAWTDMGDKLKKLAVYNNVRLHPQIVPPVLDKLKKSTNLYLDINHGSADENFLKSLQEQEKTLLAFQSTQHGELGQIVFENGKVSFMIDTIKDFKKNGHLTCFRQLPSLTCLTFTASQYIEQLDYLAGQLPNVVFQIAAWTAMGPKLYDLSNRYPNIQLYPAISRDKLDELKEKMDAYLDINLLTSTSDIVAEMAHLSKPILAFYKSQNGNNGQRLYSSEHPERMLADLQKLITKDMLEKPLDIIQVKGIDETLDYIIEHNSSLVRFGDGEINMLAGHSIPYQDYDEELVSIMRDIIGQESREDLVVCLPDAFTDRFRFTSWAIPFWKDHMDHYMDFYRELCSDSWYGSTFVSRPYIDFEDKSQAKAQFEKLKSIWENRDLLIVEGATSRSGVGNDLFDEANSIKRIICPSHSAFSRVHELEQEIEKYAGGRLILCMLGPTAKVLSYNLCQMGYQVLDVGHIDSEYEWMKMGAKTKVKFSHKHTAEHNFDQDIEFIDDETYNSQIVARILN

SEQ ID NO: 3649 - DNA, 1008 bp, Streptococcus pneumoniae
atgaaactacatttaacaaatttatacggcatggctggtgatagtacggttatcttagctcaaaatgctgttcaaaagatagctagtcaactgggatttagagaggttggtatttatttttacaacattgcttcagatagtccttctgaaatgaataagcgtctggatggtattatggccagtatctctattggggatattttagtctttcagtctccaacctggaatggttttgaatttgatcgtctcttgtttgataagctaaaggatatgcaggtgaaaattatttgctttatccatgatgttgttcccctcatgtttgatagtaactattatctcatgaaagattatctgtatatgtataatctatcagatgttttgatagtgccgtcagagagaatgaaaacacgcctgatggaagaaggattgacgactaagaagattcttgttcaagggatgtgggatcatcctcatgatttatccttatacacccctgcttttaaaaaagaacttttttttgctggaagtttagagcgttttccagacttacaaaattggtctcaagatacgcctttgagagtattttcaaataaaggggaagctagttctagtgctagaagtctcagcatcgaaggatggaaaaaagatgaggaattgttgctagaattatcaaagggtggatttggccttgtctggggaacccatcaaaatgagggagaaagtaaccaatactataccttgaatatatctcataaggtgagtacctatctaacagcgggcattccagtcattgtaccaagtagcttgtcaactgctaaatttatagtagatcaaggcttgggctttatggcggatagtctggaagaggttcatgagatagttgataaaatgaatctacaagaatatcaagaaatgacgaatcgtatcaagacctttagctatttgttaaaagagggctatttcactaaaaagttattggtagatgcaatctatcacttgggaattgat

SEQ ID NO: 3650 - protein, 336 aa, Streptococcus pneumoniae
  conserved hypothetical protein; Cellular location: cytoplasm
MKLHLTNLYGMAGDSTVILAQNAVQKIASQLGFREVGIYFYNIASDSPSEMNKRLDGIMASISIGDILVFQSPTWNGFEFDRLLFDKLKDMQVKIICFIHDVVPLMFDSNYYLMKDYLYMYNLSDVLIVPSERMKTRLMEEGLTTKKILVQGMWDHPHDLSLYTPAFKKELFFAGSLERFPDLQNWSQDTPLRVFSNKGEASSSARSLSIEGWKKDEELLLELSKGGFGLVWGTHQNEGESNQYYTLNISHKVSTYLTAGIPVIVPSSLSTAKFIVDQGLGFMADSLEEVHEIVDKMNLQEYQEMTNRIKTFSYLLKEGYFTKKLLVDAIYHLGID

SEQ ID NO: 3651 - DNA, 489 bp, Streptococcus pneumoniae
gtgtatatgacttatgttacggatccagatgattctctagaagtgatagaaggtaaagcaattatggatagggaaggtgtcgaagaagtcagaaatgggaactggactgtagctgtcttgaagttattcaagagagagttactacaagatttaccatttcctataggaaaaattgcagaggatacttactggacatggaaggtacttctaagagcttcgaggatagtctatttgaatcgttgtgtttactggtaccgtgttggtttatctgatactttatcgaatacatggagtgaaaagcgtatgtatgatgaaattggggctagggaagaaaagatagctattttagcaagttcagactatgacttgaccaatcatattttgatttataaaaatagattacaaagagtgatagcaaaattagaagaacaaaatatgcagttcacagagatttacagaagaatgatggaaaaattgtctttacttccg

SEQ ID NO: 3652 - protein, 163 aa, Streptococcus pneumoniae
  glycosyl transferase, putative, FRAMESHIFT
MYMTYVTDPDDSLEVIEGKAIMDREGVEEVRNGNWTVAVLKLFKRELLQDLPFPIGKIAEDTYWTWKVLLRASRIVYLNRCVYWYRVGLSDTLSNTWSEKRMYDEIGAREEKIAILASSDYDLTNHILIYKNRLQRVIAKLEEQNMQFTEIYRRMMEKLSLLP

SEQ ID NO: 3653 - DNA, 1218 bp, Streptococcus pneumoniae
atgttaatgaatacaaaatctatagtttttaatgcagataatgattatgtagataaattagaaactgcaattaaatctatttgttgttataataattgtttaaaattttatgtatttaatgatgatattgcgtcagagtggtttttgatgatgaataagcgattgaagactatacaatctgaaatcgttaatgtaaagattgtagatcatgttcttaaaaagtttcatttaccgttaaagaatttaagttatgccactttctttcgttattttatacctaattttgtcaaagaaagtcgtgctttatacctagattctgacatcattgttacaggaagtttagactatttatttgatatagaactagatggttatgccttggcagcagtagaagattcttttggtgatgttccttctaccaattttaactccggaatgttattagttaatgtagatacttggagagatgaagatgcttgttcgaaactgttagaactgaccaatcaatatcatgaaacagcatatggagatcaaggaattttaaatatgttattccatgatagatggaaaagattagaccgaaattttaattttatggtggggatggatagcgtcgcacacatagaaggaaatcataaatggtatgagatttctgagttgaaaaatggagatttacctagtgttatacattatactggggtaaaaccttgggaaataatttccaataatcgctttagagaagtttggtggttttataatctgttagaatggtctgatattttattgagaaaagacattattagtcgtagtttcgaagaacttgtatacagtcctaaagctcatacagcaatttttacagctagttgtgagatggagcatgtagaatatttgatagaaaatttaccagaggtacatttttctatactagcacatacatattttgcgtctagtgtcgttgctttattaagatatagcaatgttacgatttatccttgtttttctccatttgattatcgaaaaattttggataatttagatttttatttagatattaatcattataaagaagtggataatattgtatccgttgttcaacaactatctaaaccaatttttacctttgaaaatactagtcatgatataggcaatcaaactaatatattttcttcaaccgaaccaaacaaaatggtagaggctattagacaatttataggagaa

SEQ ID NO: 3654 - protein, 406 aa, Streptococcus pneumoniae
  glycosyl transferase, family 8; Cellular location: membrane; Similar to strain R6 sequence 15902441 (3.E-46)
MLMNTKSIVFNADNDYVDKLETAIKSICCYNNCLKFYVFNDDIASEWFLMMNKRLKTIQSEIVNVKIVDHVLKKFHLPLKNLSYATFFRYFIPNFVKESRALYLDSDIIVTGSLDYLFDIELDGYALAAVEDSFGDVPSTNFNSGMLLVNVDTWRDEDACSKLLELTNQYHETAYGDQGILNMLFHDRWKRLDRNFNFMVGMDSVAHIEGNHKWYEISELKNGDLPSVIHYTGVKPWEIISNNRFREVWWFYNLLEWSDILLRKDIISRSFEELVYSPKAHTAIFTASCEMEHVEYLIENLPEVHFSILAHTYFASSVVALLRYSNVTIYPCFSPFDYRKILDNLDFYLDINHYKEVDNIVSVVQQLSKPIFTFENTSHDIGNQTNIFSSTEPNKMVEAIRQFIGE

SEQ ID NO: 3655 - DNA, 2088 bp, Streptococcus pneumoniae
ttgctagtggatgataaaataacagtcattgtaccagtatacaatgtggaaaactatctgaggaagtgcctagatagtattattactcaaacatataaaaatattgagattgttgtcgttaatgatggttctacggatgcttcaggtgaaatttgtaaagaattttcagaaatggatcaccgaattctctatatagaacaagaaaatgctggtctttctgccgcacgaaacaccggtctgaataatatgtccggaaattatgtgacctttgtggactcggatgattggattgagcaagattatgtagaaactctatataaaaaaatagtagagtatcaggctgatattgcagttggtaattattattctttcaacgaaagtgaaggaatgttctactttcatatattgggagactcctattatgagaaagtatatgataatgtttctatctttgagaacttgtatgaaactcaagaaatgaagagttttgctttgatatctgcttggggtaaactctataaggcaagattgtttgagcagttgcgctttgacataggtaaattaggagaagatggttacctcaatcaaaaggtatatttattatcagaaaaggtaatttatttaaataaaagtctttatgcttatcggattagaaaaggtagtttatcaagagtttggacagaaaagtggatgcacgctttagttgatgctatgtctgaacgtattacgctactagctaatatgggttatcctctagagaaacacttggcagtttatcgtcagatgttggaagtcagtctcgccaacggtcaagctagtggtttatctgacacagcaacgtataaagagtttgaaatgaaacaaaggcttttaaatcagctatcgagacaagaggaaagtgaaaagaaagccattgtcctcgcagcaaactatggctatgtagaccaagttttaacgacaatcaagtctatttgttatcataatcgttcgattcgtttttatctgattcatagcgattttccaaatgaatggattaagcaattaaataagcgcttagagaagtttgactcagaaattattaattgtcgggtaacttctgagcaaatttcatgttataaatcggatattagttacacagtctttttacgctatttcatagctgatttcgtgcaagaagacaaggccctctacttggactgtgatctagttgtaacgaaaaatctggatgacttgtttgctacagacttacaagattatcctttggctgctgttagagattttgggggcagagcttattttggtcaagaaatctttaatgccggtgttctcttggtaaacaatgctttttggaaaaaagagaatatgacccaaaaattaattgatgtaaccaatgaatggcatgataaggtggatcaggcagatcagagcatcttgaatatgctttttgaacataaatggttggaattggactttgattataatcatattgtcattcataaacagtttgctgattatcaattgcctgagggtcaggattatcctgctattattcactatctttctcatcggaaaccgtggaaagatttggcggcccaaacctatcgtgaagtttggtggtactatcatgggcttgaatggacagaattgggacaaaaccatcatttacatccattacaaagatctcacatctatccaataaaggaacctttcacttgtctaatctatactgcctcagaccatattgaacaaattgagacattggttcaatccttgcctgatattcagtttaagatagcagctagagtaatagttagtgatcgattggctcagatgacaatttatccaaacgtgactatatttaacggaattcactatttggtagatgtcgataatgaattggtagaaaccagtcaagtacttttagatattaatcatggcgaaaagacagaagaaattctcgatcaatttgctaatcttggcaagcctatcttatcctttgaaaatactaaaacctatgaagtaggtcaggaggcatatgctgttgaccaagttcaagcaatgattgaaaaattgagagaaataagcaaa

SEQ ID NO: 3656 - protein, 696 aa, Streptococcus pneumoniae
  glycosyl transferase, family 2/glycosyl transferase family 8; Cellular location: cytoplasm; Similar to strain R6 sequence 15902441 (6.E-39)
MLVDDKITVIVPVYNVENYLRKCLDSIITQTYKNIEIVVVNDGSTDASGEICKEFSEMDHRILYIEQENAGLSAARNTGLNNMSGNYVTFVDSDDWIEQDYVETLYKKIVEYQADIAVGNYYSFNESEGMFYFHILGDSYYEKVYDNVSIFENLYETQEMKSFALISAWGKLYKARLFEQLRFDIGKLGEDGYLNQKVYLLSEKVIYLNKSLYAYRIRKGSLSRVWTEKWMHALVDAMSERITLLANMGYPLEKHLAVYRQMLEVSLANGQASGLSDTATYKEFEMKQRLLNQLSRQEESEKKAIVLAANYGYVDQVLTTIKSICYHNRSIRFYLIHSDFPNEWIKQLNKRLEKFDSEIINCRVTSEQISCYKSDISYTVFLRYFIADFVQEDKALYLDCDLVVTKNLDDLFATDLQDYPLAAVRDFGGRAYFGQEIFNAGVLLVNNAFWKKENMTQKLIDVTNEWHDKVDQADQSILNMLFEHKWLELDFDYNHIVIHKQFADYQLPEGQDYPAIIHYLSHRKPWKDLAAQTYREVWWYYHGLEWTELGQNHHLHPLQRSHIYPIKEPFTCLIYTASDHIEQIETLVQSLPDIQFKIAARVIVSDRLAQMTIYPNVTIFNGIHYLVDVDNELVETSQVLLDINHGEKTEEILDQFANLGKPILSFENTKTYEVGQEAYAVDQVQAMIEKLREISK

SEQ ID NO: 3657 - DNA, 13152 bp, Streptococcus pneumoniae
ttgtcttactcttcttcatcacgtttacggcgtttcgcaaccaatccaatacctgtaacagctgctagaactccaagtaacacagatccaattgacgactcagtacctgtattaggcaattctttttgggatttacctgtcgatccagaagtatttccaacttgtgagttcgaatggtttgctgaatttgaaactgatgtacttgctgaagctgacgcacttgttgatgctgaagctgaagcactggtgcttgctgaggccgaggcactggtgcttgctgaagccgacgcactcgttgatgctgaagctgacgcacttgttgaggccgaagctgaagcacttgttgatgctgaggctgacgcactggtacttgctgaagctgaggcactggtgcttgctgaggctgaggcgctggtacttgctgaggctgacgcactggtgcttgctgaagctgaggcgctggtacttgctgaagccgatgcactcgttgatgctgaggctgatgcactagtacttgctgaggctgacgcactcgttgatgccgattcagacgctgagatacttgctgaggctgaggcactggttgatgctgaagccgacgcactggtgcttgctgaagccgatgcactagtacttgctgaggctgacgcactcgttgatgccgattcagacgctgagatacttgctgaggctgaggcactcgttgatgctgaagccgacgcactggtgcttgctgagactgatgcactggttgacgctgaagccgatgcactcgttgatgctgatgctgatgcactcgttgatgccgattcagacgctgagatacttgctgaggctgatgcactggttgatgctgatgctgatgcactagtacttgctgaggctgacgcactcgttgatgctgatgctgaggcacttgttgatgccgaagccgaagcactggttgatgctgaagctgacgcacttgtgcttgctgaagctgacgcactggtacttgctgaagccgaggcactggttgacgctgaggctgaagcacttgttgaggctgaagctgatgcactggttgatgctgaggctgaagcacttgtacttgctgaggccgaggcgcttgttgatgcggaagctgacgcactggttgatgcagattcagaagctgatgtgcttgctgaggctgacgcactcgttgatgctgactcagacgcactcgttgacgctgaagccgaagcactggtgcttgctgaagccgaggcacttgttgatgcggattcagaggcactggttgacgctgagactgaagcactcgttgatgctgaagccgacgcactggtacttgctgaagctgaagcacttgttgatgctgaagctgatgcactcgttgatgctgaagccgacgcacttgttgatgctgattcagacgctgaggtacttgctgaagccgacgcacttgtcgacgctgaggctgacgcactggtacttgctgaagctgaggcgcttgtcgacgctgaggctgaggcgctagtacttgctgaagctgatgcactagtacttgctgaagcggacgcactcgttgatgctgaggctgaggcgctagtacttgctgaggctgacgcactggttgatgccgattcagatgcactggttgaggccgacgcacttgtcgacgctgaggctgaagcactggtacttgctgaggctgacgcactggtacttgctgaagctgaggcgcttgtcgatgctgaggctgacgcactggttgatgcagattcagaagctgatgtgcttgctgaggctgacgtactcgttgatgctgactcagacgcactcgttgacgctgaagccgaagcacttgttgacgctgatgctgaggcgctagtacttgctgaagcggacgcactcgttgatgccgattcagacgctgagatacttgctgaagctgaagcacttgttgatgctgaagctgatgcactcgttgatgctgattcagacgctgaggtacttgctgaagccgacgcacttgtcgacgctgaggctgacgcactggtacttgctgaagctgaggcactggtgcttgctgaggctgaggcgctggtacttgctgaggctgacgcactggtgcttgctgaagctgaggcgctggtacttgctgaagccgatgcactcgttgatgctgatgctgatgcactagtacttgctgaggctgacgcactcgttgatgccgattcagacgctgagatacttgctgaggctgaggcactggttgatgctgaagccgacgcactggtgcttgctgaagccgatgcactagtacttgctgaggctgacgcactcgttgatgccgattcagacgctgagatacttgctgaggctgaggcactcgttgatgctgaagccgacgcactggtgcttgctgagactgatgcactggttgacgctgaagccgatgcactcgttgatgctgatgctgatgcactcgttgatgccgattcagacgctgagatacttgctgaggctgatgcactggttgatgctgatgctgatgcactagtacttgctgaggctgacgcactcgttgatgctgatgctgaggcacttgttgatgccgaagccgaagcactggttgatgctgaagctgacgcacttgtgcttgctgaagctgacgcactggtacttgctgaagccgaggcactggttgacgctgaggctgaagcacttgttgaggctgaagctgatgcactggttgatgctgaggctgaagcacttgtacttgctgaggccgaggcgcttgttgatgcggaagctgacgcactggttgatgcagattcagaagctgatgtgcttgctgaggctgacgcactcgttgatgctgactcagacgcactcgttgacgctgaagccgaagcactggtgcttgctgaagccgaggcacttgttgatgcggattcagaggcactggttgacgctgagactgaagcactcgttgatgctgaagccgacgcactggtacttgctgaagctgaagcacttgttgatgctgaagctgatgcactcgttgatgctgaagccgacgcacttgttgatgctgattcagacgctgaggtacttgctgaagccgacgcacttgtcgacgctgaggctgacgcactggtacttgctgaagctgaggcgcttgtcgacgctgaggctgaggcgctagtacttgctgaagctgatgcactagtacttgctgaagcggacgcactcgttgatgctgaggctgaggcgctagtacttgctgaggctgacgcactggttgatgccgattcagatgcactggttgaggccgacgcacttgtcgacgctgaggctgaagcactggtacttgctgaggctgacgcactggtacttgctgaagctgaggcgcttgtcgatgctgaggctgacgcactggttgatgcagattcagaagctgatgtgcttgctgaggctgacgtactcgttgatgctgactcagacgcactcgttgacgctgaagccgaagcacttgttgacgctgatgctgaggcgctagtacttgctgaagcggacgcactcgttgatgccgattcagacgctgagatacttgctgaggctgaagcacttgtgcttgctgaagccgaggcacttgttgatgctgattcagatgctgaggtacttgctgaagctgaggcactggttgatgcggattcagacgcgctggtgcttgctgaggccgacgcactggtgcttgctgagactgatgcactcgttgatgctgaagccgaggcacttgttgatgccgattcagacgctgagatacttgctgaggccgaggcgctggttgacgcggaagctgaagcacttgttgacgctgaggctgaggcgctagtacttgctgaagccgaggcacttgttgatgcggaagctgacgcactggtacttgctgactctgatgcactggttgatgctgaagccgatgcactcgttgatgctgaagctgatgcactagtacttgctgaggctgacgcactggttgatgccgattcagatgcactggttgaggccgacgcacttgtcgacgctgaggctgacgcactggtacttgctgaggctgacgcactggtacttgctgaagccgacgcacttgtcgacgctgaggctgacgcactggtacttgctgaagctgaggcgcttgtcgatgctgaggctgacgcactggttgatgcagattcagaagctgatgtgcttgctgaggctgacgcactcgttgatgctgactcagacgcactcgttgacgctgaagccgatgcacttgttgacgctgaggctgaggcgctagtacttgctgaagcggacgcactcgttgatgctgaagccgatgcacttgttgacgctgaggctgaggcgctagtacttgctgaagcggacgcactcgttgatgccgattcagacgcactcgttgacgctgaagccgatgcacttgttgacgctgaggctgaggcgctagtacttgctgaagcggacgcactcgttgatgccgattcagacgctgagatacttgctgaggctgacgcactggttgaggctgaggctgaggcgctagtacttgctgaagccgacgcactggtgcttgctgaagccgaggcacttgttgatgcggaagctgacgcactggtacttgctgactctgatgcactggttgacgccgaagccgatgcactcgttgatgctgaagctgatgcactagtacttgctgaggctgacgcacttgtcgacgctgaggctgacgcactggtacttgctgaagctgaggcgcttgtcgacgctgattcagatgctgatgtgcttgctgaagccgaggcacttgtcgatgctgaggctgaagcacttgttgatgctgagactgaagcactggtacttgctgaagctgacgcactggttgacgctgaagccgaggcactggttgatgctgaagccgatgcactagtacttgctgaggctgacgcactggttgatgccgattcagatgcactggttgaggccgacgcacttgtcgacgctgaggctgaagcactggtacttgctgaagctgaggcgcttgtcgatgctgaggctgacgcactggttgaggccgattcagaagctgaggtgcttgctgaggctgacgtactcgttgatgctgactcagacgcactcgttgatgccgattcagacgctgagatacttgctgaggctgacgcacttgttgatgctgaggctgaagcactggttgacgctgaagctgacgtactcgttgatgctgaacccgaggcgcttgtgcttgctgaagccgaagcactcgttgatgctgaggctgaggcgctggttgaggccgattcagaagctgaggtgcttgctgaggccgaggcgctggttgaggccgattcagaagctgaggtgcttgctgaggccgaggcgctggttgatgctgaagctgaagcactggtacttgctgaagccgaagcactggttgacgctgattcagatgctgatgtgcttgctgaagccgaggcacttgttgatgcggaagctgacgcactggtacttgctgactctgatgcactggttgacgccgaagccgatgcactcgttgatgctgaagctgatgcactagtacttgctgaggctgacgcactggttgatgccgattcagatgcactggttgaggccgacgcacttgtcgacgctgattcagatgctgatgtgcttgctgaagccgaggcacttgtcgatgctgaggctgaagcacttgttgatgctgagactgaagcactggtacttgctgaagctgacgcactggttgacgctgaagccgaggcactggttgatgctgaagccgatgcactcgttgatgctgaagctgatgcactagtacttgctgaggctgacgcactggttgatgccgattcagatgcactggttgaggccgacgcacttgtcgacgctgaggctgaagcactggtacttgctgaagctgaggcgcttgtcgatgctgaggctgacgcactggttgatgccgattcagaagctgatgtgcttgctgaggctgacgtactcgttgatgctgactcagacgcactcgttgatgccgattcagacgctgagatacttgctgaggctgacgcacttgtgcttgctgaagccgacgcactggttgaggcggaagctgacgctgaggtacttgcgcttgctgaggccgacgcactcgttgatgccgattcagacgctgagatacttgctgaggctgacgcacttgtgcttgctgaagcggacgcactggttgaggcggaagctgacgctgaggtacttgcgcttgctgaggccgacgcactcgttgatgctgaagccgaagcacttgtcgacgctgaagccgacgcactggttgacgctgaagcggacgcactggttgatgcagattcagaagctgatgtgcttgctgaggctgacgcactcgttgatgctgaagccgaagcactcgttgatgccgattcagacgcacttgtcgatgctgaagccgatgcactagtacttgctgaagccgacgcactggtgcttgctgaagccgaggcacttgttgatgctgattcagaggcactggttgacgctgagactgaagcactcgttgatgctgaagccgacgcactggtacttgctgaagctgaagcacttgttgatgctgaagctgatgcactcgttgatgctgattcagacgctgaggtacttgctgaagccgacgcacttgtcgacgctgaggctgacgcactggtacttgctgaagctgaggcactggtgcttgctgaggctgaggcgctggtacttgctgaggctgacgcactggtgcttgctgaagctgaggcgctggtacttgctgaagccgatgcactcgttgatgctgatgctgatgcactagtacttgctgaagcggacgcactcgttgatgctgaggctgaggcgctagtacttgctgaggctgacgcactggttgatgccgattcagatgcactggttgaggccgacgcacttgtcgacgctgaggctgaagcactggtacttgctgaggctgacgcactggtacttgctgaagctgaggcgcttgtcgatgctgaggctgacgcactggttgatgcagattcagaagctgatgtgcttgctgaggctgacgtactcgttgatgctgactcagacgcactcgttgacgctgaagccgaagcacttgttgacgctgatgctgaggcgctagtacttgctgaagcggacgcactcgttgatgccgattcagacgctgagatacttgctgaggctgaagcacttgtgcttgctgaagccgatgcacttgttgatgctgattcagatgctgaggtacttgctgaagctgaggcactggttgatgcggattcagacgcgctggtgcttgctgaggccgacgcactggtgcttgctgagactgatgcactcgttgatgctgaagccgaggcacttgttgatgccgattcagacgctgagatacttgctgaggccgaggcgctggttgacgcggaagctgaagcacttgttgacgctgaggctgaggcgctagtacttgctgaagccgaggcacttgttgatgcggaagctgacgcactggtacttgctgactctgatgcactggttgatgctgaagccgatgcactcgttgatgctgaagctgatgcactagtacttgctgaggctgacgcactggttgatgccgattcagatgcactggttgaggccgacgcacttgtcgacgctgaggctgacgcactggtacttgctgaggctgacgcactggtacttgctgaagccgacgcacttgtcgacgctgaggctgacgcactggtacttgctgaagctgaggcgcttgtcgatgctgaggctgacgcactggttgatgcagattcagaagctgatgtgcttgctgaggctgacgcactcgttgatgctgactcagacgcactcgttgacgctgaagccgatgcacttgttgacgctgaggctgaggcgctagtacttgctgaagcggacgcactcgttgatgctgaagccgatgcacttgttgacgctgaggctgaggcgctagtacttgctgaagcggacgcactcgttgatgccgattcagacgcactcgttgacgctgaagccgatgcacttgttgacgctgaggctgaggcgctagtacttgctgaagcggacgcactcgttgatgccgattcagacgctgagatacttgctgaggctgacgcactggttgaggctgaggctgaggcgctagtacttgctgaagccgacgcactggtgcttgctgaagccgaggcacttgttgatgcggaagctgacgcactggtacttgctgactctgatgcactggttgacgccgaagccgatgcactcgttgatgctgaagctgatgcactagtacttgctgaggctgacgcacttgtcgacgctgaggctgacgcactggtacttgctgaagctgaggcgcttgtcgacgctgattcagatgctgatgtgcttgctgaagccgaggcacttgtcgatgctgaggctgaagcacttgttgatgctgagactgaagcactggtacttgctgaagctgacgcactggttgacgctgaagccgaggcactggttgatgctgaagccgatgcactcgttgatgctgaagctgatgcactagtacttgctgaggctgacgcactggttgatgccgattcagatgcactggttgaggccgacgcacttgtcgacgctgaggctgaagcactggtacttgctgaagctgaggcgcttgtcgatgctgaggctgacgcactggttgatgcagattcagaagctgatgtgcttgctgaggctgacgtactcgttgatgctgactcagacgcactcgttgatgccgattcagacgctgagatacttgctgaggctgacgcacttgtgcttgctgaagccgacgcactggttgaggcggaagctgacgctgaggtacttgcgcttgctgaggccgacgcactcgttgatgctgaagccgaagcacttgtcgacgctgaagccgacgcactggttgacgctgaagcggacgcactggttgatgcagattcagaagctgatgtgcttgctgaggctgacgcactcgttgatgctgaagccgaagcactcgttgatgccgattcagacgcacttgtcgatgctgaagccgatgcactagtacttgctgaagccgacgcactggtgcttgctgaagccgaggcacttgttgatgctgattcagaggcactggttgacgctgagactgaagcactcgttgatgctgaagccgacgcactggtacttgctgaagctgaagcacttgttgatgctgaagctgatgcactcgttgatgctgattcagacgctgaggtacttgctgaagccgacgcacttgtcgacgctgaggctgacgcactggtacttgctgaagctgaggcactggtgcttgctgaggctgaggcgctggtacttgctgaggctgacgcactggtgcttgctgaagctgaggcgctggtacttgctgaagccgatgcactcgttgatgctgatgctgatgcactagtacttgctgaggctgacgcactcgttgatgccgattcagacgctgagatacttgctgaggctgaggcactggttgatgctgaagccgacgcactggtgcttgctgaagccgatgcactagtacttgctgaggctgacgcactcgttgatgccgattcagacgctgagatacttgctgaggctgaggcactcgttgatgctgaagccgacgcactggtgcttgctgagactgatgcactggttgacgctgaagccgatgcactcgttgatgctgatgctgatgcactcgttgatgccgattcagacgctgagatacttgctgaggctgatgcactggttgatgctgatgctgatgcactagtacttgctgaggctgacgcactcgttgatgctgatgctgaggcacttgttgatgccgaagccgaagcactggttgatgctgaagctgacgcacttgtgcttgctgaagctgacgcactggtacttgctgaagccgaggcactggttgacgctgaggctgaagcacttgttgaggctgaagctgatgcactggttgatgctgaggctgaagcacttgtacttgctgaggccgaggcgcttgttgatgcggaagctgacgcactggttgatgcagattcagaagctgatgtgcttgctgaggctgacgcactcgttgatgctgactcagacgcactcgttgacgctgaagccgaagcactggtgcttgctgaagccgaggcacttgttgatgcggattcagaggcactggttgacgctgagactgaagcactcgttgatgctgaagccgacgcactggtacttgctgaagctgaagcacttgttgatgctgaagctgatgcactcgttgatgctgaagccgacgcacttgttgatgctgattcagacgctgaggtacttgctgaagccgacgcacttgtcgacgctgaggctgacgcactggtacttgctgaagctgaggcgcttgtcgacgctgaggctgaggcgctagtacttgctgaagctgatgcactagtacttgctgaagcggacgcactcgttgatgctgaggctgaggcgctagtacttgctgaggctgacgcactggttgatgccgattcagatgcactggttgaggccgacgcacttgtcgacgctgaggctgaagcactggtacttgctgaggctgacgcactggtacttgctgaagctgaggcgcttgtcgatgctgaggctgacgcactggttgatgcagattcagaagctgatgtgcttgctgaggctgacgtactcgttgatgctgactcagacgcactcgttgacgctgaagccgaagcacttgttgacgctgatgctgaggcgctagtacttgctgaagcggacgcactcgttgatgccgattcagacgctgagatacttgctgaggctgaagcacttgtgcttgctgaagccgaggcacttgttgatgctgattcagatgctgaggtacttgctgaagctgaggcactggttgatgcggattcagacgcgctggtgcttgctgaggccgacgcactggtgcttgctgagactgatgcactcgttgatgctgaagccgaggcacttgttgatgccgattcagacgctgagatacttgctgaggccgaggcgctggttgacgcggaagctgaagcacttgttgacgctgaggctgaggcgctagtacttgctgaagccgaggcacttgttgatgcggaagctgacgcactggtacttgctgactctgatgcactggttgatgctgaagccgatgcactcgttgatgctgaagctgatgcactagtacttgctgaggctgacgcactggttgatgccgattcagatgcactggttgaggccgacgcacttgtcgacgctgaggctgacgcactggtacttgctgaggctgacgcactggtacttgctgaagccgacgcacttgtcgacgctgaggctgacgcactggtacttgctgaagctgaggcgcttgtcgatgctgaggctgacgcactggttgatgcagattcagaagctgatgtgcttgctgaggctgacgcactcgttgatgctgactcagacgcactcgttgacgctgaagccgatgcacttgttgacgctgaggctgaggcgctagtacttgctgaagcggacgcactcgttgatgctgaagccgatgcacttgttgacgctgaggctgaggcgctagtacttgctgaagcggacgcactcgttgatgccgattcagacgcactcgttgacgctgaagccgatgcacttgttgacgctgaggctgaggcgctagtacttgctgaagcggacgcactcgttgatgccgattcagacgctgagatacttgctgaggctgacgcactggttgaggctgaggctgaggcgctagtacttgctgaagccgacgcactggtgcttgctgaagccgaggcacttgttgatgcggaagctgacgcactggtacttgctgactctgatgcactggttgacgccgaagccgatgcactcgttgatgctgaagctgatgcactagtacttgctgaggctgacgcacttgtcgacgctgaggctgacgcactggtacttgctgaagctgaggcgcttgtcgacgctgattcagatgctgatgtgcttgctgaagccgaggcacttgtcgatgctgaggctgaagcacttgttgatgctgagactgaagcactggtacttgctgaagctgacgcactggttgacgctgaagccgaggcactggttgatgctgaagccgatgcactagtacttgctgaggctgacgcactggttgatgccgattcagatgcactggttgaggccgacgcacttgtcgacgctgaggctgaagcactggtacttgctgaagctgaggcgcttgtcgatgctgaggctgacgcactggttgaggccgattcagaagctgaggtgcttgctgaggctgacgtactcgttgatgctgactcagacgcactcgttgatgccgattcagacgctgagatacttgctgaggctgacgcacttgttgatgctgaggctgaagcactggttgacgctgaagctgacgtactcgttgatgctgaacccgaggcgcttgtgcttgctgaagccgaagcactcgttgatgctgaggctgaggcgctggttgaggccgattcagaagctgaggtgcttgctgaggccgaggcgctggttgaggccgattcagaagctgaggtgcttgctgaggccgaggcgctggttgatgctgaagctgaagcactggtacttgctgaagccgaagcactggttgacgctgattcagatgctgatgtgcttgctgaagccgaggcacttgtcgatgctgaggctgaagcacttgttgatgctgagactgaagcactggtacttgctgaagctgacgcactggttgacgctgaagccgaggcactggttgatgctgaagccgacgcacttgttgatgctgaagctgaggcgctt

SEQ ID NO: 3658 - protein, 4384 aa, Streptococcus pneumoniae
  hypothetical protein
MSYSSSSRLRRFATNPIPVTAARTPSNTDPIDDSVPVLGNSFWDLPVDPEVFPTCEFEWFAEFETDVLAEADALVDAEAEALVLAEAEALVLAEADALVDAEADALVEAEAEALVDAEADALVLAEAEALVLAEAEALVLAEADALVLAEAEALVLAEADALVDAEADALVLAEADALVDADSDAEILAEAEALVDAEADALVLAEADALVLAEADALVDADSDAEILAEAEALVDAEADALVLAETDALVDAEADALVDADADALVDADSDAEILAEADALVDADADALVLAEADALVDADAEALVDAEAEALVDAEADALVLAEADALVLAEAEALVDAEAEALVEAEADALVDAEAEALVLAEAEALVDAEADALVDADSEADVLAEADALVDADSDALVDAEAEALVLAEAEALVDADSEALVDAETEALVDAEADALVLAEAEALVDAEADALVDAEADALVDADSDAEVLAEADALVDAEADALVLAEAEALVDAEAEALVLAEADALVLAEADALVDAEAEALVLAEADALVDADSDALVEADALVDAEAEALVLAEADALVLAEAEALVDAEADALVDADSEADVLAEADVLVDADSDALVDAEAEALVDADAEALVLAEADALVDADSDAEILAEAEALVDAEADALVDADSDAEVLAEADALVDAEADALVLAEAEALVLAEAEALVLAEADALVLAEAEALVLAEADALVDADADALVLAEADALVDADSDAEILAEAEALVDAEADALVLAEADALVLAEADALVDADSDAEILAEAEALVDAEADALVLAETDALVDAEADALVDADADALVDADSDAEILAEADALVDADADALVLAEADALVDADAEALVDAEAEALVDAEADALVLAEADALVLAEAEALVDAEAEALVEAEADALVDAEAEALVLAEAEALVDAEADALVDADSEADVLAEADALVDADSDALVDAEAEALVLAEAEALVDADSEALVDAETEALVDAEADALVLAEAEALVDAEADALVDAEADALVDADSDAEVLAEADALVDAEADALVLAEAEALVDAEAEALVLAEADALVLAEADALVDAEAEALVLAEADALVDADSDALVEADALVDAEAEALVLAEADALVLAEAEALVDAEADALVDADSEADVLAEADVLVDADSDALVDAEAEALVDADAEALVLAEADALVDADSDAEILAEAEALVLAEAEALVDADSDAEVLAEAEALVDADSDALVLAEADALVLAETDALVDAEAEALVDADSDAEILAEAEALVDAEAEALVDAEAEALVLAEAEALVDAEADALVLADSDALVDAEADALVDAEADALVLAEADALVDADSDALVEADALVDAEADALVLAEADALVLAEADALVDAEADALVLAEAEALVDAEADALVDADSEADVLAEADALVDADSDALVDAEADALVDAEAEALVLAEADALVDAEADALVDAEAEALVLAEADALVDADSDALVDAEADALVDAEAEALVLAEADALVDADSDAEILAEADALVEAEAEALVLAEADALVLAEAEALVDAEADALVLADSDALVDAEADALVDAEADALVLAEADALVDAEADALVLAEAEALVDADSDADVLAEAEALVDAEAEALVDAETEALVLAEADALVDAEAEALVDAEADALVLAEADALVDADSDALVEADALVDAEAEALVLAEAEALVDAEADALVEADSEAEVLAEADVLVDADSDALVDADSDAEILAEADALVDAEAEALVDAEADVLVDAEPEALVLAEAEALVDAEAEALVEADSEAEVLAEAEALVEADSEAEVLAEAEALVDAEAEALVLAEAEALVDADSDADVLAEAEALVDAEADALVLADSDALVDAEADALVDAEADALVLAEADALVDADSDALVEADALVDADSDADVLAEAEALVDAEAEALVDAETEALVLAEADALVDAEAEALVDAEADALVDAEADALVLAEADALVDADSDALVEADALVDAEAEALVLAEAEALVDAEADALVDADSEADVLAEADVLVDADSDALVDADSDAEILAEADALVLAEADALVEAEADAEVLALAEADALVDADSDAEILAEADALVLAEADALVEAEADAEVLALAEADALVDAEAEALVDAEADALVDAEADALVDADSEADVLAEADALVDAEAEALVDADSDALVDAEADALVLAEADALVLAEAEALVDADSEALVDAETEALVDAEADALVLAEAEALVDAEADALVDADSDAEVLAEADALVDAEADALVLAEAEALVLAEAEALVLAEADALVLAEAEALVLAEADALVDADADALVLAEADALVDAEAEALVLAEADALVDADSDALVEADALVDAEAEALVLAEADALVLAEAEALVDAEADALVDADSEADVLAEADVLVDADSDALVDAEAEALVDADAEALVLAEADALVDADSDAEILAEAEALVLAEADALVDADSDAEVLAEAEALVDADSDALVLAEADALVLAETDALVDAEAEALVDADSDAEILAEAEALVDAEAEALVDAEAEALVLAEAEALVDAEADALVLADSDALVDAEADALVDAEADALVLAEADALVDADSDALVEADALVDAEADALVLAEADALVLAEADALVDAEADALVLAEAEALVDAEADALVDADSEADVLAEADALVDADSDALVDAEADALVDAEAEALVLAEADALVDAEADALVDAEAEALVLAEADALVDADSDALVDAEADALVDAEAEALVLAEADALVDADSDAEILAEADALVEAEAEALVLAEADALVLAEAEALVDAEADALVLADSDALVDAEADALVDAEADALVLAEADALVDAEADALVLAEAEALVDADSDADVLAEAEALVDAEAEALVDAETEALVLAEADALVDAEAEALVDAEADALVDAEADALVLAEADALVDADSDALVEADALVDAEAEALVLAEAEALVDAEADALVDADSEADVLAEADVLVDADSDALVDADSDAEILAEADALVLAEADALVEAEADAEVLALAEADALVDAEAEALVDAEADALVDAEADALVDADSEADVLAEADALVDAEAEALVDADSDALVDAEADALVLAEADALVLAEAEALVDADSEALVDAETEALVDAEADALVLAEAEALVDAEADALVDADSDAEVLAEADALVDAEADALVLAEAEALVLAEAEALVLAEADALVLAEAEALVLAEADALVDADADALVLAEADALVDADSDAEILAEAEALVDAEADALVLAEADALVLAEADALVDADSDAEILAEAEALVDAEADALVLAETDALVDAEADALVDADADALVDADSDAEILAEADALVDADADALVLAEADALVDADAEALVDAEAEALVDAEADALVLAEADALVLAEAEALVDAEAEALVEAEADALVDAEAEALVLAEAEALVDAEADALVDADSEADVLAEADALVDADSDALVDAEAEALVLAEAEALVDADSEALVDAETEALVDAEADALVLAEAEALVDAEADALVDAEADALVDADSDAEVLAEADALVDAEADALVLAEAEALVDAEAEALVLAEADALVLAEADALVDAEAEALVLAEADALVDADSDALVEADALVDAEAEALVLAEADALVLAEAEALVDAEADALVDADSEADVLAEADVLVDADSDALVDAEAEALVDADAEALVLAEADALVDADSDAEILAEAEALVLAEAEALVDADSDAEVLAEAEALVDADSDALVLAEADALVLAETDALVDAEAEALVDADSDAEILAEAEALVDAEAEALVDAEAEALVLAEAEALVDAEADALVLADSDALVDAEADALVDAEADALVLAEADALVDADSDALVEADALVDAEADALVLAEADALVLAEADALVDAEADALVLAEAEALVDAEADALVDADSEADVLAEADALVDADSDALVDAEADALVDAEAEALVLAEADALVDAEADALVDAEAEALVLAEADALVDADSDALVDAEADALVDAEAEALVLAEADALVDADSDAEILAEADALVEAEAEALVLAEADALVLAEAEALVDAEADALVLADSDALVDAEADALVDAEADALVLAEADALVDAEADALVLAEAEALVDADSDADVLAEAEALVDAEAEALVDAETEALVLAEADALVDAEAEALVDAEADALVLAEADALVDADSDALVEADALVDAEAEALVLAEAEALVDAEADALVEADSEAEVLAEADVLVDADSDALVDADSDAEILAEADALVDAEAEALVDAEADVLVDAEPEALVLAEAEALVDAEAEALVEADSEAEVLAEAEALVEADSEAEVLAEAEALVDAEAEALVLAEAEALVDADSDADVLAEAEALVDAEAEALVDAETEALVLAEADALVDAEAEALVDAEADALVDAEAEAL

SEQ ID NO: 3659 - DNA, 13095 bp, Streptococcus pneumoniae
gtgctagtcaaagcgcctcagcttcagcatcaacaagtgcgtcggcttcagcatcaaccagtgcctcggcttcagcgtcaaccagtgcgtcagcttcagcaagtaccagtgcttcagtctcagcatcaacaagtgcttcagcctcagcatcgacaagtgcctcggcttcagcaagcacatcagcatctgaatcagcgtcaaccagtgcttcggcttcagcaagtaccagtgcttcagcttcagcatcaaccagcgcctcggcctcagcaagcacctcagcttctgaatcggcctcaaccagcgcctcggcctcagcaagcacctcagcttctgaatcggcctcaaccagcgcctcagcctcagcatcaacgagtgcttcggcttcagcaagcacaagcgcctcgggttcagcatcaacgagtacgtcagcttcagcgtcaaccagtgcttcagcctcagcatcaacaagtgcgtcagcctcagcaagtatctcagcgtctgaatcggcatcaacgagtgcgtctgagtcagcatcaacgagtacgtcagcctcagcaagcacctcagcttctgaatcggcctcaaccagtgcgtcagcctcagcatcgacaagcgcctcagcttcagcaagtaccagtgcttcagcctcagcgtcgacaagtgcgtcggcctcaaccagtgcatctgaatcggcatcaaccagtgcgtcagcctcagcaagtactagtgcatcggcttcagcatcaaccagtgcctcggcttcagcgtcaaccagtgcgtcagcttcagcaagtaccagtgcttcagtctcagcatcaacaagtgcttcagcctcagcatcgacaagtgcctcggcttcagcaagcacatcagcatctgaatcagcgtcgacaagcgcctcagcttcagcaagtaccagtgcgtcagcctcagcgtcgacaagtgcgtcagcctcagcaagtactagtgcatcagcttcagcatcaacgagtgcatcggcttcggcgtcaaccagtgcatcagagtcagcaagtaccagtgcgtcagcttccgcatcaacaagtgcctcggcttcagcaagcaccagtgcgtcggcttcagcaagtactagcgcctcagcctcagcctcaaccagtgcgtcagcctcagcaagtatctcagcgtctgaatcggcatcaacgagtgcgtccgcttcagcaagtactagcgcctcagcctcagcgtcaacaagtgcatcggcttcagcgtcaacgagtgcgtctgaatcggcatcaacgagtgcgtccgcttcagcaagtactagcgcctcagcctcagcgtcaacaagtgcatcggcttcagcatcaacgagtgcgtccgcttcagcaagtactagcgcctcagcctcagcgtcaacaagtgcatcggcttcagcgtcaacgagtgcgtctgagtcagcatcaacgagtgcgtcagcctcagcaagcacatcagcttctgaatctgcatcaaccagtgcgtcagcctcagcatcgacaagcgcctcagcttcagcaagtaccagtgcgtcagcctcagcgtcgacaagtgcgtcggcttcagcaagtaccagtgcgtcagcctcagcaagtaccagtgcgtcagcctcagcgtcgacaagtgcgtcggcctcaaccagtgcatctgaatcggcatcaaccagtgcgtcagcctcagcaagtactagtgcatcagcttcagcatcaacgagtgcatcggcttcagcatcaaccagtgcatcagagtcagcaagtaccagtgcgtcagcttccgcatcaacaagtgcctcggcttcagcaagtactagcgcctcagcctcagcgtcaacaagtgcttcagcttccgcgtcaaccagcgcctcggcctcagcaagtatctcagcgtctgaatcggcatcaacaagtgcctcggcttcagcatcaacgagtgcatcagtctcagcaagcaccagtgcgtcggcctcagcaagcaccagcgcgtctgaatccgcatcaaccagtgcctcagcttcagcaagtacctcagcatctgaatcagcatcaacaagtgcctcggcttcagcaagcacaagtgcttcagcctcagcaagtatctcagcgtctgaatcggcatcaacgagtgcgtccgcttcagcaagtactagcgcctcagcatcagcgtcaacaagtgcttcggcttcagcgtcaacgagtgcgtctgagtcagcatcaacgagtacgtcagcctcagcaagcacatcagcttctgaatctgcatcaaccagtgcgtcagcctcagcatcgacaagcgcctcagcttcagcaagtaccagtgcgtcagcctcagcaagtaccagtgcttcagcctcagcgtcgacaagtgcgtcggcctcaaccagtgcatctgaatcggcatcaaccagtgcgtcagcctcagcaagtactagcgcctcagcctcagcatcaacgagtgcgtccgcttcagcaagtactagtgcatcagcttcagcaagtactagcgcctcagcctcagcgtcgacaagcgcctcagcttcagcaagtaccagtgcgtcagcctcagcgtcgacaagtgcgtcggcttcagcaagtacctcagcgtctgaatcagcatcaacaagtgcgtcggcttcagcatcaacgagtgcatcagcttcagcatcaacaagtgcttcagcttcagcaagtaccagtgcgtcggcttcagcatcaacgagtgcttcagtctcagcgtcaaccagtgcctctgaatccgcatcaacaagtgcctcggcttcagcaagcaccagtgcttcggcttcagcgtcaacgagtgcgtctgagtcagcatcaacgagtgcgtcagcctcagcaagcacatcagcttctgaatctgcatcaaccagtgcgtcagcttccgcatcaacaagcgcctcggcctcagcaagtacaagtgcttcagcctcagcatcaaccagtgcatcagcttcagcctcaacaagtgcttcagcctcagcgtcaaccagtgcctcggcttcagcaagtaccagtgcgtcagcttcagcaagcacaagtgcgtcagcttcagcatcaaccagtgcttcggcttcggcatcaacaagtgcctcagcatcagcatcaacgagtgcgtcagcctcagcaagtactagtgcatcagcatcagcatcaaccagtgcatcagcctcagcaagtatctcagcgtctgaatcggcatcaacgagtgcatcagcatcagcatcaacgagtgcatcggcttcagcgtcaaccagtgcatcagtctcagcaagcaccagtgcgtcggcttcagcatcaacgagtgcctcagcctcagcaagtatctcagcgtctgaatcggcatcaacgagtgcgtcagcctcagcaagtactagtgcatcggcttcagcaagcaccagtgcgtcggcttcagcatcaaccagtgcctcagcctcagcaagtatctcagcgtctgaatcggcatcaacgagtgcgtcagcctcagcaagtactagtgcatcagcatcagcatcaacgagtgcatcggcttcagcaagtaccagcgcctcagcttcagcaagcaccagtgcgtcagcctcagcaagtaccagcgcctcagcctcagcaagcaccagtgcctcagcttcagcaagtaccagtgcgtcagcctcagcgtcgacaagtgcgtcggcttcagcaagtacctcagcgtctgaatcagcatcaacgagtgcatcagcttcagcatcaacaagtgcttcagcttcagcaagtaccagtgcgtcggcttcagcatcaacgagtgcttcagtctcagcgtcaaccagtgcctctgaatcagcatcaacaagtgcctcggcttcagcaagcaccagtgcgtcggcttcagcaagtactagtgcatcggcttcagcatcgacaagtgcgtctgaatcggcatcaacgagtgcttcggcttcagcatcaacgagtgcgtcagcctcagcaagcacatcagcttctgaatctgcatcaaccagtgcgtccgcttcagcgtcaaccagtgcgtcggcttcagcgtcgacaagtgcttcggcttcagcatcaacgagtgcgtcggcctcagcaagcgcaagtacctcagcgtcagcttccgcctcaaccagtgcgtcggcttcagcaagcacaagtgcgtcagcctcagcaagtatctcagcgtctgaatcggcatcaacgagtgcgtctgagtcagcatcaacgagtacgtcagcctcagcaagcacatcagcttctgaatctgcatcaaccagtgcgtcagcctcagcatcgacaagcgcctcagcttcagcaagtaccagtgcttcagcctcagcgtcgacaagtgcgtcggcctcaaccagtgcatctgaatcggcatcaaccagtgcgtcagcctcagcaagtactagtgcatcagcttcagcatcaacgagtgcatcggcttcagcatcaaccagtgcctcggcttcagcgtcaaccagtgcgtcagcttcagcaagtaccagtgcttcagtctcagcatcaacaagtgcttcagcctcagcatcgacaagtgcctcggcttcagcaagcacatcagcatctgaatcagcgtcgacaagcgcctcagcttcagcaagtaccagtgcgtcagcctcagcgtcgacaagtgcgtcagcctcagcaagtactagtgcatcagcttcagcatcaacgagtgcatcggcttcggcgtcaaccagtgcatcagagtcagcaagtaccagtgcgtcagcttccgcatcaacaagtgcctcggcttcagcaagcaccagtgcgtcggcttcagcaagtactagcgcctcagcctcagcctcaaccagtgcgtcagcctcagcaagtatctcagcgtctgaatcggcatcaacgagtgcgtccgcttcagcaagtactagcgcctcagcctcagcgtcaacaagtgcatcggcttcagcgtcaacgagtgcgtctgaatcggcatcaacgagtgcgtccgcttcagcaagtactagcgcctcagcctcagcgtcaacaagtgcatcggcttcagcatcaacgagtgcgtccgcttcagcaagtactagcgcctcagcctcagcgtcaacaagtgcatcggcttcagcgtcaacgagtgcgtctgagtcagcatcaacgagtgcgtcagcctcagcaagcacatcagcttctgaatctgcatcaaccagtgcgtcagcctcagcatcgacaagcgcctcagcttcagcaagtaccagtgcgtcagcctcagcgtcgacaagtgcgtcggcttcagcaagtaccagtgcgtcagcctcagcaagtaccagtgcgtcagcctcagcgtcgacaagtgcgtcggcctcaaccagtgcatctgaatcggcatcaaccagtgcgtcagcctcagcaagtactagtgcatcagcttcagcatcaacgagtgcatcggcttcagcatcaaccagtgcatcagagtcagcaagtaccagtgcgtcagcttccgcatcaacaagtgcctcggcttcagcaagtactagcgcctcagcctcagcgtcaacaagtgcttcagcttccgcgtcaaccagcgcctcggcctcagcaagtatctcagcgtctgaatcggcatcaacaagtgcctcggcttcagcatcaacgagtgcatcagtctcagcaagcaccagtgcgtcggcctcagcaagcaccagcgcgtctgaatccgcatcaaccagtgcctcagcttcagcaagtacctcagcatctgaatcagcatcaacaagtgcatcggcttcagcaagcacaagtgcttcagcctcagcaagtatctcagcgtctgaatcggcatcaacgagtgcgtccgcttcagcaagtactagcgcctcagcatcagcgtcaacaagtgcttcggcttcagcgtcaacgagtgcgtctgagtcagcatcaacgagtacgtcagcctcagcaagcacatcagcttctgaatctgcatcaaccagtgcgtcagcctcagcatcgacaagcgcctcagcttcagcaagtaccagtgcgtcagcctcagcaagtaccagtgcttcagcctcagcgtcgacaagtgcgtcggcctcaaccagtgcatctgaatcggcatcaaccagtgcgtcagcctcagcaagtactagcgcctcagcctcagcatcaacgagtgcgtccgcttcagcaagtactagtgcatcagcatcagcatcaacgagtgcatcggcttcagcaagtaccagcgcctcagcttcagcaagcaccagtgcgtcagcctcagcaagtaccagcgcctcagcctcagcaagcaccagtgcctcagcttcagcaagtaccagtgcgtcagcctcagcgtcgacaagtgcgtcggcttcagcaagtacctcagcgtctgaatcagcatcaacgagtgcatcagcttcagcatcaacaagtgcttcagcttcagcaagtaccagtgcgtcggcttcagcatcaacgagtgcttcagtctcagcgtcaaccagtgcctctgaatcagcatcaacaagtgcctcggcttcagcaagcaccagtgcgtcggcttcagcaagtactagtgcatcggcttcagcatcgacaagtgcgtctgaatcggcatcaacgagtgcttcggcttcagcatcaacgagtgcgtcagcctcagcaagcacatcagcttctgaatctgcatcaaccagtgcgtccgcttcagcgtcaaccagtgcgtcggcttcagcgtcgacaagtgcttcggcttcagcatcaacgagtgcgtcggcctcagcaagcgcaagtacctcagcgtcagcttccgcctcaaccagtgcgtccgcttcagcaagcacaagtgcgtcagcctcagcaagtatctcagcgtctgaatcggcatcaacgagtgcgtcggcctcagcaagcgcaagtacctcagcgtcagcttccgcctcaaccagtgcgtcggcttcagcaagcacaagtgcgtcagcctcagcaagtatctcagcgtctgaatcggcatcaacgagtgcgtctgagtcagcatcaacgagtacgtcagcctcagcaagcacatcagcttctgaatcggcatcaaccagtgcgtcagcctcagcatcgacaagcgcctcagcttcagcaagtaccagtgcttcagcctcagcgtcgacaagtgcgtcggcctcaaccagtgcatctgaatcggcatcaaccagtgcgtcagcctcagcaagtactagtgcatcagcttcagcatcaacgagtgcatcggcttcagcatcaaccagtgcctcggcttcagcgtcaaccagtgcgtcagcttcagcaagtaccagtgcttcagtctcagcatcaacaagtgcttcagcctcagcatcgacaagtgcctcggcttcagcaagcacatcagcatctgaatcagcgtcgacaagtgcgtcggcctcaaccagtgcatctgaatcggcatcaaccagtgcgtcagcctcagcaagtactagtgcatcagcttcagcatcaacgagtgcatcggcttcggcgtcaaccagtgcatcagagtcagcaagtaccagtgcgtcagcttccgcatcaacaagtgcctcggcttcagcaagcacatcagcatctgaatcagcgtcaaccagtgcttcggcttcagcaagtaccagtgcttcagcttcagcatcaaccagcgcctcggcctcagcaagcacctcagcttctgaatcggcctcaaccagcgcctcggcctcagcaagcacctcagcttctgaatcggcctcaaccagcgcctcagcctcagcatcaacgagtgcttcggcttcagcaagcacaagcgcctcgggttcagcatcaacgagtacgtcagcttcagcgtcaaccagtgcttcagcctcagcatcaacaagtgcgtcagcctcagcaagtatctcagcgtctgaatcggcatcaacgagtgcgtctgagtcagcatcaacgagtacgtcagcctcagcaagcacctcagcttctgaatcggcctcaaccagtgcgtcagcctcagcatcgacaagcgcctcagcttcagcaagtaccagtgcttcagcctcagcgtcgacaagtgcgtcggcctcaaccagtgcatctgaatcggcatcaaccagtgcgtcagcctcagcaagtactagtgcatcggcttcagcatcaaccagtgcctcggcttcagcgtcaaccagtgcgtcagcttcagcaagtaccagtgcttcagtctcagcatcaacaagtgcttcagcctcagcatcgacaagtgcctcggcttcagcaagcacatcagcatctgaatcagcgtcgacaagcgcctcagcttcagcaagtaccagtgcgtcagcctcagcgtcgacaagtgcgtcagcctcagcaagtactagtgcatcagcttcagcatcaacgagtgcatcggcttcggcgtcaaccagtgcatcagagtcagcaagtaccagtgcgtcagcttccgcatcaacaagtgcctcggcttcagcaagcaccagtgcgtcggcttcagcaagtactagcgcctcagcctcagcctcaaccagtgcgtcagcctcagcaagtatctcagcgtctgaatcggcatcaacgagtgcgtccgcttcagcaagtactagcgcctcagcctcagcgtcaacaagtgcatcggcttcagcgtcaacgagtgcgtctgaatcggcatcaacgagtgcgtccgcttcagcaagtactagcgcctcagcctcagcgtcaacaagtgcatcggcttcagcatcaacgagtgcgtccgcttcagcaagtactagcgcctcagcctcagcgtcaacaagtgcatcggcttcagcgtcaacgagtgcgtctgagtcagcatcaacgagtgcgtcagcctcagcaagcacatcagcttctgaatctgcatcaaccagtgcgtcagcctcagcatcgacaagcgcctcagcttcagcaagtaccagtgcgtcagcctcagcgtcgacaagtgcgtcggcttcagcaagtaccagtgcgtcagcctcagcaagtaccagtgcgtcagcctcagcgtcgacaagtgcgtcggcctcaaccagtgcatctgaatcggcatcaaccagtgcgtcagcctcagcaagtactagtgcatcagcttcagcatcaacgagtgcatcggcttcagcatcaaccagtgcatcagagtcagcaagtaccagtgcgtcagcttccgcatcaacaagtgcctcggcttcagcaagtactagcgcctcagcctcagcgtcaacaagtgcttcagcttccgcgtcaaccagcgcctcggcctcagcaagtatctcagcgtctgaatcggcatcaacaagtgcctcggcttcagcatcaacgagtgcatcagtctcagcaagcaccagtgcgtcggcctcagcaagcaccagcgcgtctgaatccgcatcaaccagtgcctcagcttcagcaagtacctcagcatctgaatcagcatcaacaagtgcctcggcttcagcaagcacaagtgcttcagcctcagcaagtatctcagcgtctgaatcggcatcaacgagtgcgtccgcttcagcaagtactagcgcctcagcatcagcgtcaacaagtgcttcggcttcagcgtcaacgagtgcgtctgagtcagcatcaacgagtacgtcagcctcagcaagcacatcagcttctgaatctgcatcaaccagtgcgtcagcctcagcatcgacaagcgcctcagcttcagcaagtaccagtgcgtcagcctcagcaagtaccagtgcttcagcctcagcgtcgacaagtgcgtcggcctcaaccagtgcatctgaatcggcatcaaccagtgcgtcagcctcagcaagtactagcgcctcagcctcagcatcaacgagtgcgtccgcttcagcaagtactagtgcatcagcttcagcaagtactagcgcctcagcctcagcgtcgacaagcgcctcagcttcagcaagtaccagtgcgtcagcctcagcgtcgacaagtgcgtcggcttcagcaagtacctcagcgtctgaatcagcatcaacaagtgcgtcggcttcagcatcaacgagtgcatcagcttcagcatcaacaagtgcttcagcttcagcaagtaccagtgcgtcggcttcagcatcaacgagtgcttcagtctcagcgtcaaccagtgcctctgaatccgcatcaacaagtgcctcggcttcagcaagcaccagtgcttcggcttcagcgtcaacgagtgcgtctgagtcagcatcaacgagtgcgtcagcctcagcaagcacatcagcttctgaatctgcatcaaccagtgcgtcagcttccgcatcaacaagcgcctcggcctcagcaagtacaagtgcttcagcctcagcatcaaccagtgcatcagcttcagcctcaacaagtgcttcagcctcagcgtcaaccagtgcctcggcttcagcaagtaccagtgcgtcagcttcagcaagcacaagtgcgtcagcttcagcatcaaccagtgcttcggcttcggcatcaacaagtgcctcagcatcagcatcaacgagtgcgtcagcctcagcaagtactagtgcatcagcatcagcatcaaccagtgcatcagcctcagcaagtatctcagcgtctgaatcggcatcaacgagtgcatcagcatcagcatcaacgagtgcatcggcttcagcgtcaaccagtgcatcagtctcagcaagcaccagtgcgtcggcttcagcatcaacgagtgcctcagcctcagcaagtatctcagcgtctgaatcggcatcaacgagtgcgtcagcctcagcaagtactagtgcatcggcttcagcaagcaccagtgcgtcggcttcagcatcaaccagtgcctcagcctcagcaagtatctcagcgtctgaatcggcatcaacgagtgcgtcagcctcagcaagtactagtgcatcagcatcagcatcaacgagtgcatcggcttcagcaagtaccagcgcctcagcttcagcaagcaccagtgcgtcagcctcagcaagtaccagcgcctcagcctcagcaagcaccagtgcctcagcttcagcaagtaccagtgcgtcagcctcagcgtcgacaagtgcgtcggcttcagcaagtacctcagcgtctgaatcagcatcaacgagtgcatcagcttcagcatcaacaagtgcttcagcttcagcaagtatctcagcgtctgaatcggcatcaacgagtgcgtccgcttcagcaagtactagcgcctcagcatcagcgtcaacaagtgcttcggcttcagcgtcaacgagtgcgtctgagtcagcatcaacgagtacgtcagcctcagcaagcacatcagcttctgaatctgcatcaaccagtgcgtcagcctcagcatcgacaagcgcctcagcttcagcaagtaccagtgcgtcagcctcagcaagtaccagtgcttcagcctcagcgtcgacaagtgcgtcggcctcaaccagtgcatctgaatcggcatcaaccagtgcgtcagcctcagcaagtactagcgcctcagcctcagcatcaacgagtgcgtccgcttcagcaagtactagtgcatcagcttcagcaagtactagcgcctcagcctcagcgtcgacaagcgcctcagcttcagcaagtaccagtgcgtcagcctcagcgtcgacaagtgcgtcggcttcagcaagtacctcagcgtctgaatcagcatcaacaagtgcgtcggcttcagcatcaacgagtgcatcagcttcagcatcaacaagtgcttcagcttcagcaagtaccagtgcgtcggcttcagcatcaacgagtgcttcagtctcagcgtcaaccagtgcctctgaatccgcatcaacaagtgcctcggcttcagcaagcaccagtgcttcggcttcagcgtcaacgagtgcgtctgagtcagcatcaacgagtgcgtcagcctcagcaagcacatcagcttctgaatctgcatcaaccagtgcgtcagcttccgcatcaacaagcgcctcggcctcagcaagtacaagtgcttcagcctcagcatcaaccagtgcatcagcttcagcctcaacaagtgcttcagcctcagcgtcaaccagtgcctcggcttcagcaagtaccagtgcgtcagcttcagcaagcacaagtgcgtcagcttcagcatcaaccagtgcttcggcttcggcatcaacaagtgcctcagcatcagcatcaacgagtgcgtcagcctcagcaagtactagtgcatcagcatcagcatcaaccagtgcatcagcctcagcaagtatctcagcgtctgaatcggcatcaacgagtgcatcagcatcagcatcaacgagtgcatcggcttcagcgtcaaccagtgcatcagtctcagcaagcaccagtgcgtcggcttcagcatcaacgagtgcctcagcctcagcaagtatctcagcgtctgaatcggcatcaacgagtgcgtcagcctcagcaagtactagtgcatcggcttcagcaagcaccagtgcgtcggcttcagcatcaaccagtgcctcagcctcagcaagtatctcagcgtctgaatcggcatcaacgagtgcgtcagcctcagcaagtactagtgcatcagcctcagcatcaacgagtgcatcggcttcagcaagtaccagcgcctcagcttcagcaagcaccagtgcgtcagcctcagcaagtaccagcgcctcagcctcagcaagcaccagtgcctcagcttcagcaagtaccagtgcgtcagcctcagcatcaacaagtgcttcagcttcggcctcaacaagtgcgtcagcttcagcatcaacgagtgcgtcggcttcagcaagcaccagtgcctcggcctcagcaagcaccagtgcttcagcttcagcatcaacaagtgcgtcagcttcagcaagtacatcagtttcaaattcagcaaaccattcgaactcacaagttggaaatacttctggatcgacaggtaaatcccaaaaagaattgcctaatacaggtactgagtcgtcaattggatctgtgttacttggagttc

SEQ ID NO: 3660 - protein, 4365 aa, Streptococcus pneumoniae
  hypothetical protein
MLVKAPQLQHQQVRRLQHQPVPRLQRQPVRQLQQVPVLQSQHQQVLQPQHRQVPRLQQAHQHLNQRQPVLRLQQVPVLQLQHQPAPRPQQAPQLLNRPQPAPRPQQAPQLLNRPQPAPQPQHQRVLRLQQAQAPRVQHQRVRQLQRQPVLQPQHQQVRQPQQVSQRLNRHQRVRLSQHQRVRQPQQAPQLLNRPQPVRQPQHRQAPQLQQVPVLQPQRRQVRRPQPVHLNRHQPVRQPQQVLVHRLQHQPVPRLQRQPVRQLQQVPVLQSQHQQVLQPQHRQVPRLQQAHQHLNQRRQAPQLQQVPVRQPQRRQVRQPQQVLVHQLQHQRVHRLRRQPVHQSQQVPVRQLPHQQVPRLQQAPVRRLQQVLAPQPQPQPVRQPQQVSQRLNRHQRVRPLQQVLAPQPQRQQVHRLQRQRVRLNRHQRVRPLQQVLAPQPQRQQVHRLQHQRVRPLQQVLAPQPQRQQVHRLQRQRVRLSQHQRVRQPQQAHQLLNLHQPVRQPQHRQAPQLQQVPVRQPQRRQVRRLQQVPVRQPQQVPVRQPQRRQVRRPQPVHLNRHQPVRQPQQVLVHQLQHQRVHRLQHQPVHQSQQVPVRQLPHQQVPRLQQVLAPQPQRQQVLQLPRQPAPRPQQVSQRLNRHQQVPRLQHQRVHQSQQAPVRRPQQAPARLNPHQPVPQLQQVPQHLNQHQQVPRLQQAQVLQPQQVSQRLNRHQRVRPLQQVLAPQHQRQQVLRLQRQRVRLSQHQRVRQPQQAHQLLNLHQPVRQPQHRQAPQLQQVPVRQPQQVPVLQPQRRQVRRPQPVHLNRHQPVRQPQQVLAPQPQHQRVRPLQQVLVHQLQQVLAPQPQRRQAPQLQQVPVRQPQRRQVRRLQQVPQRLNQHQQVRRLQHQRVHQLQHQQVLQLQQVPVRRLQHQRVLQSQRQPVPLNPHQQVPRLQQAPVLRLQRQRVRLSQHQRVRQPQQAHQLLNLHQPVRQLPHQQAPRPQQVQVLQPQHQPVHQLQPQQVLQPQRQPVPRLQQVPVRQLQQAQVRQLQHQPVLRLRHQQVPQHQHQRVRQPQQVLVHQHQHQPVHQPQQVSQRLNRHQRVHQHQHQRVHRLQRQPVHQSQQAPVRRLQHQRVPQPQQVSQRLNRHQRVRQPQQVLVHRLQQAPVRRLQHQPVPQPQQVSQRLNRHQRVRQPQQVLVHQHQHQRVHRLQQVPAPQLQQAPVRQPQQVPAPQPQQAPVPQLQQVPVRQPQRRQVRRLQQVPQRLNQHQRVHQLQHQQVLQLQQVPVRRLQHQRVLQSQRQPVPLNQHQQVPRLQQAPVRRLQQVLVHRLQHRQVRLNRHQRVLRLQHQRVRQPQQAHQLLNLHQPVRPLQRQPVRRLQRRQVLRLQHQRVRRPQQAQVPQRQLPPQPVRRLQQAQVRQPQQVSQRLNRHQRVRLSQHQRVRQPQQAHQLLNLHQPVRQPQHRQAPQLQQVPVLQPQRRQVRRPQPVHLNRHQPVRQPQQVLVHQLQHQRVHRLQHQPVPRLQRQPVRQLQQVPVLQSQHQQVLQPQHRQVPRLQQAHQHLNQRRQAPQLQQVPVRQPQRRQVRQPQQVLVHQLQHQRVHRLRRQPVHQSQQVPVRQLPHQQVPRLQQAPVRRLQQVLAPQPQPQPVRQPQQVSQRLNRHQRVRPLQQVLAPQPQRQQVHRLQRQRVRLNRHQRVRPLQQVLAPQPQRQQVHRLQHQRVRPLQQVLAPQPQRQQVHRLQRQRVRLSQHQRVRQPQQAHQLLNLHQPVRQPQHRQAPQLQQVPVRQPQRRQVRRLQQVPVRQPQQVPVRQPQRRQVRRPQPVHLNRHQPVRQPQQVLVHQLQHQRVHRLQHQPVHQSQQVPVRQLPHQQVPRLQQVLAPQPQRQQVLQLPRQPAPRPQQVSQRLNRHQQVPRLQHQRVHQSQQAPVRRPQQAPARLNPHQPVPQLQQVPQHLNQHQQVHRLQQAQVLQPQQVSQRLNRHQRVRPLQQVLAPQHQRQQVLRLQRQRVRLSQHQRVRQPQQAHQLLNLHQPVRQPQHRQAPQLQQVPVRQPQQVPVLQPQRRQVRRPQPVHLNRHQPVRQPQQVLAPQPQHQRVRPLQQVLVHQHQHQRVHRLQQVPAPQLQQAPVRQPQQVPAPQPQQAPVPQLQQVPVRQPQRRQVRRLQQVPQRLNQHQRVHQLQHQQVLQLQQVPVRRLQHQRVLQSQRQPVPLNQHQQVPRLQQAPVRRLQQVLVHRLQHRQVRLNRHQRVLRLQHQRVRQPQQAHQLLNLHQPVRPLQRQPVRRLQRRQVLRLQHQRVRRPQQAQVPQRQLPPQPVRPLQQAQVRQPQQVSQRLNRHQRVRRPQQAQVPQRQLPPQPVRRLQQAQVRQPQQVSQRLNRHQRVRLSQHQRVRQPQQAHQLLNRHQPVRQPQHRQAPQLQQVPVLQPQRRQVRRPQPVHLNRHQPVRQPQQVLVHQLQHQRVHRLQHQPVPRLQRQPVRQLQQVPVLQSQHQQVLQPQHRQVPRLQQAHQHLNQRRQVRRPQPVHLNRHQPVRQPQQVLVHQLQHQRVHRLRRQPVHQSQQVPVRQLPHQQVPRLQQAHQHLNQRQPVLRLQQVPVLQLQHQPAPRPQQAPQLLNRPQPAPRPQQAPQLLNRPQPAPQPQHQRVLRLQQAQAPRVQHQRVRQLQRQPVLQPQHQQVRQPQQVSQRLNRHQRVRLSQHQRVRQPQQAPQLLNRPQPVRQPQHRQAPQLQQVPVLQPQRRQVRRPQPVHLNRHQPVRQPQQVLVHRLQHQPVPRLQRQPVRQLQQVPVLQSQHQQVLQPQHRQVPRLQQAHQHLNQRRQAPQLQQVPVRQPQRRQVRQPQQVLVHQLQHQRVHRLRRQPVHQSQQVPVRQLPHQQVPRLQQAPVRRLQQVLAPQPQPQPVRQPQQVSQRLNRHQRVRPLQQVLAPQPQRQQVHRLQRQRVRLNRHQRVRPLQQVLAPQPQRQQVHRLQHQRVRPLQQVLAPQPQRQQVHRLQRQRVRLSQHQRVRQPQQAHQLLNLHQPVRQPQHRQAPQLQQVPVRQPQRRQVRRLQQVPVRQPQQVPVRQPQRRQVRRPQPVHLNRHQPVRQPQQVLVHQLQHQRVHRLQHQPVHQSQQVPVRQLPHQQVPRLQQVLAPQPQRQQVLQLPRQPAPRPQQVSQRLNRHQQVPRLQHQRVHQSQQAPVRRPQQAPARLNPHQPVPQLQQVPQHLNQHQQVPRLQQAQVLQPQQVSQRLNRHQRVRPLQQVLAPQHQRQQVLRLQRQRVRLSQHQRVRQPQQAHQLLNLHQPVRQPQHRQAPQLQQVPVRQPQQVPVLQPQRRQVRRPQPVHLNRHQPVRQPQQVLAPQPQHQRVRPLQQVLVHQLQQVLAPQPQRRQAPQLQQVPVRQPQRRQVRRLQQVPQRLNQHQQVRRLQHQRVHQLQHQQVLQLQQVPVRRLQHQRVLQSQRQPVPLNPHQQVPRLQQAPVLRLQRQRVRLSQHQRVRQPQQAHQLLNLHQPVRQLPHQQAPRPQQVQVLQPQHQPVHQLQPQQVLQPQRQPVPRLQQVPVRQLQQAQVRQLQHQPVLRLRHQQVPQHQHQRVRQPQQVLVHQHQHQPVHQPQQVSQRLNRHQRVHQHQHQRVHRLQRQPVHQSQQAPVRRLQHQRVPQPQQVSQRLNRHQRVRQPQQVLVHRLQQAPVRRLQHQPVPQPQQVSQRLNRHQRVRQPQQVLVHQHQHQRVHRLQQVPAPQLQQAPVRQPQQVPAPQPQQAPVPQLQQVPVRQPQRRQVRRLQQVPQRLNQHQRVHQLQHQQVLQLQQVSQRLNRHQRVRPLQQVLAPQHQRQQVLRLQRQRVRLSQHQRVRQPQQAHQLLNLHQPVRQPQHRQAPQLQQVPVRQPQQVPVLQPQRRQVRRPQPVHLNRHQPVRQPQQVLAPQPQHQRVRPLQQVLVHQLQQVLAPQPQRRQAPQLQQVPVRQPQRRQVRRLQQVPQRLNQHQQVRRLQHQRVHQLQHQQVLQLQQVPVRRLQHQRVLQSQRQPVPLNPHQQVPRLQQAPVLRLQRQRVRLSQHQRVRQPQQAHQLLNLHQPVRQLPHQQAPRPQQVQVLQPQHQPVHQLQPQQVLQPQRQPVPRLQQVPVRQLQQAQVRQLQHQPVLRLRHQQVPQHQHQRVRQPQQVLVHQHQHQPVHQPQQVSQRLNRHQRVHQHQHQRVHRLQRQPVHQSQQAPVRRLQHQRVPQPQQVSQRLNRHQRVRQPQQVLVHRLQQAPVRRLQHQPVPQPQQVSQRLNRHQRVRQPQQVLVHQPQHQRVHRLQQVPAPQLQQAPVRQPQQVPAPQPQQAPVPQLQQVPVRQPQHQQVLQLRPQQVRQLQHQRVRRLQQAPVPRPQQAPVLQLQHQQVRQLQQVHQFQIQQTIRTHKLEILLDRQVNPKKNCLIQVLSRQLDLCYLEF

SEQ ID NO: 3661 - DNA, 14328 bp, Streptococcus pneumoniae
atgaccgaaacggtagaagataaagtaagtcattcaattactgggcttgatatcctcaaggggatagttgctgcgggagctgtcataagtggaaccgttgcaactcaaacgaaggtatttacaaatgagtcagcagtacttgaaaaaactgtagagaaaacggatgctttggcaacaaatgatacagtagttctaggtacgatatctacaagtaattcagcgagttcaactagtttgtcagcttcagagtcggcaagtacatctgcatctgagtcagcctcaaccagcgcttcgacctcagcaagtacaagtgcatcagaatcagcaagtacatcggcttcgacaagtatttctgcatcatctactgtggtaggttcacaaacagctgccgctacagaagcaactgctaagaaggtcgaagaagatcgtaagaaaccagctagtgattatgtagcatcagttacaaatgtcaatctccaatcttatgctaagcgacgcaagcgttcagtggattccatcgagcaattgctggcttctataaaaaatgctgctgttttttctggcaatacgattgtaaatggcgcccctgcaattaatgcaagtctaaacattgctaaaagtgagacaaaagtttatacaggtgaaggtgtagattcggtatatcgtgttccaatttactataaattgaaagtgacaaatgatggttcaaaattgacctttacctatacggttacgtatgtgaatcctaaaacaaatgatcttggtaatatatcaagtatgcgtcctggatattctatctataattcaggtacttcaacacaaacaatgttaacccttggcagtgatcttggtaaaccttcaggtgtaaagaactacattactgacaaaaatggtagacaggttctatcctataatacatctacaatgacgacgcagggtagtgggtatacttggggaaatggtgcccaaatgaatggtttctttgctaagaaaggatatggattaacatcatcttggactgtaccaattactggaacggatacatcctttacatttaccccttacgctgctagaacagatagaattggaattaactacttcaatggtggaggaaaggtagttgaatctagcacgaccagtcagtcactttcacagtctaagtcactctcagtaagtgctagtcaaagcgcctcagcttcagcatcaacaagtgcgtcggcttcagcatcaaccagtgcctcggcttcagcgtcaaccagtgcgtcagcttcagcaagtaccagtgcttcagtctcagcatcaacaagtgcttcagcctcagcatcgacaagtgcctcggcttcagcaagcacatcagcatctgaatcagcgtcaaccagtgcttcggcttcagcaagtaccagtgcttcagcttcagcatcaaccagcgcctcggcctcagcaagcacctcagcttctgaatcggcctcaaccagcgcctcggcctcagcaagcacctcagcttctgaatcggcctcaaccagcgcctcagcctcagcatcaacgagtgcttcggcttcagcaagcacaagcgcctcgggttcagcatcaacgagtacgtcagcttcagcgtcaaccagtgcttcagcctcagcatcaacaagtgcgtcagcctcagcaagtatctcagcgtctgaatcggcatcaacgagtgcgtctgagtcagcatcaacgagtacgtcagcctcagcaagcacctcagcttctgaatcggcctcaaccagtgcgtcagcctcagcatcgacaagcgcctcagcttcagcaagtaccagtgcttcagcctcagcgtcgacaagtgcgtcggcctcaaccagtgcatctgaatcggcatcaaccagtgcgtcagcctcagcaagtactagtgcatcggcttcagcatcaaccagtgcctcggcttcagcgtcaaccagtgcgtcagcttcagcaagtaccagtgcttcagtctcagcatcaacaagtgcttcagcctcagcatcgacaagtgcctcggcttcagcaagcacatcagcatctgaatcagcgtcgacaagcgcctcagcttcagcaagtaccagtgcgtcagcctcagcgtcgacaagtgcgtcagcctcagcaagtactagtgcatcagcttcagcatcaacgagtgcatcggcttcggcgtcaaccagtgcatcagagtcagcaagtaccagtgcgtcagcttccgcatcaacaagtgcctcggcttcagcaagcaccagtgcgtcggcttcagcaagtactagcgcctcagcctcagcctcaaccagtgcgtcagcctcagcaagtatctcagcgtctgaatcggcatcaacgagtgcgtccgcttcagcaagtactagcgcctcagcctcagcgtcaacaagtgcatcggcttcagcgtcaacgagtgcgtctgaatcggcatcaacgagtgcgtccgcttcagcaagtactagcgcctcagcctcagcgtcaacaagtgcatcggcttcagcatcaacgagtgcgtccgcttcagcaagtactagcgcctcagcctcagcgtcaacaagtgcatcggcttcagcgtcaacgagtgcgtctgagtcagcatcaacgagtgcgtcagcctcagcaagcacatcagcttctgaatctgcatcaaccagtgcgtcagcctcagcatcgacaagcgcctcagcttcagcaagtaccagtgcgtcagcctcagcgtcgacaagtgcgtcggcttcagcaagtaccagtgcgtcagcctcagcaagtaccagtgcgtcagcctcagcgtcgacaagtgcgtcggcctcaaccagtgcatctgaatcggcatcaaccagtgcgtcagcctcagcaagtactagtgcatcagcttcagcatcaacgagtgcatcggcttcagcatcaaccagtgcatcagagtcagcaagtaccagtgcgtcagcttccgcatcaacaagtgcctcggcttcagcaagtactagcgcctcagcctcagcgtcaacaagtgcttcagcttccgcgtcaaccagcgcctcggcctcagcaagtatctcagcgtctgaatcggcatcaacaagtgcctcggcttcagcatcaacgagtgcatcagtctcagcaagcaccagtgcgtcggcctcagcaagcaccagcgcgtctgaatccgcatcaaccagtgcctcagcttcagcaagtacctcagcatctgaatcagcatcaacaagtgcctcggcttcagcaagcacaagtgcttcagcctcagcaagtatctcagcgtctgaatcggcatcaacgagtgcgtccgcttcagcaagtactagcgcctcagcatcagcgtcaacaagtgcttcggcttcagcgtcaacgagtgcgtctgagtcagcatcaacgagtacgtcagcctcagcaagcacatcagcttctgaatctgcatcaaccagtgcgtcagcctcagcatcgacaagcgcctcagcttcagcaagtaccagtgcgtcagcctcagcaagtaccagtgcttcagcctcagcgtcgacaagtgcgtcggcctcaaccagtgcatctgaatcggcatcaaccagtgcgtcagcctcagcaagtactagcgcctcagcctcagcatcaacgagtgcgtccgcttcagcaagtactagtgcatcagcttcagcaagtactagcgcctcagcctcagcgtcgacaagcgcctcagcttcagcaagtaccagtgcgtcagcctcagcgtcgacaagtgcgtcggcttcagcaagtacctcagcgtctgaatcagcatcaacaagtgcgtcggcttcagcatcaacgagtgcatcagcttcagcatcaacaagtgcttcagcttcagcaagtaccagtgcgtcggcttcagcatcaacgagtgcttcagtctcagcgtcaaccagtgcctctgaatccgcatcaacaagtgcctcggcttcagcaagcaccagtgcttcggcttcagcgtcaacgagtgcgtctgagtcagcatcaacgagtgcgtcagcctcagcaagcacatcagcttctgaatctgcatcaaccagtgcgtcagcttccgcatcaacaagcgcctcggcctcagcaagtacaagtgcttcagcctcagcatcaaccagtgcatcagcttcagcctcaacaagtgcttcagcctcagcgtcaaccagtgcctcggcttcagcaagtaccagtgcgtcagcttcagcaagcacaagtgcgtcagcttcagcatcaaccagtgcttcggcttcggcatcaacaagtgcctcagcatcagcatcaacgagtgcgtcagcctcagcaagtactagtgcatcagcatcagcatcaaccagtgcatcagcctcagcaagtatctcagcgtctgaatcggcatcaacgagtgcatcagcatcagcatcaacgagtgcatcggcttcagcgtcaaccagtgcatcagtctcagcaagcaccagtgcgtcggcttcagcatcaacgagtgcctcagcctcagcaagtatctcagcgtctgaatcggcatcaacgagtgcgtcagcctcagcaagtactagtgcatcggcttcagcaagcaccagtgcgtcggcttcagcatcaaccagtgcctcagcctcagcaagtatctcagcgtctgaatcggcatcaacgagtgcgtcagcctcagcaagtactagtgcatcagcatcagcatcaacgagtgcatcggcttcagcaagtaccagcgcctcagcttcagcaagcaccagtgcgtcagcctcagcaagtaccagcgcctcagcctcagcaagcaccagtgcctcagcttcagcaagtaccagtgcgtcagcctcagcgtcgacaagtgcgtcggcttcagcaagtacctcagcgtctgaatcagcatcaacgagtgcatcagcttcagcatcaacaagtgcttcagcttcagcaagtaccagtgcgtcggcttcagcatcaacgagtgcttcagtctcagcgtcaaccagtgcctctgaatcagcatcaacaagtgcctcggcttcagcaagcaccagtgcgtcggcttcagcaagtactagtgcatcggcttcagcatcgacaagtgcgtctgaatcggcatcaacgagtgcttcggcttcagcatcaacgagtgcgtcagcctcagcaagcacatcagcttctgaatctgcatcaaccagtgcgtccgcttcagcgtcaaccagtgcgtcggcttcagcgtcgacaagtgcttcggcttcagcatcaacgagtgcgtcggcctcagcaagcgcaagtacctcagcgtcagcttccgcctcaaccagtgcgtcggcttcagcaagcacaagtgcgtcagcctcagcaagtatctcagcgtctgaatcggcatcaacgagtgcgtctgagtcagcatcaacgagtacgtcagcctcagcaagcacatcagcttctgaatctgcatcaaccagtgcgtcagcctcagcatcgacaagcgcctcagcttcagcaagtaccagtgcttcagcctcagcgtcgacaagtgcgtcggcctcaaccagtgcatctgaatcggcatcaaccagtgcgtcagcctcagcaagtactagtgcatcagcttcagcatcaacgagtgcatcggcttcagcatcaaccagtgcctcggcttcagcgtcaaccagtgcgtcagcttcagcaagtaccagtgcttcagtctcagcatcaacaagtgcttcagcctcagcatcgacaagtgcctcggcttcagcaagcacatcagcatctgaatcagcgtcgacaagcgcctcagcttcagcaagtaccagtgcgtcagcctcagcgtcgacaagtgcgtcagcctcagcaagtactagtgcatcagcttcagcatcaacgagtgcatcggcttcggcgtcaaccagtgcatcagagtcagcaagtaccagtgcgtcagcttccgcatcaacaagtgcctcggcttcagcaagcaccagtgcgtcggcttcagcaagtactagcgcctcagcctcagcctcaaccagtgcgtcagcctcagcaagtatctcagcgtctgaatcggcatcaacgagtgcgtccgcttcagcaagtactagcgcctcagcctcagcgtcaacaagtgcatcggcttcagcgtcaacgagtgcgtctgaatcggcatcaacgagtgcgtccgcttcagcaagtactagcgcctcagcctcagcgtcaacaagtgcatcggcttcagcatcaacgagtgcgtccgcttcagcaagtactagcgcctcagcctcagcgtcaacaagtgcatcggcttcagcgtcaacgagtgcgtctgagtcagcatcaacgagtgcgtcagcctcagcaagcacatcagcttctgaatctgcatcaaccagtgcgtcagcctcagcatcgacaagcgcctcagcttcagcaagtaccagtgcgtcagcctcagcgtcgacaagtgcgtcggcttcagcaagtaccagtgcgtcagcctcagcaagtaccagtgcgtcagcctcagcgtcgacaagtgcgtcggcctcaaccagtgcatctgaatcggcatcaaccagtgcgtcagcctcagcaagtactagtgcatcagcttcagcatcaacgagtgcatcggcttcagcatcaaccagtgcatcagagtcagcaagtaccagtgcgtcagcttccgcatcaacaagtgcctcggcttcagcaagtactagcgcctcagcctcagcgtcaacaagtgcttcagcttccgcgtcaaccagcgcctcggcctcagcaagtatctcagcgtctgaatcggcatcaacaagtgcctcggcttcagcatcaacgagtgcatcagtctcagcaagcaccagtgcgtcggcctcagcaagcaccagcgcgtctgaatccgcatcaaccagtgcctcagcttcagcaagtacctcagcatctgaatcagcatcaacaagtgcatcggcttcagcaagcacaagtgcttcagcctcagcaagtatctcagcgtctgaatcggcatcaacgagtgcgtccgcttcagcaagtactagcgcctcagcatcagcgtcaacaagtgcttcggcttcagcgtcaacgagtgcgtctgagtcagcatcaacgagtacgtcagcctcagcaagcacatcagcttctgaatctgcatcaaccagtgcgtcagcctcagcatcgacaagcgcctcagcttcagcaagtaccagtgcgtcagcctcagcaagtaccagtgcttcagcctcagcgtcgacaagtgcgtcggcctcaaccagtgcatctgaatcggcatcaaccagtgcgtcagcctcagcaagtactagcgcctcagcctcagcatcaacgagtgcgtccgcttcagcaagtactagtgcatcagcatcagcatcaacgagtgcatcggcttcagcaagtaccagcgcctcagcttcagcaagcaccagtgcgtcagcctcagcaagtaccagcgcctcagcctcagcaagcaccagtgcctcagcttcagcaagtaccagtgcgtcagcctcagcgtcgacaagtgcgtcggcttcagcaagtacctcagcgtctgaatcagcatcaacgagtgcatcagcttcagcatcaacaagtgcttcagcttcagcaagtaccagtgcgtcggcttcagcatcaacgagtgcttcagtctcagcgtcaaccagtgcctctgaatcagcatcaacaagtgcctcggcttcagcaagcaccagtgcgtcggcttcagcaagtactagtgcatcggcttcagcatcgacaagtgcgtctgaatcggcatcaacgagtgcttcggcttcagcatcaacgagtgcgtcagcctcagcaagcacatcagcttctgaatctgcatcaaccagtgcgtccgcttcagcgtcaaccagtgcgtcggcttcagcgtcgacaagtgcttcggcttcagcatcaacgagtgcgtcggcctcagcaagcgcaagtacctcagcgtcagcttccgcctcaaccagtgcgtccgcttcagcaagcacaagtgcgtcagcctcagcaagtatctcagcgtctgaatcggcatcaacgagtgcgtcggcctcagcaagcgcaagtacctcagcgtcagcttccgcctcaaccagtgcgtcggcttcagcaagcacaagtgcgtcagcctcagcaagtatctcagcgtctgaatcggcatcaacgagtgcgtctgagtcagcatcaacgagtacgtcagcctcagcaagcacatcagcttctgaatcggcatcaaccagtgcgtcagcctcagcatcgacaagcgcctcagcttcagcaagtaccagtgcttcagcctcagcgtcgacaagtgcgtcggcctcaaccagtgcatctgaatcggcatcaaccagtgcgtcagcctcagcaagtactagtgcatcagcttcagcatcaacgagtgcatcggcttcagcatcaaccagtgcctcggcttcagcgtcaaccagtgcgtcagcttcagcaagtaccagtgcttcagtctcagcatcaacaagtgcttcagcctcagcatcgacaagtgcctcggcttcagcaagcacatcagcatctgaatcagcgtcgacaagtgcgtcggcctcaaccagtgcatctgaatcggcatcaaccagtgcgtcagcctcagcaagtactagtgcatcagcttcagcatcaacgagtgcatcggcttcggcgtcaaccagtgcatcagagtcagcaagtaccagtgcgtcagcttccgcatcaacaagtgcctcggcttcagcaagcacatcagcatctgaatcagcgtcaaccagtgcttcggcttcagcaagtaccagtgcttcagcttcagcatcaaccagcgcctcggcctcagcaagcacctcagcttctgaatcggcctcaaccagcgcctcggcctcagcaagcacctcagcttctgaatcggcctcaaccagcgcctcagcctcagcatcaacgagtgcttcggcttcagcaagcacaagcgcctcgggttcagcatcaacgagtacgtcagcttcagcgtcaaccagtgcttcagcctcagcatcaacaagtgcgtcagcctcagcaagtatctcagcgtctgaatcggcatcaacgagtgcgtctgagtcagcatcaacgagtacgtcagcctcagcaagcacctcagcttctgaatcggcctcaaccagtgcgtcagcctcagcatcgacaagcgcctcagcttcagcaagtaccagtgcttcagcctcagcgtcgacaagtgcgtcggcctcaaccagtgcatctgaatcggcatcaaccagtgcgtcagcctcagcaagtactagtgcatcggcttcagcatcaaccagtgcctcggcttcagcgtcaaccagtgcgtcagcttcagcaagtaccagtgcttcagtctcagcatcaacaagtgcttcagcctcagcatcgacaagtgcctcggcttcagcaagcacatcagcatctgaatcagcgtcgacaagcgcctcagcttcagcaagtaccagtgcgtcagcctcagcgtcgacaagtgcgtcagcctcagcaagtactagtgcatcagcttcagcatcaacgagtgcatcggcttcggcgtcaaccagtgcatcagagtcagcaagtaccagtgcgtcagcttccgcatcaacaagtgcctcggcttcagcaagcaccagtgcgtcggcttcagcaagtactagcgcctcagcctcagcctcaaccagtgcgtcagcctcagcaagtatctcagcgtctgaatcggcatcaacgagtgcgtccgcttcagcaagtactagcgcctcagcctcagcgtcaacaagtgcatcggcttcagcgtcaacgagtgcgtctgaatcggcatcaacgagtgcgtccgcttcagcaagtactagcgcctcagcctcagcgtcaacaagtgcatcggcttcagcatcaacgagtgcgtccgcttcagcaagtactagcgcctcagcctcagcgtcaacaagtgcatcggcttcagcgtcaacgagtgcgtctgagtcagcatcaacgagtgcgtcagcctcagcaagcacatcagcttctgaatctgcatcaaccagtgcgtcagcctcagcatcgacaagcgcctcagcttcagcaagtaccagtgcgtcagcctcagcgtcgacaagtgcgtcggcttcagcaagtaccagtgcgtcagcctcagcaagtaccagtgcgtcagcctcagcgtcgacaagtgcgtcggcctcaaccagtgcatctgaatcggcatcaaccagtgcgtcagcctcagcaagtactagtgcatcagcttcagcatcaacgagtgcatcggcttcagcatcaaccagtgcatcagagtcagcaagtaccagtgcgtcagcttccgcatcaacaagtgcctcggcttcagcaagtactagcgcctcagcctcagcgtcaacaagtgcttcagcttccgcgtcaaccagcgcctcggcctcagcaagtatctcagcgtctgaatcggcatcaacaagtgcctcggcttcagcatcaacgagtgcatcagtctcagcaagcaccagtgcgtcggcctcagcaagcaccagcgcgtctgaatccgcatcaaccagtgcctcagcttcagcaagtacctcagcatctgaatcagcatcaacaagtgcctcggcttcagcaagcacaagtgcttcagcctcagcaagtatctcagcgtctgaatcggcatcaacgagtgcgtccgcttcagcaagtactagcgcctcagcatcagcgtcaacaagtgcttcggcttcagcgtcaacgagtgcgtctgagtcagcatcaacgagtacgtcagcctcagcaagcacatcagcttctgaatctgcatcaaccagtgcgtcagcctcagcatcgacaagcgcctcagcttcagcaagtaccagtgcgtcagcctcagcaagtaccagtgcttcagcctcagcgtcgacaagtgcgtcggcctcaaccagtgcatctgaatcggcatcaaccagtgcgtcagcctcagcaagtactagcgcctcagcctcagcatcaacgagtgcgtccgcttcagcaagtactagtgcatcagcttcagcaagtactagcgcctcagcctcagcgtcgacaagcgcctcagcttcagcaagtaccagtgcgtcagcctcagcgtcgacaagtgcgtcggcttcagcaagtacctcagcgtctgaatcagcatcaacaagtgcgtcggcttcagcatcaacgagtgcatcagcttcagcatcaacaagtgcttcagcttcagcaagtaccagtgcgtcggcttcagcatcaacgagtgcttcagtctcagcgtcaaccagtgcctctgaatccgcatcaacaagtgcctcggcttcagcaagcaccagtgcttcggcttcagcgtcaacgagtgcgtctgagtcagcatcaacgagtgcgtcagcctcagcaagcacatcagcttctgaatctgcatcaaccagtgcgtcagcttccgcatcaacaagcgcctcggcctcagcaagtacaagtgcttcagcctcagcatcaaccagtgcatcagcttcagcctcaacaagtgcttcagcctcagcgtcaaccagtgcctcggcttcagcaagtaccagtgcgtcagcttcagcaagcacaagtgcgtcagcttcagcatcaaccagtgcttcggcttcggcatcaacaagtgcctcagcatcagcatcaacgagtgcgtcagcctcagcaagtactagtgcatcagcatcagcatcaaccagtgcatcagcctcagcaagtatctcagcgtctgaatcggcatcaacgagtgcatcagcatcagcatcaacgagtgcatcggcttcagcgtcaaccagtgcatcagtctcagcaagcaccagtgcgtcggcttcagcatcaacgagtgcctcagcctcagcaagtatctcagcgtctgaatcggcatcaacgagtgcgtcagcctcagcaagtactagtgcatcggcttcagcaagcaccagtgcgtcggcttcagcatcaaccagtgcctcagcctcagcaagtatctcagcgtctgaatcggcatcaacgagtgcgtcagcctcagcaagtactagtgcatcagcatcagcatcaacgagtgcatcggcttcagcaagtaccagcgcctcagcttcagcaagcaccagtgcgtcagcctcagcaagtaccagcgcctcagcctcagcaagcaccagtgcctcagcttcagcaagtaccagtgcgtcagcctcagcgtcgacaagtgcgtcggcttcagcaagtacctcagcgtctgaatcagcatcaacgagtgcatcagcttcagcatcaacaagtgcttcagcttcagcaagtatctcagcgtctgaatcggcatcaacgagtgcgtccgcttcagcaagtactagcgcctcagcatcagcgtcaacaagtgcttcggcttcagcgtcaacgagtgcgtctgagtcagcatcaacgagtacgtcagcctcagcaagcacatcagcttctgaatctgcatcaaccagtgcgtcagcctcagcatcgacaagcgcctcagcttcagcaagtaccagtgcgtcagcctcagcaagtaccagtgcttcagcctcagcgtcgacaagtgcgtcggcctcaaccagtgcatctgaatcggcatcaaccagtgcgtcagcctcagcaagtactagcgcctcagcctcagcatcaacgagtgcgtccgcttcagcaagtactagtgcatcagcttcagcaagtactagcgcctcagcctcagcgtcgacaagcgcctcagcttcagcaagtaccagtgcgtcagcctcagcgtcgacaagtgcgtcggcttcagcaagtacctcagcgtctgaatcagcatcaacaagtgcgtcggcttcagcatcaacgagtgcatcagcttcagcatcaacaagtgcttcagcttcagcaagtaccagtgcgtcggcttcagcatcaacgagtgcttcagtctcagcgtcaaccagtgcctctgaatccgcatcaacaagtgcctcggcttcagcaagcaccagtgcttcggcttcagcgtcaacgagtgcgtctgagtcagcatcaacgagtgcgtcagcctcagcaagcacatcagcttctgaatctgcatcaaccagtgcgtcagcttccgcatcaacaagcgcctcggcctcagcaagtacaagtgcttcagcctcagcatcaaccagtgcatcagcttcagcctcaacaagtgcttcagcctcagcgtcaaccagtgcctcggcttcagcaagtaccagtgcgtcagcttcagcaagcacaagtgcgtcagcttcagcatcaaccagtgcttcggcttcggcatcaacaagtgcctcagcatcagcatcaacgagtgcgtcagcctcagcaagtactagtgcatcagcatcagcatcaaccagtgcatcagcctcagcaagtatctcagcgtctgaatcggcatcaacgagtgcatcagcatcagcatcaacgagtgcatcggcttcagcgtcaaccagtgcatcagtctcagcaagcaccagtgcgtcggcttcagcatcaacgagtgcctcagcctcagcaagtatctcagcgtctgaatcggcatcaacgagtgcgtcagcctcagcaagtactagtgcatcggcttcagcaagcaccagtgcgtcggcttcagcatcaaccagtgcctcagcctcagcaagtatctcagcgtctgaatcggcatcaacgagtgcgtcagcctcagcaagtactagtgcatcagcctcagcatcaacgagtgcatcggcttcagcaagtaccagcgcctcagcttcagcaagcaccagtgcgtcagcctcagcaagtaccagcgcctcagcctcagcaagcaccagtgcctcagcttcagcaagtaccagtgcgtcagcctcagcatcaacaagtgcttcagcttcggcctcaacaagtgcgtcagcttcagcatcaacgagtgcgtcggcttcagcaagcaccagtgcctcggcctcagcaagcaccagtgcttcagcttcagcatcaacaagtgcgtcagcttcagcaagtacatcagtttcaaattcagcaaaccattcgaactcacaagttggaaatacttctggatcgacaggtaaatcccaaaaagaattgcctaatacaggtactgagtcgtcaattggatctgtgttacttggagttctagcagctgttacaggtattggattggttgcgaaacgccgtaaacgtgatgaagaagag

SEQ ID NO: 3662 - protein, 4776 aa, Streptococcus pneumoniae
  cell wall surface anchor family protein; Cellular location: Peptidoglycan-bound (LPXTG); Similar to strain R6 sequence 15903446 (9.E-10)
MTETVEDKVSHSITGLDILKGIVAAGAVISGTVATQTKVFTNESAVLEKTVEKTDALATNDTVVLGTISTSNSASSTSLSASESASTSASESASTSASTSASTSASESASTSASTSISASSTVVGSQTAAATEATAKKVEEDRKKPASDYVASVTNVNLQSYAKRRKRSVDSIEQLLASIKNAAVFSGNTIVNGAPAINASLNIAKSETKVYTGEGVDSVYRVPIYYKLKVTNDGSKLTFTYTVTYVNPKTNDLGNISSMRPGYSIYNSGTSTQTMLTLGSDLGKPSGVKNYITDKNGRQVLSYNTSTMTTQGSGYTWGNGAQMNGFFAKKGYGLTSSWTVPITGTDTSFTFTPYAARTDRIGINYFNGGGKVVESSTTSQSLSQSKSLSVSASQSASASASTSASASASTSASASASTSASASASTSASVSASTSASASASTSASASASTSASESASTSASASASTSASASASTSASASASTSASESASTSASASASTSASESASTSASASASTSASASASTSASGSASTSTSASASTSASASASTSASASASISASESASTSASESASTSTSASASTSASESASTSASASASTSASASASTSASASASTSASASTSASESASTSASASASTSASASASTSASASASTSASASASTSASVSASTSASASASTSASASASTSASESASTSASASASTSASASASTSASASASTSASASASTSASASASTSASESASTSASASASTSASASASTSASASASTSASASASTSASASASISASESASTSASASASTSASASASTSASASASTSASESASTSASASASTSASASASTSASASASTSASASASTSASASASTSASASASTSASESASTSASASASTSASESASTSASASASTSASASASTSASASASTSASASASTSASASASTSASASASTSASASTSASESASTSASASASTSASASASTSASASASTSASESASTSASASASTSASASASTSASASASTSASASASTSASASASISASESASTSASASASTSASVSASTSASASASTSASESASTSASASASTSASESASTSASASASTSASASASISASESASTSASASASTSASASASTSASASASTSASESASTSTSASASTSASESASTSASASASTSASASASTSASASASTSASASASTSASASTSASESASTSASASASTSASASASTSASASASTSASASASTSASASASTSASASASTSASASASTSASASASTSASESASTSASASASTSASASASTSASASASTSASASASTSASVSASTSASESASTSASASASTSASASASTSASESASTSASASASTSASESASTSASASASTSASASASTSASASASTSASASASTSASASASTSASASASTSASASASTSASASASTSASASASTSASASASTSASASASTSASASASTSASASASISASESASTSASASASTSASASASTSASVSASTSASASASTSASASASISASESASTSASASASTSASASASTSASASASTSASASASISASESASTSASASASTSASASASTSASASASTSASASASTSASASASTSASASASTSASASASTSASASASTSASASASTSASESASTSASASASTSASASASTSASASASTSASVSASTSASESASTSASASASTSASASASTSASASASTSASESASTSASASASTSASASASTSASESASTSASASASTSASASASTSASASASTSASASASASTSASASASTSASASASTSASASASISASESASTSASESASTSTSASASTSASESASTSASASASTSASASASTSASASASTSASASTSASESASTSASASASTSASASASTSASASASTSASASASTSASASASTSASVSASTSASASASTSASASASTSASESASTSASASASTSASASASTSASASASTSASASASTSASASASTSASESASTSASASASTSASASASTSASASASTSASASASTSASASASISASESASTSASASASTSASASASTSASASASTSASESASTSASASASTSASASASTSASASASTSASASASTSASASASTSASASASTSASESASTSASASASTSASESASTSASASASTSASASASTSASASASTSASASASTSASASASTSASASASTSASASTSASESASTSASASASTSASASASTSASASASTSASESASTSASASASTSASASASTSASASASTSASASASTSASASASISASESASTSASASASTSASVSASTSASASASTSASESASTSASASASTSASESASTSASASASTSASASASISASESASTSASASASTSASASASTSASASASTSASESASTSTSASASTSASESASTSASASASTSASASASTSASASASTSASASASTSASASTSASESASTSASASASTSASASASTSASASASTSASASASTSASASASTSASASASTSASASASTSASASASTSASASASTSASASASTSASASASTSASESASTSASASASTSASASASTSASASASTSASVSASTSASESASTSASASASTSASASASTSASASASTSASESASTSASASASTSASASASTSASESASTSASASASTSASASASTSASASASTSASASASASTSASASASTSASASASTSASASASISASESASTSASASASASTSASASASTSASASASTSASASASISASESASTSASESASTSTSASASTSASESASTSASASASTSASASASTSASASASTSASASTSASESASTSASASASTSASASASTSASASASTSASASASTSASASASTSASVSASTSASASASTSASASASTSASESASTSASASTSASESASTSASASASTSASASASTSASASASTSASESASTSASASASTSASASASTSASESASTSASASASTSASASASTSASASASTSASESASTSASASASTSASESASTSASASASTSASASASTSASGSASTSTSASASTSASASASTSASASASISASESASTSASESASTSTSASASTSASESASTSASASASTSASASASTSASASASTSASASTSASESASTSASASASTSASASASTSASASASTSASASASTSASVSASTSASASASTSASASASTSASESASTSASASASTSASASASTSASASASTSASASASTSASASASTSASESASTSASASASTSASASASTSASASASTSASASASTSASASASISASESASTSASASASTSASASASTSASASASTSASESASTSASASASTSASASASTSASASASTSASASASTSASASASTSASASASTSASESASTSASASASTSASESASTSASASASTSASASASTSASASASTSASASASTSASASASTSASASASTSASASTSASESASTSASASASTSASASASTSASASASTSASESASTSASASASTSASASASTSASASASTSASASASTSASASASISASESASTSASASASTSASVSASTSASASASTSASESASTSASASASTSASESASTSASASASTSASASASISASESASTSASASASTSASASASTSASASASTSASESASTSTSASASTSASESASTSASASASTSASASASTSASASASTSASASASTSASASTSASESASTSASASASTSASASASTSASASASTSASASASTSASASASTSASASASTSASASASTSASASASTSASESASTSASASASTSASASASTSASASASTSASASASTSASVSASTSASESASTSASASASTSASASASTSASESASTSASASASTSASESASTSASASASTSASASASTSASASASTSASASASTSASASASTSASASASTSASASASTSASASASTSASASASTSASASASTSASASASTSASASASTSASASASISASESASTSASASASTSASASASTSASVSASTSASASASTSASASASISASESASTSASASASTSASASASTSASASASTSASASASISASESASTSASASASTSASASASTSASASASTSASASASTSASASASTSASASASTSASASASTSASASASTSASASASTSASESASTSASASASTSASASASISASESASTSASASASTSASASASTSASASASTSASESASTSTSASASTSASESASTSASASASTSASASASTSASASASTSASASASTSASASTSASESASTSASASASTSASASASTSASASASTSASASASTSASASASTSASASASTSASASASTSASASASTSASESASTSASASASTSASASASTSASASASTSASASASTSASVSASTSASESASTSASASASTSASASASTSASESASTSASASASTSASESASTSASASASTSASASASTSASASASTSASASASTSASASASTSASASASTSASASASTSASASASTSASASASTSASASASTSASASASTSASASASTSASASASISASESASTSASASASTSASASASTSASVSASTSASASASTSASASASISASESASTSASASASTSASASASTSASASASTSASASASISASESASTSASASASTSASASASTSASASASTSASASASTSASASASTSASASASTSASASASTSASASASTSASASASTSASASASTSASASASTSASASASTSASASASTSASASASTSVSNSANHSNSQVGNTSGSTGKSQKELPNTGTESSIGSVLLGVLAAVTGIGLVAKRRKRDEEE

SEQ ID NO: 3663 - DNA, 459 bp, Streptococcus pneumoniae
gtgggaaaagaaagacgtaaacaagggaacttagagcggaaaaagcgagtcgtcaaaaagcgtaagatccctttagaagaattgaaagcctttgtagaggctcatccagacgcttttttacgggaaattgcggcccgttttgattgtgctttgccctccgtatgggcagttttaaagcagattaaggtcattttaaaaaagacgaccagttttagggaacaaaagcctgagaaagtttctgagtttcttgatattttggataacctaaaagatttaccagtcctatatattgacgaaacgggaatcgaccgctacctctatcgtccttatgcaggggctcctagaggggagaaagtctatggcaagattagcggacggcgttttgagcggactaatgaggtggagcaaaaactcaatggtagttttctaatcagatatattgattcacaaattagagaa

SEQ ID NO: 3664 - protein, 153 aa, Streptococcus pneumoniae
  IS630-Spn1, transposase Orf1/Orf2 degenerate
MGKERRKQGNLERKKRVVKKRKIPLEELKAFVEAHPDAFLREIAARFDCALPSVWAVLKQIKVILKKTTSFREQKPEKVSEFLDILDNLKDLPVLYIDETGIDRYLYRPYAGAPRGEKVYGKISGRRFERTNEVEQKLNGSFLIRYIDSQIRE

SEQ ID NO: 3665 - DNA, 459 bp, Streptococcus pneumoniae
atgcgcaatcatcttgtgacgcagagactgcccgttaatggactttcttctatttatgactctaaaaagaaaggagacactatgacctatttggaaaaatggtttgacttcaatcggcgtcagaaagaaattgaaagtctcttggaagagaccattgcccaacagagcgagcaaagtctgaccttgaaagagttctacctgctctactatctggacttggctgaagaaaaatctctacgccagattgacctgccagataagcttcatctgagcccgagcgcagtttctaggatggtggctcgcttggaagctaaaaattgcggtctactcagtcgcatgtgttgccatcaagatagacgctctagttttatctgcctgacaaatgatgggcaaaagacactggcctcgctacaaaagactgtcgaagaaagcttggaagcaggtttggatttcttgatt

SEQ ID NO: 3666 - protein, 153 aa, Streptococcus pneumoniae
  transcriptional regulator, putative; Cellular location: cytoplasm; Similar to strain R6 sequence 15903642 (4.E-74)
MRNHLVTQRLPVNGLSSIYDSKKKGDTMTYLEKWFDFNRRQKEIESLLEETIAQQSEQSLTLKEFYLLYYLDLAEEKSLRQIDLPDKLHLSPSAVSRMVARLEAKNCGLLSRMCCHQDRRSSFICLTNDGQKTLASLQKTVEESLEAGLDFLI

SEQ ID NO: 3667 - DNA, 300 bp, Streptococcus pneumoniae
ttgcgtgcgcaatcatttttcttgacattctcttttataaggagtaaaataaagttagcattaaacaaaggagttttaaacatgattgaaattacctatatagatgccagcaagaacgaaagaactgtgactttcgagtcttatgaagactttgaacgttcgcaacaagcttgccttatcggcgtcgcagactactaccctgtccaaaaattaacttacaagggtcataatttggactaccatgggacttatggagatatcttcttctatctcatgaaacaagatttaagccaatataac

SEQ ID NO: 3668 - protein, 100 aa, Streptococcus pneumoniae
  conserved domain protein; Cellular location: cytoplasm; Similar to strain R6 sequence 15903643 (4.E-55)
MRAQSFFLTFSFIRSKIKLALNKGVLNMIEITYIDASKNERTVTFESYEDFERSQQACLIGVADYYPVQKLTYKGHNLDYHGTYGDIFFYLMKQDLSQYN

SEQ ID NO: 3669 - DNA, 312 bp, Streptococcus pneumoniae
atggcaaaagcaattacagatgcaacattcgaacaagaaacaaaagacggtttggtcttagtagacttctgggcaacttggtgtggtccatgtcgtatgcaaggtccaatcttggacaaattgtctgaagaactttcagaagatgtcttgaaaatcgttaaaatggacgttgatgaaaatccaaacacagctcgtgcttttggaatcatgtctattccaactcttctcttcaaaaaagacggccaagttgtcaaacaagttgcaggtgttcacacagcagaacaaatcaaggccatcattgctgaattgagc

SEQ ID NO: 3670 - protein, 104 aa, Streptococcus pneumoniae
  thioredoxin (trx); Cellular location: cytoplasm; Similar to strain R6 sequence 15903644 (1.E-55)
MAKAITDATFEQETKDGLVLVDFWATWCGPCRMQGPILDKLSEELSEDVLKIVKMDVDENPNTARAFGIMSIPTLLFKKDGQVVKQVAGVHTAEQIKAIIAELS

SEQ ID NO: 3671 - DNA, 462 bp, Streptococcus pneumoniae
atgcaacactatgaaacagtcgaagctgtcacctttgcctacggccaacgtcatcacctcgaaattcaaattactagagaaatcgctaaggaacagggcattcgtcaccatatcctcgatatgtctctgctgggacaaatcactgctcagccagactttgcgacgattcatatttcctacattcctgacaagctctgtgtcgagtcaaaatccctcaaactatatctatttagctaccgaaaccacggagatttccacgaaaactgtatcaacaccatcgggaaagacttggtcaacttgctagaccctcgctatttagaagtctggggaaaattcactccgcgcggtggcatttcaatcgacccctactacaactacggtaagcaaggaactaagtatgagggcttggcagaacaacgcctcttccaacacgacctttatccagagaaaattgacaaccgc

SEQ ID NO: 3672 - protein, 154 aa, Streptococcus pneumoniae
  conserved hypothetical protein; Cellular location: cytoplasm; Similar to strain R6 sequence 15903645 (4.E-90)
MQHYETVEAVTFAYGQRHHLEIQITREIAKEQGIRHHILDMSLLGQITAQPDFATIHISYIPDKLCVESKSLKLYLFSYRNHGDFHENCINTIGKDLVNLLDPRYLEVWGKFTPRGGISIDPYYNYGKQGTKYEGLAEQRLFQHDLYPEKIDNR

SEQ ID NO: 3673 - DNA, 420 bp, Streptococcus pneumoniae
atgaaaatcaaagagcaaactaggaagttagccgcaggttgctcaaagcactgttttgaggttgtggatagaactgacgaagtcagatcaaaacactgttttgaggttgtggatagaactgacgaagtcagatcaaaacactgttttgaggttgtggatagaactgacgaagtcagcttaaaacactgttttgaggttgcagatagaactgacgaagtcagcttaaaacactgttttgaggttgcagatagaactgacgaagtcagcttaaaacactgttttgaggttgcagatagaactgacgaagtcagcttaaaacactgttttgaggttgcagatagaactgacgaagtcagatcaaaacactgttttgaggttgtggatagaactgacgaagtcagtaaccatactacggcaaga

SEQ ID NO: 3674 - protein, 140 aa, Streptococcus pneumoniae
  box element
MKIKEQTRKLAAGCSKHCFEVVDRTDEVRSKHCFEVVDRTDEVRSKHCFEVVDRTDEVSLKHCFEVADRTDEVSLKHCFEVADRTDEVSLKHCFEVADRTDEVSLKHCFEVADRTDEVRSKHCFEVVDRTDEVSNHTTAR

SEQ ID NO: 3675 - DNA, 666 bp, Streptococcus pneumoniae
atgaaaaaatttgttgctgagttaatcggtacgttcatgtttgtattcgtcgggacaggagctgttgtttttggaaatggtcttgatggccttggtcaccttggaatcgcctttgcctttggtttggcaatcgtggtggcagcctactcaatcggaactgtttcaggtgctcacttgaacccggctgtttcgattgctatgtttgtaaacaaacgtttgtcatcttcagaacttgtaaactacatccttggtcaggttgttggagctttcatcgcttctggcgctgtcttcttcctcttggctaactcaggtatgtcaactgctagtcttggtgaaaatgccttggcaaacggtgtcactgtctttggtggtttcttgtttgaagtcatcgcaactttcttgtttgtattggttatcatgactgtgacttcagaaagcaagggcaatggcgcgattgctggtttggtaatcggtttgtcattgatggcgatgattcttgtcggattgaagattactggactttcagtaaacccagctcgtagcttggcaccagctgtcttggtaggcggcgcagcccttcaacaagtttggattttcatccttgcaccaatcgctggtggagttcttgcagcccttgttgcaaaaaatttccttggaacagaagaa

SEQ ID NO: 3676 - protein, 222 aa, Streptococcus pneumoniae
  aquaporin; Cellular location: membrane; Similar to strain R6 sequence 15903646 (e-118)
MKKFVAELIGTFMFVFVGTGAVVFGNGLDGLGHLGIAFAFGLAIVVAAYSIGTVSGAHLNPAVSIAMFVNKRLSSSELVNYILGQVVGAFIASGAVFFLLANSGMSTASLGENALANGVTVFGGFLFEVIATFLFVLVIMTVTSESKGNGAIAGLVIGLSLMAMILVGLKITGLSVNPARSLAPAVLVGGAALQQVWIFILAPIAGGVLAALVAKNFLGTEE

SEQ ID NO: 3677 - DNA, 558 bp, Streptococcus pneumoniae
ttgaccatgtatcaagatttactaagaaaaatagcagaagaaaaaccaaattataaccaggaagaaatccagtggttgtttgatcatttgggaaatccttctccagaaattcgtaatgtccttttaaatcaaggcttgcactatctttcaaaagaaaaggatacaaggggtttctcaagtcagtatggttgggttcacgcttttgcacatggagccgatttactgacagaggtggtttgtcatccagactttcctaaaaacagagttcatgaagtatttgatatacttggccaactatttaaaagaatgtcgattcgctttacagatgatgaggattggcgtttagcaagagtgatctatgaacctattttacaagggaagttggagcaagaacaagtagcttcttggataaaaactgttgattttccgatagaagaaagggaggatttttacaaattttccaactttagatcctgtctggtggaagtctatgtccaacttgaccagagaaatagtttacaagatgacctgaaagaagctatccagtcttttcaatac

SEQ ID NO: 3678 - protein, 186 aa, Streptococcus pneumoniae
  hypothetical protein; Cellular location: cytoplasm; Similar to strain R6 sequence 15903647 (e-108)
MTMYQDLLRKIAEEKPNYNQEEIQWLFDHLGNPSPEIRNVLLNQGLHYLSKEKDTRGFSSQYGWVHAFAHGADLLTEVVCHPDFPKNRVHEVFDILGQLFKRMSIRFTDDEDWRLARVIYEPILQGKLEQEQVASWIKTVDFPIEEREDFYKFSNFRSCLVEVYVQLDQRNSLQDDLKEAIQSFQY

SEQ ID NO: 3679 - DNA, 1794 bp, Streptococcus pneumoniae
atggaacaaaaacaccgttcagaatttccagagaaggaactctgggacttaacagccctataccaagaccgtgaggatttcttgcgtgcaatcgagaaagctcgcgaagacatcaaccagtttagccgtgattacaagggcaatcttcacacttttgaggatttcgagaaggcctttgcggaattggaacagatctacattcagatgagccatattggcaactatggttttatgcctcagacgacggactatagcaatgacgaatttgccaatattgcccaagctgggatggaatttgaaacagatgccagcgtagccttgaccttctttgacgatgccttggtggcagcagatgaggaagtcttggaccgtttgggtaaattgccacatttaacagctgccattcgtcaggctaaaatcaaaaaagcccactacttaggggcagatgtggagaaggccttgacaaatctcggtgaagttttctacagtccgcaggacatttatactaagatgcgagctggggattttgaaatggctgactttgaagcccatggcaagacctacaaaaacagctttgtgacctatgagaatttctaccaaaaccatgaggatgctgaggttcgtgagaaatccttccgttccttctcagagggacttcgtaagcaccaaaatacggctgcagcagcctatctggctcaggtcaagtctgaaaaactcttggctgatatgaagggatacgactctgtctttgactatcttctagctgaacaagaagtggaccgtgtcatgtttgaccgccagattgacctcatcatgaaggactttgcaccagtcgctcagagatacctcaagcatgttgccaaggtaaatggtcttgaaaagatgacctttgcagactggaaattggacttggacagcgccctgaatcctgaagtgactattgacgatgcctatgatttggtcatgaagtcggtagaacctttggggcaagaatattgtcaggaagttgctcgttaccaagaagagcgctgggtggactttgctgctaacagtggcaaggattccggtggttatgcggcggacccatatcgcgtacacccttatgtactcatgagctggacaggccgtttgagcgatgtctataccttgattcatgaaatcgggcattctggtcaattcatcttttcagacaatcatcaaagttacttcaatgcccatatgtcgacctactatgttgaagcaccgtcaaccttcaatgaattgctactcagtgattacttggagaaccagtctaatgacccacgtcaaaaacgcttcgctctggctcatcgcttgacagacacctacttccataactttatcacccacctcttggaagccgccttccagcgtaaggtgtatacattgattgaagaaggggagacctttggagcaagcaagctcaacagcattatgaaggaagttttgacggatttctggggagatgctattgaaattgacgatgatgcaactctgacttggatgcgccaagctcactactatatgggcttgtatagttacacttactcagcaggactagttatctcgactgctggttaccttcatctaaaacattctgaaactggagctgaagactggctcaatctcctcaaatcaggtggtagcaagacaccacttgagtcagccatgattatcggtgctgatatttcaacagacaaaccactccgtgataccatccaattcttgtctgacacagttgaccagattatctcctatagtgctgagttgggagag

SEQ ID NO: 3680 - protein, 598 aa, Streptococcus pneumoniae
  oligoendopeptidase F, putative; Cellular location: cytoplasm; Similar to strain R6 sequence 15903648 (0.E+01)
MEQKHRSEFPEKELWDLTALYQDREDFLRAIEKAREDINQFSRDYKGNLHTFEDFEKAFAELEQIYIQMSHIGNYGFMPQTTDYSNDEFANIAQAGMEFETDASVALTFFDDALVAADEEVLDRLGKLPHLTAAIRQAKIKKAHYLGADVEKALTNLGEVFYSPQDIYTKMRAGDFEMADFEAHGKTYKNSFVTYENFYQNHEDAEVREKSFRSFSEGLRKHQNTAAAAYLAQVKSEKLLADMKGYDSVFDYLLAEQEVDRVMFDRQIDLIMKDFAPVAQRYLKHVAKVNGLEKMTFADWKLDLDSALNPEVTIDDAYDLVMKSVEPLGQEYCQEVARYQEERWVDFAANSGKDSGGYAADPYRVHPYVLMSWTGRLSDVYTLIHEIGHSGQFIFSDNHQSYFNAHMSTYYVEAPSTFNELLLSDYLENQSNDPRQKRFALAHRLTDTYFHNFITHLLEAAFQRKVYTLIEEGETFGASKLNSIMKEVLTDFWGDAIEIDDDATLTWMRQAHYYMGLYSYTYSAGLVISTAGYLHLKHSETGAEDWLNLLKSGGSKTPLESAMIIGADISTDKPLRDTIQFLSDTVDQIISYSAELGE

SEQ ID NO: 3681 - DNA, 741 bp, Streptococcus pneumoniae
atgcagcagtattttgtaaaaggcagtgctatctctcctgtcactatcgaggacaaggaaaccagtaagcatatgtttcaggttatgcgcttgaaagaagaggatgaggttaccttagtctttgatgatggcatcaagcgcttggcgcgcgtgctggatatggaaaatcgtcagtttgagttggtccaagaattaaatgacaatgtggaactaccagtccaagtgaccatcgcatctggatttcccaagggagacaagctggagttcatcgctcaaaaagtaaccgaactgggggctagccaaatctgggcctttcctgcagactggtcagttgccaagtgggatggcaagaaattgggtaaaaaagttgaaaaactagaaaaaattgcccttggagcagccgagcaaagcaagcgtaatattgtaccaagtattaaacttttcgagaaaaaagcagattttctagctcagctggaccagtttgactctatcatagtagcctatgaagaatcagctaaagaaggagaagccgctgcgcttctgcaagcagtcactggtcttgaaacaggagccaaactgctctttatctttggtccagaaggcggtctctcacctgcagaaatcgaaagttttgaagctaaaggagccgttttggcaggcctaggtcctcgtattttgcgagcagaaacagcaccgctttacgctttatcagcccttagtgttttagtagaattagagaaa

SEQ ID NO: 3682 - protein, 247 aa, Streptococcus pneumoniae
  conserved hypothetical protein; Cellular location: cytoplasm; Similar to strain R6 sequence 15903649 (e-136)
MQQYFVKGSAISPVTIEDKETSKHMFQVMRLKEEDEVTLVFDDGIKRLARVLDMENRQFELVQELNDNVELPVQVTIASGFPKGDKLEFIAQKVTELGASQIWAFPADWSVAKWDGKKLGKKVEKLEKIALGAAEQSKRNIVPSIKLFEKKADFLAQLDQFDSIIVAYEESAKEGEAAALLQAVTGLETGAKLLFIFGPEGGLSPAEIESFEAKGAVLAGLGPRILRAETAPLYALSALSVLVELEK

SEQ ID NO: 3683 - DNA, 981 bp, Streptococcus pneumoniae
ttggttttgtgttttacgggcttggtattaataatggaaacatggcaagagttaaaagttacagtgaagcgtgagggagaggagttggtttccaatctcttgattgagctgggagcgcaaggagtcgcaatcgaagacagtatggactatgtgggaaatgtggaccgctttggagagattttcccagaggtggagcagcaagaagaaatcgtagtgacagcctactaccctgacacggtggatgtgacagtggttgaggcggatttgcaggctcgtctagcagaattgacagattttatggatttgggagagttaaaaataggtacgactgccttggctgaggaagactgggcagacaactggaagaaatactatgaacctgctcgtatcactcatgatttgaccatcgttccctcttggacagactatgaggcgactgcgggggaaatgattatcaagctggatcctggcatggcttttggtactggaacccacccaactaccaagatgagcctttttgccttggaacaggttcttcgtggtggcgaaacggtgctagatgtggggactggttcaggggttctctctattgccagctcgcttctgggggctaaagaaattttcgcctatgacctggatgatgtggcggttcgtgtggctcaggaaaatattgagctcaaccctggcatggaaaatatccatgtagcggctggagatttgcttaagggtgtggaaattgaggcagatgtgattgtggctaatatcttggcggatatcctcattcatctaatagacgatgcttatcgcttggtaaaggatgaaggctacctgatcatgagtggcattatcaaggacaagttggacatggtgcgccagtcggctgagtcagctggatttttcctcgaaactcacatggttcaaggggaatggaatacctgtgtctttaagaaaaccaaggatatctctggtgtgattggaggc

SEQ ID NO: 3684 - protein, 327 aa, Streptococcus pneumoniae
  ribosomal protein L11 methyltransferase (prmA); Cellular location: membrane; Similar to strain R6 sequence 15903650 (e-176)
MVLCFTGLVLIMETWQELKVTVKREGEELVSNLLIELGAQGVAIEDSMDYVGNVDRFGEIFPEVEQQEEIVVTAYYPDTVDVTVVEADLQARLAELTDFMDLGELKIGTTALAEEDWADNWKKYYEPARITHDLTIVPSWTDYEATAGEMIIKLDPGMAFGTGTHPTTKMSLFALEQVLRGGETVLDVGTGSGVLSIASSLLGAKEIFAYDLDDVAVRVAQENIELNPGMENIHVAAGDLLKGVEIEADVIVANILADILIHLIDDAYRLVKDEGYLIMSGIIKDKLDMVRQSAESAGFFLETHMVQGEWNTCVFKKTKDISGVIGG

SEQ ID NO: 3685 - DNA, 426 bp, Streptococcus pneumoniae
atggaactagaaatttctgatttcacaggttgcaagattgctttgttttgtggggataagcttttgactatcttacgcgatgataaggcaagtattccctgggccaatatgtgggaactgccaggtggtggccgtgaaggggacgaaagcccttttgaatgcgctcggcgtgaagtttatgaggaactgggaattcatttagatgaagactgtctgctttggagcaagatttatcctagcgtaatttttaaaggcaagaaatcggtctttatggttggtcagctaagacaagaacaatttgacaatatcatcttcggagatgaaggacagggctatcagctgatgaatgttgaggaatttcttagttccagtcaagttgtgcctcagttgcaagagagattaaaagattatttaaaagtaagtgat

SEQ ID NO: 3686 - protein, 142 aa, Streptococcus pneumoniae
  MutT/nudix family protein; Cellular location: cytoplasm; Similar to strain R6 sequence 15903651 (4.E-73)
MELEISDFTGCKIALFCGDKLLTILRDDKASIPWANMWELPGGGREGDESPFECARREVYEELGIHLDEDCLLWSKIYPSVIFKGKKSVFMVGQLRQEQFDNIIFGDEGQGYQLMNVEEFLSSSQVVPQLQERLKDYLKVSD

SEQ ID NO: 3687 - DNA, 1101 bp, Streptococcus pneumoniae
ttggttggaggtgttatgaagaaaattgggacttatttggtttatgtgctagctgttgtctttattatgctagcttttgcttgtggaacaatcgcatttgcagagttggggtattccgcagttttagcctttacttttggttatgccttcgctcttctaagcatgtatttaatctttattcttcatgagctgggtcatgctttttgtggctacttgacaggctatcggctggtggcttttggattaggacattttattttgaccaaaaagtcaggcaggtttcatcttagtagaacagccattctgaaaaatgttggtgctcaatacattggtttaaaagaggatgaaagcgatcaaagaatcatcctgatgctttcaggaggcttgatggttcatctcggcttgatattattggcgatattgtttggatttttgacaagaagctggtattttgcagggacttggatttttcttaatttatctttcttcctaaataacattttgccagtcgacatcaccgatggagcaaaaatttgggaattactacaacaccctgaaaataccaaatacgcctacctggtattgagacattctgcccagaccttgctagctcctcaagaatatgatttgaaagactttgttcaagcagttcctgaggatgcacgagggagttttgcggatggtgtattaggtatgcaaggtgaagtttccattttggaagggaaggaagaagtagctaaacagcagtttcaagcattacttgagaggacaactactccgatgatgcagacagttgcccaactatccctgcttcatatcgccttgttggaaggagattttgagcaagcggagcaatatgctagtattcgacaggtcaaatcgtttctgtctctcaaactgtccaatcttcaagtgatacaagcctggtatcaattaaaggtgaagaaagatgtagatcgaactcgtaaggctctcaagattgctagacagaaaatggatagtagtcgaatgttgagggatgagaaaagatattatgaaaactggttagccgagctggaaaaggaaatgttagaaggaactgaagatggaactagaaatttc

SEQ ID NO: 3688 - protein, 367 aa, Streptococcus pneumoniae
  hypothetical protein; Cellular location: membrane; Similar to strain R6 sequence 15903652 (0.E+01)
MVGGVMKKIGTYLVYVLAVVFIMLAFACGTIAFAELGYSAVLAFTFGYAFALLSMYLIFILHELGHAFCGYLTGYRLVAFGLGHFILTKKSGRFHLSRTAILKNVGAQYIGLKEDESDQRIILMLSGGLMVHLGLILLAILFGFLTRSWYFAGTWIFLNLSFFLNNILPVDITDGAKIWELLQHPENTKYAYLVLRHSAQTLLAPQEYDLKDFVQAVPEDARGSFADGVLGMQGEVSILEGKEEVAKQQFQALLERTTTPMMQTVAQLSLLHIALLEGDFEQAEQYASIRQVKSFLSLKLSNLQVIQAWYQLKVKKDVDRTRKALKIARQKMDSSRMLRDEKRYYENWLAELEKEMLEGTEDGTRNF

SEQ ID NO: 3689 - DNA, 468 bp, Streptococcus pneumoniae
atggcaacatacggatttttagatattttagaggaagagttggacaagaactttccctttgactttgagattagctgggacaaacgcaaccatgcggtagaagtgagttttctattggaagcgcaaaatgctgcaggtgtggagatggtggatgaagacggagaggtttcatcagatgacattctttttgaggaagcggtccttttctacaatcctgccaagtcaacagtcaatgaggaagactatttgactgttattccttacctgcctaaaaaaggattttcccgtgaatttttagcttattttgcgcttttccttaaagatactgctgaggttgggctagatgtcctcatggactttttggaagacccagaagcagaggaatttgtcatggaatggaaccaagaagtctttgaagaaggaaaaattggcttggaaaagggagaattttatccttatccaagatac

SEQ ID NO: 3690 - protein, 156 aa, Streptococcus pneumoniae
  hypothetical protein; Cellular location: cytoplasm; Similar to strain R6 sequence 15903653 (2.E-88)
MATYGFLDILEEELDKNFPFDFEISWDKRNHAVEVSFLLEAQNAAGVEMVDEDGEVSSDDILFEEAVLFYNPAKSTVNEEDYLTVIPYLPKKGFSREFLAYFALFLKDTAEVGLDVLMDFLEDPEAEEFVMEWNQEVFEEGKIGLEKGEFYPYPRY

SEQ ID NO: 3691 - DNA, 450 bp, Streptococcus pneumoniae
atgttagttacgtatccagctttattttattatgacgacacagacggaacagaagcgacttattttgtccatttcccagattttgaatactcagctacacaaggagaggggatttctgaggctttggctatggggtcggagtggctagggataactgttgcagatttgatagagagtgatggagagttacctcagccatcagatatcaatagcttgtctttaattgataatgatccttttaaagatgatgaagatttcgtgtcaacctatgaccttgataaatcttttatttctatggtatctgttgatgtatcagaatacctaggaagtcaggaacccattaaaaagactttgaccataccaaaatgggcagataagttgggacgagaaatggggcttaacttttctcagactttgacagacgctattgcagataagaaagttcaagcc

SEQ ID NO: 3692 - protein, 150 aa, Streptococcus pneumoniae
  conserved hypothetical protein; Cellular location: cytoplasm; Similar to strain R6 sequence 15903654 (2.E-84)
MLVTYPALFYYDDTDGTEATYFVHFPDFEYSATQGEGISEALAMGSEWLGITVADLIESDGELPQPSDINSLSLIDNDPFKDDEDFVSTYDLDKSFISMVSVDVSEYLGSQEPIKKTLTIPKWADKLGREMGLNFSQTLTDAIADKKVQA

SEQ ID NO: 3693 - DNA, 204 bp, Streptococcus pneumoniae
atggtgttgtcaggaggtaaaagcgctatgcctatgacacaaaaagagatggttaaactccttacggcccatggttggataaagactagaggcggtaaaggctcccatattaaaatggaaaagcaaggggaaagacctatcacaatccttcatggtgagctgaataagtacactgaaagagggataagaaagcaagctgggttg

SEQ ID NO: 3694 - protein, 68 aa, Streptococcus pneumoniae
  hypothetical protein; Cellular location: cytoplasm; Similar to strain R6 sequence 15903655 (2.E-35)
MVLSGGKSAMPMTQKEMVKLLTAHGWIKTRGGKGSHIKMEKQGERPITILHGELNKYTERGIRKQAGL

SEQ ID NO: 3695 - DNA, 177 bp, Streptococcus pneumoniae
ttgaatttgattttcgaagagtatcagtttgtaaaaattggagataaaaaatatagagtacgcagtgttcctatgattcattcaactccgcctcaatctgtcttagatcgagatacttttacaattgactatacagatgatgaattgctcgataaagaagcagtttttactactcat

SEQ ID NO: 3696 - protein, 59 aa, Streptococcus pneumoniae
  box element
MNLIFEEYQFVKIGDKKYRVRSVPMIHSTPPQSVLDRDTFTIDYTDDELLDKEAVFTTH

SEQ ID NO: 3697 - DNA, 102 bp, Streptococcus pneumoniae
atgaaaaatagaataattgatgtttttgaagtagtaaatcgcctccttgtaataactgttgaaaatcctgatttcgaagacttgagagttaatcatactcaa

SEQ ID NO: 3698 - protein, 34 aa, Streptococcus pneumoniae
  hypothetical protein; Cellular location: cytoplasm
MKNRIIDVFEVVNRLLVITVENPDFEDLRVNHTQ

SEQ ID NO: 3699 - DNA, 219 bp, Streptococcus pneumoniae
atggaaatgatggaactaccaagtcaggaaattttgatttttacaaaacaaattcgtcattggattcttagtgatcaagttatttcagggaaaagaaaacttttcttccgggaagatactccaaaagagattttagatttgtacgaaaacattaaatctaaacttgattttgcttaccaagaagttcattctaataatgggttgaaaaaatatgaaaaa

SEQ ID NO: 3700 - protein, 73 aa, Streptococcus pneumoniae
  hypothetical protein; Cellular location: cytoplasm; Similar to strain R6 sequence 15903657 (2.E-34)
MEMMELPSQEILIFTKQIRHWILSDQVISGKRKLFFREDTPKEILDLYENIKSKLDFAYQEVHSNNGLKKYEK

SEQ ID NO: 3701 - DNA, 1269 bp, Streptococcus pneumoniae
atgccagacaatctcgcgcttcgcatgcgccctaaaaccatcgaccaggtcatcggtcaggagcatctggtcggacctggaaaaatcatccgccgcatggtggaagccaaccgcttgtcctccatgattctatatggccctcctggaatcggcaaaaccagtattgcctctgccatcgctggaacgaccaagtatgcctttcgaactttcaatgcgacagttgatagtaaaaagcgactgcaagaaatctcggaagaagctaaattttctggtggtctcgtcctattactagacgaaattcatcgactagataagaccaagcaagacttcctcttgcctctcttggaaagtggactggtcatcatgattggagcaacgactgaaaatcctttcttctctgtcactcctgccattcgtagccgagttcaaattttcgagttggaacctctgtctaaccaagacgtcaaagaggccctgcagatagctctaagtaaccctgaacgtggttttgattttccaatagaactagatgaggatgcgctggatttcatcgcaacctctacaaacggagaccttcgctctgcctttaactcactggacttagctgttctctctacccctgagaatgacgagggcattcgccacatcaccttagacatcatggaaaatagtcttcagagaagctacatcactatggacaaggatggagacggtcactatgatgttctatctgccctgcaaaagtctattcgtggctcagatgtggatgccagtctccactatactgcccgcttgattgaggctggggatctgcctagtctcgctcgtcgcttgactgttatcgcctatgaagatatcggcttagccaatcctgaggcccagattcataccgtgactgctctggatgctgcccagaagattgggttcccagaagcccgcattctcatcgccaatgtcgtgattgatttggccctttctccaaaatccaactcagcctatgtagctatggataaggcacttgctgacctcaaaacatcagggcacttgcctattccgcgacacctgcgtgatgggcactacagtggaagcaaggaactggggaatgcccaagactatctctatccacacaactatcctggaaattgggtcaagcaagactatctgccagaaaaaattcgtaatcatcactatttccaagcagaagatactggtaaatatgaacgggctttggctcaaagaaaggaagctatcgaccgtttgcgaaaaatc

SEQ ID NO: 3702 - protein, 423 aa, Streptococcus pneumoniae
  ATPase, AAA family; Cellular location: membrane; Similar to strain R6 sequence 15903658 (0.E+01)
MPDNLALRMRPKTIDQVIGQEHLVGPGKIIRRMVEANRLSSMILYGPPGIGKTSIASAIAGTTKYAFRTFNATVDSKKRLQEISEEAKFSGGLVLLLDEIHRLDKTKQDFLLPLLESGLVIMIGATTENPFFSVTPAIRSRVQIFELEPLSNQDVKEALQIALSNPERGFDFPIELDEDALDFIATSTNGDLRSAFNSLDLAVLSTPENDEGIRHITLDIMENSLQRSYITMDKDGDGHYDVLSALQKSIRGSDVDASLHYTARLIEAGDLPSLARRLTVIAYEDIGLANPEAQIHTVTALDAAQKIGFPEARILIANVVIDLALSPKSNSAYVAMDKALADLKTSGHLPIPRHLRDGHYSGSKELGNAQDYLYPHNYPGNWVKQDYLPEKIRNHHYFQAEDTGKYERALAQRKEAIDRLRKI

SEQ ID NO: 3703 - DNA, 114 bp, Streptococcus pneumoniae
ttgacaaagagccaaattttaggacataaagatatctccatgttgattgacgtttatgggcataccttggaggaaaaaattagtgaggagtttatggctgtgaaaagtttgttg

SEQ ID NO: 3704 - protein, 38 aa, Streptococcus pneumoniae
  integrase-related protein; Cellular location: cytoplasm
MTKSQILGHKDISMLIDVYGHTLEEKISEEFMAVKSLL

SEQ ID NO: 3705 - DNA, 1254 bp, Streptococcus pneumoniae
atggaacaattacattttatcacaaaattactagacattaaagaccctaatatccagattttagacatcatcaataaggatacacacaaggaaatcatcgccaaactggactacgacgccccatcttgccctgagtgcggaaaccaattgaagaaatatgactttcaaaaaccttctaaaattccttatcttgaaacgactggtatgcctactagaattctccttagaaagcgtcgattcaagtgctatcactgttcaaaaatgatggtcgctgaaacttctatcgtcaagaagaatcaccaaatccctcgtatcatcaaccaaaaaattgctcaaaagttaattgaaaagatttctatgactgatattgcccatcagctttccatctcaacttcaactgttattcgtaagctcaatgactttcactttaaacatgatttttcttgtcttcctgagattatgtcttgggatgagtatgcttttacaaagggaaagatgagcttcattgcgcaagattttaacaatctcaatatcatcactgttcttgagggaagaacacaagctatcattcgaaatcactttcttaaatatgatagagccgtccgatgtcgcgtcaaaattattactatggatatgtttagtccttactatgacttagctagacaacttttcccatgtgctaaaatcgtgttggatcgctttcacattgtacaacatcttagccgtgctatgagtcgtgtgcgtgttcaaatcatgaatcaattggatcgaaagtctcatgaatacaaggctatcaagcgctactggaagctcatacaacaggatagtcgtaaactcagcgataaacatttttatcgccctacttttcgtatgcatttaaccaataaagagattttaaacaagcttttgagctattcacaagacttgaaacatcactatcagctctatcaactcttgctgtttcactttcagaataaggaaccggagaaatttttcggactcattgaggacaatctaaagcaggttcctcctctttttcagactgtctttaaaacctttctaaaggacaaagagaaaatcgtcaacgcccttcaactacactattctaacgccaaattggaagcgaccaataatctcatcaaacttatcaagcgcaatgcctttggttttcggaactttgaaaacttcaaaaaacggatttttatcgctctgaatatcaaaaaagaaaggacaaaatttgtcctttctcgagct

SEQ ID NO: 3706 - protein, 418 aa, Streptococcus pneumoniae
  IS1167, transposase; Cellular location: cytoplasm; Similar to strain R6 sequence 15903763 (0.E+01)
MEQLHFITKLLDIKDPNIQILDIINKDTHKEIIAKLDYDAPSCPECGNQLKKYDFQKPSKIPYLETTGMPTRILLRKRRFKCYHCSKMMVAETSIVKKNHQIPRIINQKIAQKLIEKISMTDIAHQLSISTSTVIRKLNDFHFKHDFSCLPEIMSWDEYAFTKGKMSFIAQDFNNLNIITVLEGRTQAIIRNHFLKYDRAVRCRVKIITMDMFSPYYDLARQLFPCAKIVLDRFHIVQHLSRAMSRVRVQIMNQLDRKSHEYKAIKRYWKLIQQDSRKLSDKHFYRPTFRMHLTNKEILNKLLSYSQDLKHHYQLYQLLLFHFQNKEPEKFFGLIEDNLKQVPPLFQTVFKTFLKDKEKIVNALQLHYSNAKLEATNNLIKLIKRNAFGFRNFENFKKRIFIALNIKKERTKFVLSRA

SEQ ID NO: 3707 - DNA, 273 bp, Streptococcus pneumoniae
ttgctagaaaatataagccatatcgaaattgaattatttaaatttatactcttcgaaaatcaaattcaaaccaagtcagcttcgccttgctgtactcaagtgctgtctgtggctagcttcttagtttgctttttgattttcattgagtattactcttatggtagttatttatggcataataatattgatttgggagttatagcgaaaattttaggttctataatatttgtagtgggtaaatccactatagatattatggagcctattttattg

SEQ ID NO: 3708 - protein, 91 aa, Streptococcus pneumoniae
  box element, fusion
MLENISHIEIELFKFILFENQIQTKSASPCCTQVLSVASFLVCFLIFIEYYSYGSYLWHNNIDLGVIAKILGSIIFVVGKSTIDIMEPILL

SEQ ID NO: 3709 - DNA, 573 bp, Streptococcus pneumoniae
atgaaacaaaaacaaccgattgtttctagaacgaaacaacatacatttgaagagcttattcaagaccaaaagttagaaagattggctaagttgtcgcccgatttggttggaaggtatggttttactgctagctgtgcgtcttcatttgcgaacttgattaaagaagcgtatgggggtaaaaatctaaacgtagtttatgcgagtcggatgttggctctctggaatattgcttgcagttgttatcataaggctgatgggtattctttagcagatgcgctttttagtgataaaaaaatttgtctagattcttactattaccacaagaatacctctaataccataactagtgatgtgataaaagatgtttacgataattataataattatatggttttaactcgagaagcgacacctgaatacatttatgttgtacaaactgaaatgccaaaagattcagatttatatttttatattagagaagttctgggattatcgtttagtaccatgcattatgcatttttagtcaaggttcttgcaggagcgcttgctagaaaatataagccatatcgaaat

SEQ ID NO: 3710 - protein, 191 aa, Streptococcus pneumoniae
  hypothetical protein; Cellular location: cytoplasm
MKQKQPIVSRTKQHTFEELIQDQKLERLAKLSPDLVGRYGFTASCASSFANLIKEAYGGKNLNVVYASRMLALWNIACSCYHKADGYSLADALFSDKKICLDSYYYHKNTSNTITSDVIKDVYDNYNNYMVLTREATPEYIYVVQTEMPKDSDLYFYIREVLGLSFSTMHYAFLVKVLAGALARKYKPYRN

SEQ ID NO: 3711 - DNA, 423 bp, Streptococcus pneumoniae
ttggaggaactgatgaagaacaatgaaagattaggtattaaattaagtagagatagcgttttaggattgagggaagttagaaggctttatttaggcagttcagatatcccagtttctgatggctatgtgattgaagttgcttataaccagatatcacatgagattgatattattgattgggtagagttgaacaagtcaaaaattaagataagtgaaattagtgaaagcgtggatatagatgccactagcttgagaacaactttgactttagacacattagtatatgaaggtatgagagatatacagttaaagttgagagagcttacaaaggggagagtattcttttcatttgtagtgaagttagttttgtttgcttctattttaaagaaaaaagatttactagaaaaatttcaagaaaagtgt

SEQ ID NO: 3712 - protein, 141 aa, Streptococcus pneumoniae
  hypothetical protein; Cellular location: membrane
MEELMKNNERLGIKLSRDSVLGLREVRRLYLGSSDIPVSDGYVIEVAYNQISHEIDIIDWVELNKSKIKISEISESVDIDATSLRTTLTLDTLVYEGMRDIQLKLRELTKGRVFFSFVVKLVLFASILKKKDLLEKFQEKC

SEQ ID NO: 3713 - DNA, 1323 bp, Streptococcus pneumoniae
ttgattatgggagataagaaatacacagtagaaaaagccaatcgttttatagcagaaaataaacatctcgttaatactcaatataagcctgaagaacatttttcagctgagattggttggatcaatgatccaaatggatttgtctattttcgtggagaataccatctcttttatcaattctatccatatgatagtgtttgggggcctatgcactggggacatgctaaaagtaaggacttggtgacttgggagcacttgccagtggcacttgctcctgaccaagattatgaccgaaatggttgtttctcaggctctgccattgtcaaggatgatcgcctctggctcatgtacactggacatatcgaagaagaaaccggtgtccgccaagtgcaaaatatggtattttcagatgacgggattcactttgaaaagatttcccaaaatccagttgcaactggatcagacttaccagatgagttgattgctgctgatttccgtgatccaaaactctttgaaaaagatggacgctattactccgtagtagctgccaaacacaaggataatgtgggctgtatcgttctactagggtccgataacctagtagaatggcagttcgaatccatctttttaaaagggggagaacaccaaggttttatgtgggaatgcccagattacttcgagttagatgggaaagattgccttattatgtcacccatgcgttatcagcgtgagggagactcatatcataacatcaactcatcgcttttgttcacgggtaaggtagattggagagaaaaacgttttatcccagaatcagttcaagaaattgatcatggccaagacttctatgcgcctcaaacattgttggacgatcaaaatcgtcgtatcctgattgcttggatgcagacatgggggcgtacccttccaacccatgaccaagaacacaagtgggcatgtgccatgactctacctagaattctaagattggaagatggcaaactaagacaattccctgttaaaaaaggccaatatcaaatccaaatagataaagattgtcattaccacttaggaaatgatatagattatcttgaatttggttatgacagtaatgcgcagcaagtttacattgatcgtagccatcttattcaaaaaattctaggtgaagaagaacaggacactagtcgacggtatgtagatattgaagctaaagaattggaagttgttctagataaaaattccatcgagatttttgtcaatcaaggtgaagcaagcttgactgcaacttattacttaacggtgccagctgagctatcacgaattgat

SEQ ID NO: 3714 - protein, 441 aa, Streptococcus pneumoniae
  sucrose-6-phosphate hydrolase, putative; Cellular location: cytoplasm; Similar to strain R6 sequence 15903659 (0.E+01)
MIMGDKKYTVEKANRFIAENKHLVNTQYKPEEHFSAEIGWINDPNGFVYFRGEYHLFYQFYPYDSVWGPMHWGHAKSKDLVTWEHLPVALAPDQDYDRNGCFSGSAIVKDDRLWLMYTGHIEEETGVRQVQNMVFSDDGIHFEKISQNPVATGSDLPDELIAADFRDPKLFEKDGRYYSVVAAKHKDNVGCIVLLGSDNLVEWQFESIFLKGGEHQGFMWECPDYFELDGKDCLIMSPMRYQREGDSYHNINSSLLFTGKVDWREKRFIPESVQEIDHGQDFYAPQTLLDDQNRRILIAWMQTWGRTLPTHDQEHKWACAMTLPRILRLEDGKLRQFPVKKGQYQIQIDKDCHYHLGNDIDYLEFGYDSNAQQVYIDRSHLIQKILGEEEQDTSRRYVDIEAKELEVVLDKNSIEIFVNQGEASLTATYYLTVPAELSRID

SEQ ID NO: 3715 - DNA, 1614 bp, Streptococcus pneumoniae
atgaaattcaaaacattctcaaaatcagcagttttgttgacagctagtttagcagtacttgcagcctgtggctcaaaaaatacagcttcaagtccagattataagttggaaggtgtaacattcccgcttcaagaaaagaaaacattgaagtttatgacagccagttcaccgttatctcctaaagacccaaatgaaaagttaattttgcaacgtttggagaaggaaactggcgttcatattgactggaccaactaccaatccgactttgcagaaaaacgtaacttggatatttctagtggtgatttaccagatgctatccacaacgacggagcttcagatgtggacttgatgaactgggctaaaaaaggtgttattattccagttgaagatttgattgataaatacatgccaaatcttaagaaaattttggatgagaaaccagagtacaaggccttgatgacagcacctgatgggcacatttactcatttccatggattgaagagcttggagatggtaaagagtctattcacagtgtcaacgatatggcttggattaacaaagattggcttaagaaacttggtcttgaaatgccaaaaactactgatgatttgattaaagtcctagaagctttcaaaaacggggatccaaatggaaatggagaggctgatgaaattccattttcatttattagtggtaacggaaacgaagattttaaattcctatttgctgcatttggtataggggataacgatgatcatttagtagtaggaaatgatggcaaagttgacttcacagcagataacgataactataaagaaggtgtcaaatttatccgtcaattgcaagaaaaaggcctgattgataaagaagctttcgaacatgattggaatagttacattgctaaaggtcatgatcagaaatttggtgtttactttacatgggataagaataatgttactggaagtaacgaaagttatgatgttttaccagtacttgctggaccaagtggtcaaaaacacgtagctcgtacaaacggtatgggatttgcacgtgacaagatggttattaccagtgtaaacaaaaacctagaattgacagctaaatggattgatgcacaatacgctccactccaatctgtgcaaaataactggggaacttacggagatgacaaacaacaaaacatctttgaattggatcaagcgtcaaatagtctaaaacacttaccactaaacggaactgcaccagcagaacttcgtcaaaagactgaagtaggaggaccactagctatcctagattcatactatggtaaagtaacaaccatgcctgatgatgccaaatggcgtttggatcttatcaaagaatattatgttccttacatgagcaatgtcaataactatccaagagtctttatgacacaggaagatttggacaagattgcccatatcgaagcagatatgaatgactatatctaccgtaaacgtgctgaatggattgtaaatggcaatattgatactgagtgggatgattacaagaaagaacttgaaaaatacggactttctgattacctcgctattaaacaaaaatactacgaccaataccaagcaaacaaaaac

SEQ ID NO: 3716 - protein, 538 aa, Streptococcus pneumoniae
  ABC transporter, substrate-binding protein; Cellular location: lipoprotein; Similar to strain R6 sequence 15903577 (8.E-07)
MKFKTFSKSAVLLTASLAVLAACGSKNTASSPDYKLEGVTFPLQEKKTLKFMTASSPLSPKDPNEKLILQRLEKETGVHIDWTNYQSDFAEKRNLDISSGDLPDAIHNDGASDVDLMNWAKKGVIIPVEDLIDKYMPNLKKILDEKPEYKALMTAPDGHIYSFPWIEELGDGKESIHSVNDMAWINKDWLKKLGLEMPKTTDDLIKVLEAFKNGDPNGNGEADEIPFSFISGNGNEDFKFLFAAFGIGDNDDHLVVGNDGKVDFTADNDNYKEGVKFIRQLQEKGLIDKEAFEHDWNSYIAKGHDQKFGVYFTWDKNNVTGSNESYDVLPVLAGPSGQKHVARTNGMGFARDKMVITSVNKNLELTAKWIDAQYAPLQSVQNNWGTYGDDKQQNIFELDQASNSLKHLPLNGTAPAELRQKTEVGGPLAILDSYYGKVTTMPDDAKWRLDLIKEYYVPYMSNVNNYPRVFMTQEDLDKIAHIEADMNDYIYRKRAEWIVNGNIDTEWDDYKKELEKYGLSDYLAIKQKYYDQYQANKN

SEQ ID NO: 3717 - DNA, 915 bp, Streptococcus pneumoniae
atggtgaaggaatttaaggaggaaagtatgaaaaattcgattatggatacaaaatttgatagacgtatcttactcttaaataaaatcattattgtctttatcgttttgatgactttgcttcctttactttatatcgtcgtagcatcctttatggatcctaaggttctggttagtagagggattagctttaatccagccgattggactgtagaaggttaccagcgtgtattcagtgaccaatctattctaagaggttttatcaattctctactatactcttttggatttgcagctttaacagtcttgctatctgtgtttacagcttatcctctttctaagaaagacttggttggacgtcgttggattaactacttcttgattgtaactatgttctttggtggtggtttagtcccaacttacttgctcgtaaaagaattgggaatgctcaatactccatgggctatcattgttccaggtgctgttaacgtttggaatattattcttgctagggcctatttccaaggattgcctgaagaattagttgaagctgctgtcattgatggtgcaaatgatttacagattttcttcaaaatcatgcttcctcttgcaaaaccaattatgtttgttctcttcctttatgcttttgtaggacagtggaactcatactttgatgcaatgatttatatcaaggatccaaacttggaaccattgcaacttgtacttcgtaaaattctcattcagagccaaccaggtcaagacatgattggagcacaagcggctatgaatgaaatgaaacgtttagctgaattgattaaatacgcaactattgtcatttccagcttgccattgattgttatgtatccattcttccaaaaatactttgataaaggaattatggctggttcacttaaagga

SEQ ID NO: 3718 - protein, 305 aa, Streptococcus pneumoniae
  ABC transporter, permease protein; Cellular location: membrane; Similar to strain R6 sequence 15902126 (5.E-46)
MVKEFKEESMKNSIMDTKFDRRILLLNKIIIVFIVLMTLLPLLYIVVASFMDPKVLVSRGISFNPADWTVEGYQRVFSDQSILRGFINSLLYSFGFAALTVLLSVFTAYPLSKKDLVGRRWINYFLIVTMFFGGGLVPTYLLVKELGMLNTPWAIIVPGAVNVWNIILARAYFQGLPEELVEAAVIDGANDLQIFFKIMLPLAKPIMFVLFLYAFVGQWNSYFDAMIYIKDPNLEPLQLVLRKILIQSQPGQDMIGAQAAMNEMKRLAELIKYATIVISSLPLIVMYPFFQKYFDKGIMAGSLKG

SEQ ID NO: 3719 - DNA, 915 bp, Streptococcus pneumoniae
atgaatagcaaagcgaagcaagtttctctttgggaaagaatcaagaaacaaaaactcttgttattgatgactgtccccggtttagttttaacctttatctttaaatacatccctatgtatggggttttaatcgcatttaaagattacaatcctttaaaaggaattttagggagtgattggattggtttttctgagtttacaaaattcatatcctctcccaactttggtatcttgttagccaacacattaaaattaagtatctatggtttattgcttggctttttaccaccaatcattctcgcgattatgctcaatcaactcttgagtgaaaaagtcaaaaaacgaattcagctcattttatacgcaccaaactttatctcagtcgttgttattgtcggtatgattttcctcttcttttcagtgggaggaccaatcaacaattttctttctatgtttggaatgaaggctgacttcttgacaaatccagacttctttagacctttatacatctttagtggtatctggcaaggaatgggctgggcttcaacgctctacacggcaacattggtaaatgtagatccagccttagtagaagcagcccgactggatggagccaatatcttccaacgaatctggcacattgatattccagctcttaagcctattatggttatccaatttgttttagctgcaggtggaattatgaatgtcggatatgaaaaagcattcttgatgcagacatcgttaaatttgccaacttctgaaattatctcgacatatgtctataaagttggtcttgtatcaggagactattcttactcaacagcggttggtttgtttaatgcagtgattaacgtagtattgcttgttgcagttaaccaaatcgttaaacgcatgaataatggtgaaggaatt

SEQ ID NO: 3720 - protein, 305 aa, Streptococcus pneumoniae
  ABC transporter, permease protein; Cellular location: membrane; Similar to strain R6 sequence 15902125 (1.E-39)
MNSKAKQVSLWERIKKQKLLLLMTVPGLVLTFIFKYIPMYGVLIAFKDYNPLKGILGSDWIGFSEFTKFISSPNFGILLANTLKLSIYGLLLGFLPPIILAIMLNQLLSEKVKKRIQLILYAPNFISVVVIVGMIFLFFSVGGPINNFLSMFGMKADFLTNPDFFRPLYIFSGIWQGMGWASTLYTATLVNVDPALVEAARLDGANIFQRIWHIDIPALKPIMVIQFVLAAGGIMNVGYEKAFLMQTSLNLPTSEIISTYVYKVGLVSGDYSYSTAVGLFNAVINVVLLVAVNQIVKRMNNGEGI

SEQ ID NO: 3721 - DNA, 1017 bp, Streptococcus pneumoniae
ttgaaaggaggtgataatatggtagaacaaagaaaatcaattaccatgaaagatgttgctttagaagcaggagttagtgttggaactgtttcacgtgtaattaataaagaaaaaggcattaaagaagtaactttgaaaaaagtggaacaagcgattaaaactttgaattacattccagattactacgctagaggaatgaaaaaaaatcgaacagaaacgattgcaatcattgtaccaagtatctggcatcccttcttttcagaatttgctatgcatgtggaaaatgaagtctataagagaaataacaaattactcttatgttctatcaatggtacaaatagagagcaagactatctggagatgttgcgtcataataaagttgatggagtggttgccattacctatagtccaattgaacattacttgacgtcaggaattccctttgttagtattgaccgcacatactcagatattgccattccttgtgtttcatcagataatgatgcaggtggaagagaagcagctaaacaattaattagtaaaggatgtcagcatttagcctttgtgggcggacataatacaaccattaatgaaaccaaacgtcgtagaatttcatttgaaaagtatgtccaagagcataaaatacctcttagtatttttgatttggatgagacagttactgactattatggaaagctagagagtttcttggaagaaaattcttctatagatggaatttttacaatcaacgattttacagctttggatgtgattgaaatactagaaaaaaatggcaaacgtattcctcatgatgtccaaattattggatacgatggaattaaaatggctggagatagagattatctactttcaactattgaacaaccattggaagaaatggcaaaagaagcggttcgtattttgtttgatataattgatggaaagactgttaatttgcagacaatcctaccagtaaaatttgttgaaggaaaaacaacaaaaaatgaaaataagtct

SEQ ID NO: 3722 - protein, 339 aa, Streptococcus pneumoniae
  sugar-binding transcriptional regulator, LacI family; Cellular location: cytoplasm; Similar to strain R6 sequence 15903663 (1.E-93)
MKGGDNMVEQRKSITMKDVALEAGVSVGTVSRVINKEKGIKEVTLKKVEQAIKTLNYIPDYYARGMKKNRTETIAIIVPSIWHPFFSEFAMHVENEVYKRNNKLLLCSINGTNREQDYLEMLRHNKVDGVVAITYSPIEHYLTSGIPFVSIDRTYSDIAIPCVSSDNDAGGREAAKQLISKGCQHLAFVGGHNTTINETKRRRISFEKYVQEHKIPLSIFDLDETVTDYYGKLESFLEENSSIDGIFTINDFTALDVIEILEKNGKRIPHDVQIIGYDGIKMAGDRDYLLSTIEQPLEEMAKEAVRILFDIIDGKTVNLQTILPVKFVEGKTTKNENKS

SEQ ID NO: 3723 - DNA, 1536 bp, Streptococcus pneumoniae
ttgtggtataattgcaagaggtttaatccgataatttataaagagagaaagatattcatgagagatttattatctaaaaaaagtcataggcaattagaattattagaattattatttgaacataaacgttggtttcatcgttctgaactagcagagttattaaattgtacagaacgtgcagtcaaagatgatctatcccatgttaaatctgcttttcctgacttgatttttcattcttctactaatggtatacgcattattaataccgatgatagtgatattgaaatggtttaccatcatttctttaaacattcaactcatttttcgattttagaattcatcttctttaatgaaggttgtcaagctgagagtatttgtaaagaattttatatcagttcatcttcgctctatcgtattattagccaaatcaataaagtgattaaaaggcaatttcaatttgaagttagtctgacccctgttcaaatcattggaaatgagagagacattcgttacttttttgcacaatatttttcagaaaaatattatttcctagaatggccatttgaaaatttttcatcagagccactatctcaattgttagaattggtttataaggaaacaagctttccaatgaatttgtcaacgcatagaatgctaaagttgctcctagttacgaacctatatagaataaagtttggtcattttatggaagtagataaagattcttttaacgaccaaagtttggattttttaatgcaggcagaaggaatagaaggtgttgctcagagttttgaatcagaatacaatatctctttagatgaagaagttgtttgccaattatttgtgtcttactttcaaaaaatgtttttcatagatgaaagtctctttatgaaatgcgtaaaaaaggatagttatgttgaaaaatcttaccatctattgagtgattttattgatcagatttcagtcaagtatcagattgaaatggagaataaggataatctgatttggcatctgcataataccgcacatctgtatcgtcaagagttgtttactgagtttattttatttgatcaaaaagggaatacaatcaggaactttcaaaatatttttccaaaatttgtttcagatataaaaaaagagctttctcactatttagagactcttgaggtttgttctagttcaatgatggtaaatcatctatcttataccttcatcactcataccaaacatttggtgattaatttgctacaaaatcagcctaaactaaaggttttagttatgagtaattttgatcagtatcatgcaaaattcgttgcagagacactttcttattattgtagcaataattttgaactggaagtttggactgaattagaattatcaaaggaatctttagaagattcaccttatgatatcattatttctaattttattattcctcctattgaaaataagagactcatctattcaaataatataaacacggtctcactcatatacttgttaaatgccatgatgtttattcgattagatgag

SEQ ID NO: 3724 - protein, 512 aa, Streptococcus pneumoniae
  transcriptional activator, putative; Cellular location: cytoplasm; Feature of note: similar to Mga; Similar to strain R6 sequence 15903664 (0.E+01)
MWYNCKRFNPIIYKERKIFMRDLLSKKSHRQLELLELLFEHKRWFHRSELAELLNCTERAVKDDLSHVKSAFPDLIFHSSTNGIRIINTDDSDIEMVYHHFFKHSTHFSILEFIFFNEGCQAESICKEFYISSSSLYRIISQINKVIKRQFQFEVSLTPVQIIGNERDIRYFFAQYFSEKYYFLEWPFENFSSEPLSQLLELVYKETSFPMNLSTHRMLKLLLVTNLYRIKFGHFMEVDKDSFNDQSLDFLMQAEGIEGVAQSFESEYNISLDEEVVCQLFVSYFQKMFFIDESLFMKCVKKDSYVEKSYHLLSDFIDQISVKYQIEMENKDNLIWHLHNTAHLYRQELFTEFILFDQKGNTIRNFQNIFPKFVSDIKKELSHYLETLEVCSSSMMVNHLSYTFITHTKHLVINLLQNQPKLKVLVMSNFDQYHAKFVAETLSYYCSNNFELEVWTELELSKESLEDSPYDIIISNFIIPPIENKRLIYSNNINTVSLIYLLNAMMFIRLDE

SEQ ID NO: 3725 - DNA, 162 bp, Streptococcus pneumoniae
atgggaatcatcgcaaatgtattcgctggtttagtcggggcatatgcaggacaatctcttttaggtagttggggtccagcaatcgctggaatggctttgctcccatctattgtaggtgcagcgattgtgattactgtagtgtcattctttacaggtagaaag

SEQ ID NO: 3726 - protein, 54 aa, Streptococcus pneumoniae
  conserved hypothetical protein; Cellular location: outside; Similar to strain R6 sequence 15902299 (2.E-09)
MGIIANVFAGLVGAYAGQSLLGSWGPAIAGMALLPSIVGAAIVITVVSFFTGRK

SEQ ID NO: 3727 - DNA, 570 bp, Streptococcus pneumoniae
ttgtatatgtcaaaagcaaagaaaatatgtttcattattttctgtattttaatcttgacaattttccttcctgttttgatagattatcatcaagttagtgatctaggtattcatctacttagctggagacagaactccgtagttgaattctatcttgctagatatgtcttttgggggacagtggttctatcaactttagttttattatccattttagttgtgatgttttatcctaaacgttacttggaaatccaacttgaaactaaaaacgatacattaaaattaaagaattcggcaatcgaaggttttgttagaagtttggtgagtgatcatagattgatcaagaacccaactgttcatgtaaatttacgaaaaaataaatgtttcgttcatgtagaaggtaaaattcttccttcagacaacatcgctgacagatgccaaataattcaaaatgaaataactaatggattgaagcagttttttggtattgagcgtcaagtaaaacttgaagttgcagtaaaaaattaccaaccaaaacctcaaaacaaaaagactgttagtcgtgtgaag

SEQ ID NO: 3728 - protein, 190 aa, Streptococcus pneumoniae
  hypothetical protein; Cellular location: membrane; Similar to strain R6 sequence 15903665 (e-106)
MYMSKAKKICFIIFCILILTIFLPVLIDYHQVSDLGIHLLSWRQNSVVEFYLARYVFWGTVVLSTLVLLSILVVMFYPKRYLEIQLETKNDTLKLKNSAIEGFVRSLVSDHRLIKNPTVHVNLRKNKCFVHVEGKILPSDNIADRCQIIQNEITNGLKQFFGIERQVKLEVAVKNYQPKPQNKKTVSRVK

SEQ ID NO: 3729 - DNA, 168 bp, Streptococcus pneumoniae
atggaatggcttaaacaatatcgatatccaattatcgctggtctcataggcgtatttctggcttgtttgattgtctcctttggcttcttcaaaacaatatttgtattgattttaggagcactgggagttgcagctggattatatatcgaaaaaaactatatagataaa

SEQ ID NO: 3730 - protein, 56 aa, Streptococcus pneumoniae
  conserved hypothetical protein; Cellular location: membrane; Similar to strain R6 sequence 15903666 (3.E-28)
MEWLKQYRYPIIAGLIGVFLACLIVSFGFFKTIFVLILGALGVAAGLYIEKNYIDK

SEQ ID NO: 3731 - DNA, 606 bp, Streptococcus pneumoniae
atgtcaaacgaaaaaaacacaaacactaacgtagaaaagaaagatgctactgttgtagctcacgaaatcaaaggggaacttacttacgaagataaagttatccaaaaaatcattggtctttcactagaaaacgtttcaggtcttttgggaatcgatggtggtttcttctcaaatcttaaagaaaaaatcgttaacagcgatgacgtaacaagtggtgttaacgtagaagttggtaaaacacaagttgcagttgacttaaacgttattgttgagtaccaaaaaaatgttccagctttatattcagaaatcagagaaatcgtatcttcagaagttgctaaaatgactgacttggaaattgttgaaatcaacgtaaacgttgtcgacatcaaaactaaagaacagcatgaagcagactcagtaagccttcaagatcgcgtatctgacgttgctgaatcaacaggagaattcacttcagaacaattcgaaaaagctaaatctggtcttggatctggtttctcaactgttcaagaaaaagttagcgaaggtgtagaagctgttaaaggtgcagcaaatggtgtagtatctcacgaaaacactcgtgtaaac

SEQ ID NO: 3732 - protein, 202 aa, Streptococcus pneumoniae
  general stress protein 24, putative; Cellular location: cytoplasm; Similar to strain R6 sequence 15903667 (e-109)
MSNEKNTNTNVEKKDATVVAHEIKGELTYEDKVIQKIIGLSLENVSGLLGIDGGFFSNLKEKIVNSDDVTSGVNVEVGKTQVAVDLNVIVEYQKNVPALYSEIREIVSSEVAKMTDLEIVEINVNVVDIKTKEQHEADSVSLQDRVSDVAESTGEFTSEQFEKAKSGLGSGFSTVQEKVSEGVEAVKGAANGVVSHENTRVN

SEQ ID NO: 3733 - DNA, 201 bp, Streptococcus pneumoniae
atgtcagtagaagaaaaattaaatcaagctaaaggttctattaaagaaggtgttgggaaagccatcggtgatgaaaaaatggaaaaagaaggtgcagctgaaaaagttgtttctaaagtaaaagaagttgccgaagacgctaaagacgctgtagaaggtgctgtagaaggtgttaaaaacatgttgagtggcgacgataaa

SEQ ID NO: 3734 - protein, 67 aa, Streptococcus pneumoniae
  hypothetical protein; Cellular location: cytoplasm; Similar to strain R6 sequence 15903668 (1.E-32)
MSVEEKLNQAKGSIKEGVGKAIGDEKMEKEGAAEKVVSKVKEVAEDAKDAVEGAVEGVKNMLSGDDK

SEQ ID NO: 3735 - DNA, 444 bp, Streptococcus pneumoniae
atgacaattcgttttgaagaaaaggtgagcacagaaaacgctcaatttgtatgccagtggtccaactccctaggcaaatcctttcaagaacaatggatgggaccaaggattccttttctactgacacttcaagccttggaaggagtcttttcaatctttgatgaacaagagtttgtgggatttatccagaaaatcaggctagaagacagcaatcttcatatcgggagattttttatcaacccccagaaacaggagcaaggcttaggtagcaaggctttaaggaaatttgttagtttagcatttgaaaatagagatatagacagtatttctctaaatgtcttcgaggcaaatcaaagagctcagaatctttaccaaaaagaaggatttgaaatcgttcaaatggttgaagcacctgtacgaaaatatagtagattgaaactagaa

SEQ ID NO: 3736 - protein, 148 aa, Streptococcus pneumoniae
  acetyltransferase, GNAT family; Cellular location: membrane; Similar to strain R6 sequence 15902610 (6.E-05)
MTIRFEEKVSTENAQFVCQWSNSLGKSFQEQWMGPRIPFLLTLQALEGVFSIFDEQEFVGFIQKIRLEDSNLHIGRFFINPQKQEQGLGSKALRKFVSLAFENRDIDSISLNVFEANQRAQNLYQKEGFEIVQMVEAPVRKYSRLKLE

SEQ ID NO: 3737 - DNA, 657 bp, Streptococcus pneumoniae
atgattgatttttatttttttctcgtcgggagcattctagcttcctttcttggtttggtcattgaccgttttccagagcaatccattatcagttcagccagtcactgcgattcctgtcagactcccttgcgtcccttagatttgattccgattctctcacaggtcttcaatcgctttcgctgtcgctactgcaaagttcgctatcctgtctggtatgccctctttgaattaagcttaggactcctctttctgctttactcttggggatggctctccttggggcaagtcgtcctaatcaccgctggtttgaccttgggtatctacgactttcaccatcaggaatatcccttactggtctggatgactttccagctaatcctaatagcttcctctggctggaatctggtcatggtctccttcctcatacttggaattttggctcattttatcgatatccgcatgggtgcaggggatttcctctttttagcttcttgtgctctcgtctttagcgtaacggagttactgatcttgattcagttcgcttctgcgacgggtatcctggcctttctcctgcaaaagaaaaaggaaagacttcctttcgtgcctttcctcttacttgctacttgtttgattatttttggtaagctactgcttgtc

SEQ ID NO: 3738 - protein, 219 aa, Streptococcus pneumoniae
  type IV prepilin peptidase, putative; Cellular location: membrane; Similar to strain R6 sequence 15903670 (e-116)
MIDFYFFLVGSILASFLGLVIDRFPEQSIISSASHCDSCQTPLRPLDLIPILSQVFNRFRCRYCKVRYPVWYALFELSLGLLFLLYSWGWLSLGQVVLITAGLTLGIYDFHHQEYPLLVWMTFQLILIASSGWNLVMVSFLILGILAHFIDIRMGAGDFLFLASCALVFSVTELLILIQFASATGILAFLLQKKKERLPFVPFLLLATCLIIFGKLLLV

SEQ ID NO: 3739 - DNA, 1149 bp, Streptococcus pneumoniae
atgtttaatggtcgggtattgaaagaattacggctgttaaatggtttaagtagagcagaattagctcagagaattaatttaacggaacaagccatttggcagtttgagtccaacgaaacgaaacctaaattatcaaccaaaatgcatttggccaaccaatttcatgttgatttaacttattttgaacaggaagaagagagcattcgatttgattcttctgtaattgcctttagaaatgcagacctagcaacacggaaaacaatagatattcaaactatgtatttacataaggtagatagtttgattgattattttgaaagttttgtaattatacctaatattataattcatgacctaagtaatgtagtgagtgaatcttatcataagggagaatccattgaggaattggctctttatgccagggaaaaattaggtatttcaaaagataatcatgatttgctttataaattagaacgttcaggcatctatatcgtggaacgattaattaatggccaagctgatgcttatagcgcatggtcaaaattgggaagaccttatattgtgttaggaacgaataaatcatctgtacgtcgaaattttgacttagctcatgagctaggacatattcttttacataaatataaagatatgaatgaagatggcgatcgtttggagcaagaagcaaattattttgcatcatgttttttattgccaaaagaagagtttttagtcaaatttgaagagagggttggcaagcgtgtcagcaatcctgatagttatattttattgaagtcggatttgaatgtttcgatacaggctttagagtatcgagcttttaagttaggattattgactccaaagcaacattcttacttttatcgtcaaattgcgcaaaaaggttacaaaatgattgaacccttggatgatcaaatttttgttaaaaaaccaagcaaagtaaagagtattctggacgtcgttttgagtaatcatctagtcagtctagcgactataatgtctaaacaaagtattcgtttacagtttataagcgaaatattttcagtcgaaatgaaattttttgatcagtatcaagaagatagaagaacagatcgatttgataacatcatccctttgtacaaaagaaataattta

SEQ ID NO: 3740 - protein, 383 aa, Streptococcus pneumoniae
  transcriptional regulator; Cellular location: membrane; Similar to strain R6 sequence 15903671 (0.E+01)
MFNGRVLKELRLLNGLSRAELAQRINLTEQAIWQFESNETKPKLSTKMHLANQFHVDLTYFEQEEESIRFDSSVIAFRNADLATRKTIDIQTMYLHKVDSLIDYFESFVIIPNIIIHDLSNVVSESYHKGESIEELALYAREKLGISKDNHDLLYKLERSGIYIVERLINGQADAYSAWSKLGRPYIVLGTNKSSVRRNFDLAHELGHILLHKYKDMNEDGDRLEQEANYFASCFLLPKEEFLVKFEERVGKRVSNPDSYILLKSDLNVSIQALEYRAFKLGLLTPKQHSYFYRQIAQKGYKMIEPLDDQIFVKKPSKVKSILDVVLSNHLVSLATIMSKQSIRLQFISEIFSVEMKFFDQYQEDRRTDRFDNIIPLYKRNNL

SEQ ID NO: 3741 - DNA, 729 bp, Streptococcus pneumoniae
atgttgaatcaggatctctttgattcgcttgaggcacaaaaaattgtagatactttgatgaaagggcaaaaagattatgtagatgaacgtctagaaaaaagagagacaatgatagtgtcgaatggttatgcatggacgcgacctaatcatattgatactgcatttgcatcagcagatttgtttgagtataaattacaattagcaggacagacttggggatatttagaatttgaaacaaatacagaaaaatatgggaaagtattgttaattataaagggtaagaagcgacttacaaaccaatttcctttggtacaaaaaaataagagtggctacttatttgaatatgctcagatgaatacactttatcttaatcaacattcttcctacaaaaatgatgaaaatagtcattcctttccaattcagatggagttagtttctgatgaaatgattcaagaaattgaacaagctactaaaaattcgaatatcgaaaaatttatgattttaacttatgaggcggactcagaaaacaatattatatctgtagatgttgttatgcctgatgcacgaactggtcagttacacttgattcaagatttgtctgagtatattcaatcaagttcgtaccatttcgaagaagctaaatatcaagatattcctaatttttcagaattatcggaaacagaagattttgaaattattccaagaatagaaaaacaagaaggtcaaaag

SEQ ID NO: 3742 - protein, 243 aa, Streptococcus pneumoniae
  hypothetical protein; Cellular location: cytoplasm; Similar to strain R6 sequence 15903672 (e-138)
MLNQDLFDSLEAQKIVDTLMKGQKDYVDERLEKRETMIVSNGYAWTRPNHIDTAFASADLFEYKLQLAGQTWGYLEFETNTEKYGKVLLIIKGKKRLTNQFPLVQKNKSGYLFEYAQMNTLYLNQHSSYKNDENSHSFPIQMELVSDEMIQEIEQATKNSNIEKFMILTYEADSENNIISVDVVMPDARTGQLHLIQDLSEYIQSSSYHFEEAKYQDIPNFSELSETEDFEIIPRIEKQEGQK

SEQ ID NO: 3743 - DNA, 774 bp, Streptococcus pneumoniae
atgcctaagacactaacagaaaaattaaatgctattaaagcagctggaaaaggaatttttgttccctatatcatggctggtgaccacgagaaaggtttggacggtcttgctgaaacaattcactttttagaagatttgggtgtctctgcaattgaagtgggtattcccttttcagaccctgttgcagatggacctgttatcgaagaagctggcttgcgcagtttagcccacgggacctctacccaggctttagttgaaaccttgaaaaccattgaaacagagattccactggtcatcatgacctacttcaaccccctctttcagtacggtgtggagaactttgtcaaagatctggctgatacagctgtgaagggcttgattatcccagacctgcctcatgaacatgccaactttgtagaaccatttttggcaaatacagatatcgccttgattcctttagtaagcttgaccacaggaattgagcgccagaaagagttgattgaaggggcggagggattcatctatgccgttgccatcaatggagtgacagggaaatcaggcaattaccgtgcagatttggacaagcacttggcgcaacttcatcaagtggccgacatcccagtcttgacaggttttggtgtatctagtcaagccgatctggaacgcttcaatgcggtgtcagatggtgttatcgtcggttcgaaaatagtaaaagctctccaccaaggagagccgattcaggattttatcagacaagcagtagcttaccaaaaa

SEQ ID NO: 3744 - protein, 258 aa, Streptococcus pneumoniae
  tryptophan synthase, alpha subunit (trpA); Cellular location: cytoplasm; Similar to strain R6 sequence 15903673 (e-143)
MPKTLTEKLNAIKAAGKGIFVPYIMAGDHEKGLDGLAETIHFLEDLGVSAIEVGIPFSDPVADGPVIEEAGLRSLAHGTSTQALVETLKTIETEIPLVIMTYFNPLFQYGVENFVKDLADTAVKGLIIPDLPHEHANFVEPFLANTDIALIPLVSLTTGIERQKELIEGAEGFIYAVAINGVTGKSGNYRADLDKHLAQLHQVADIPVLTGFGVSSQADLERFNAVSDGVIVGSKIVKALHQGEPIQDFIRQAVAYQK

SEQ ID NO: 3745 - DNA, 1221 bp, Streptococcus pneumoniae
atggcatatcaggaaccaaataaagatggattttacggaaaattcggcggacgttttgtcccagaaacattgatgacagcagttttggagttggagaaggcctaccgtgaaagtcaggcagacccaagtttccaagaggaattaaaccagcttttgcgccagtacgtaggacgtgaaactcctctttattacgcaaaaaacttgacccagcatattggcggagccaagatttatctcaaacgggaagaccttaaccatacaggagcccacaagattaacaatgccttaggacaagtttggcttgccaaacgcatgggtaaaaagaaaattatcgcagaaacgggtgctggtcagcacggtgtggcaactgcaactgctgcagccctctttaacatggaatgtaccatctacatgggtgaggaagatgtcaaacgccaagccctcaatgtcttccgcatggagcttttgggagccaaggtcgaggctgtaacagatggttcgcgcgtgctcaaggatgcggtcaatgcagcccttcgttcatgggtggctaatatcgacgatacccactatatccttggttctgccttggggcctcatccatttccagaaatcgttcgtgacttccaaagtgtcatcggtcgagaggctaaacaacagtaccgtgacttgacaggtcgagatctgccagatgccctagtagcctgtgttggtggtgggtcgaatgctatcgggctcttccatccctttgtagaagatgagtcagtagctatgtatggaactgaagcagcagggcttggtgtggatacagagcaccacgcagctaccttgaccaagggtcgtccaggtgtccttcacggttccctcatggatgtgctccaagatgcccatggtcaaattcttgaagccttctctatctcagcaggtttggactatcctggtatcggtccagagcattctcactaccacgatattaaacgtgccagctatgtccctgtgacagacgaagaagccttggaaggattccaactcttgtctcgtgtggaagggattatcccagccttggaatctagccatgctatcgcctttgcggtgaaattggccaaagaacttggaccagaaaagtctatgattgtctgcctatcaggtcgtggggacaaggatgtggttcaagtcaaggaccgcttggaagcagatgcagcaaagaagggagaagctcatgcc

SEQ ID NO: 3746 - protein, 407 aa, Streptococcus pneumoniae
  tryptophan synthase, beta subunit (trpB); Cellular location: cytoplasm; Similar to strain R6 sequence 15903674 (0.E+01)
MAYQEPNKDGFYGKFGGRFVPETLMTAVLELEKAYRESQADPSFQEELNQLLRQYVGRETPLYYAKNLTQHIGGAKIYLKREDLNHTGAHKINNALGQVWLAKRMGKKKIIAETGAGQHGVATATAAALFNMECTIYMGEEDVKRQALNVFRMELLGAKVEAVTDGSRVLKDAVNAALRSWVANIDDTHYILGSALGPHPFPEIVRDFQSVIGREAKQQYRDLTGRDLPDALVACVGGGSNAIGLFHPFVEDESVAMYGTEAAGLGVDTEHHAATLTKGRPGVLHGSLMDVLQDAHGQILEAFSISAGLDYPGIGPEHSHYHDIKRASYVPVTDEEALEGFQLLSRVEGIIPALESSHAIAFAVKLAKELGPEKSMIVCLSGRGDKDVVQVKDRLEADAAKKGEAHA

SEQ ID NO: 3747 - DNA, 597 bp, Streptococcus pneumoniae
ttgacaaaggttaaaatttgtggactatcgaccaaagaagcggtggaaacagccgtttcagcaggagccgactatatcggttttgtctttgcacctagtaaaagacaggtgactttagaagaggcagctgagttggcaaagcttattcctgcagatgtgaaaaaggttggagtatttgtttcaccaagtcgggtagaactgctggaagcgattgacaaagttggcttggacttggttcaagttcacggtcaggtggcagatgatttatttgagaatttgccttgtgccagtattcaggctgtgcaggtagatggaaatgggcatgtccccaattctcaggcagattatctactctttgatgcccctgtggcaggaagtggccagccctttgattggggtcaactggatacgactggactagcacagcccttctttatcgcaggtggccttaatgaagataatgtagtaaaagcaattcaacactttactccctatgcagtagatgtatcgagcggagtggagacagatggacaaaaagatcatgaaaagattagaagatttatagagagggtaaagcatggcatatcaggaaccaaa

SEQ ID NO: 3748 - protein, 199 aa, Streptococcus pneumoniae
  N-(5'-phosphoribosyl)-anthranilate isomerase (trpF); Cellular location: cytoplasm; Similar to strain R6 sequence 15903675 (e-110)
MTKVKICGLSTKEAVETAVSAGADYIGFVFAPSKRQVTLEEAAELAKLIPADVKKVGVFVSPSRVELLEAIDKVGLDLVQVHGQVADDLFENLPCASIQAVQVDGNGHVPNSQADYLLFDAPVAGSGQPFDWGQLDTTGLAQPFFIAGGLNEDNVVKAIQHFTPYAVDVSSGVETDGQKDHEKIRRFIERVKHGISGTK

SEQ ID NO: 3749 - DNA, 765 bp, Streptococcus pneumoniae
atgagtcaggaatttttagcacgaatcttagagcagaaggcgcgtgaggtggagcagatgaagctggagcaaatccagcctctgcgccagacctatcgcttggcagaatttttgaagaatcatcaggaccgcttgcaggtaatcgctgaggtcaagaaagctagccctagtttgggagatatcaatctcgatgtggatattgtgcaacaggcccagacttatgaagaaaacggagcagtgatgatttcggtgttgacagatgaggttttctttaaagggcatttggattatctacgggaaatttccagtcaggtagagattccgacgctcaacaaagactttatcatcgatgaaaagcaaatcatccgcgctcgcaatgcaggtgcgacagttatcttgctcattgtggcagccttgtccgaagaacgcctcaaggaactgtatgactacgcgacagagcttggtctggaagtcttagtggagactcacaatctagctgaactagaggtagcccacagacttggtgctgagattatcggggtcaacaaccgcaacttgactacctttgaggtcgacttgcagaccagtgtagatttagccccttactttgaggaaggtcgctattacatttctgaatctgccattttcacagggcaggatgcggaacgactagccccatactttaacggaattttggtagggacagctcttatgcaggcagaaaatgtggcccagagaatcaaggagttgcagattgacaaaggt

SEQ ID NO: 3750 - protein, 255 aa, Streptococcus pneumoniae
  indole-3-glycerol phosphate synthase (trpC); Cellular location: membrane; Similar to strain R6 sequence 15903676 (e-138)
MSQEFLARILEQKAREVEQMKLEQIQPLRQTYRLAEFLKNHQDRLQVIAEVKKASPSLGDINLDVDIVQQAQTYEENGAVMISVLTDEVFFKGHLDYLREISSQVEIPTLNKDFIIDEKQIIRARNAGATVILLIVAALSEERLKELYDYATELGLEVLVETHNLAELEVAHRLGAEIIGVNNRNLTTFEVDLQTSVDLAPYFEEGRYYISESAIFTGQDAERLAPYFNGILVGTALMQAENVAQRIKELQIDKG

SEQ ID NO: 3751 - DNA, 1002 bp, Streptococcus pneumoniae
atgaaagagattattgaaaaactagcaaaatttgaaaatttatcaggtgtggaaatgacggatgtcattgagcgtatcgtaactgggcgtgtaactgaagcgcagattgcttctctcctcttagctcttaagatgaagggggaaacacctgaagaacgcacagccattgcccaagtcatgagaggacatgcccagcatattccaactgagattcatgatgccatggacaactgtggtacaggtggggacaagtctttcagttttaatatttccacaactgcagcctttgtcttggctggtggcggtattcacatggccaaacacggtaaccgctcgatatcttctaaatctggttccgcagatgtcctcgaagccttgggaatcaatcttgacctcaaaccagctgaactaggtaaggtctttgataaaactggaatcgtctttctcttcgctaaaaatatgcacccagctatgaaatacatcatgccagctcgtttggaattgggaattccaacgattatgaacttgactggtccactgattcatccaatggctttagaaacacagcttcttggaattagtcgtccagaactcctagaaagtacagctcaggttttgaaaaatatgggtcgcaaacgtgccatcgtggttgctggaccagaagggttggatgaagctggcttgaacggaacaaccaagattgcacttcttgaaaatggcgaaatcagcttgtcaagctttactccagaggatttgggaatggaaggctatgctatggaagatattcgtggtgggaatgctcaggaaaatgcagaaattttgcttagcgttctgaaaaacgaagcaagtccattcttggaaacgacagtcttgaatgctggtcttggtttctatgctaatggtaagattgatagcatcaaggaaggggttgccttggcccgtcaagtgattgctagaggcaaggcccttgaaaaactcagactgttacaggagtaccaaaaa

SEQ ID NO: 3752 - protein, 334 aa, Streptococcus pneumoniae
  anthranilate phosphoribosyltransferase (trpD); Cellular location: cytoplasm; Similar to strain R6 sequence 15903677 (0.E+01)
MKEIIEKLAKFENLSGVEMTDVIERIVTGRVTEAQIASLLLALKMKGETPEERTAIAQVMRGHAQHIPTEIHDAMDNCGTGGDKSFSFNISTTAAFVLAGGGIHMAKHGNRSISSKSGSADVLEALGINLDLKPAELGKVFDKTGIVFLFAKNMHPAMKYIMPARLELGIPTIMNLTGPLIHPMALETQLLGISRPELLESTAQVLKNMGRKRAIVVAGPEGLDEAGLNGTTKIALLENGEISLSSFTPEDLGMEGYAMEDIRGGNAQENAEILLSVLKNEASPFLETTVLNAGLGFYANGKIDSIKEGVALARQVIARGKALEKLRLLQEYQK

SEQ ID NO: 3753 - DNA, 564 bp, Streptococcus pneumoniae
atgattttattgattgacaactatgattcttttacctataacttggcccaatacattgggaattttgcagaagttcaggttctgagaaatgatgattccaagctgtatgaagaagctgaaaaagcagatggtctggtcttttctcctggtcctggttggccagttgatgctggaaagatggaagacatgattcgtgattttgcaggcaagaagccgattcttgggatttgtttgggccaccaagccattgcagaagtctttggtggtaagctaggtttggctccaaaagtcatgcatgggaaacagagcaatatcaactttgaagcgccatctgttttgtatcaaggtattgaggatggccgtgcggtcatgcgttatcacagtattttgattgaggaaatgccagaagactttgaagtgacagctcgttcgactgatgaccaagccatcatggggattcaacataaaaacctaccgatttatggcttccagtaccatccagagagcattggaacgccagacggcttgtcttctattcggaattttatcgaggaggttgtaaag

SEQ ID NO: 3754 - protein, 188 aa, Streptococcus pneumoniae
  anthranilate synthase component II (trpG); Cellular location: cytoplasm; Similar to strain R6 sequence 15903678 (e-108)
MILLIDNYDSFTYNLAQYIGNFAEVQVLRNDDSKLYEEAEKADGLVFSPGPGWPVDAGKMEDMIRDFAGKKPILGICLGHQAIAEVFGGKLGLAPKVMHGKQSNINFEAPSVLYQGIEDGRAVMRYHSILIEEMPEDFEVTARSTDDQAIMGIQHKNLPIYGFQYHPESIGTPDGLSSIRNFIEEVVK

SEQ ID NO: 3755 - DNA, 1359 bp, Streptococcus pneumoniae
atggaacgaatcattcatggagatgtcttatcaccaatcttggcttatatgcgcttaaaggggcaacataaggttattttagagagtattccgagagacaaggaaacagctcgtttttctatcctagcctataatccagtttttgagattaagtttgaaaatggggttctctatcaaaatggtcaagtgattgatcgggatcccttggatttcctttatgaagtgattcataagagtcagcaccactcagagctaccttttggtggtggagccattggttttgtgggttacgatatgatttcgctttatgaagaaattggtcaaatccctgaggatacaattgggacgccagacatgcatttctttgtctatgagagctatatggtctttgaccacaagaaggagaagatacatgtcatagaggatgcactttatagtgagcgcagtcaagaggccttggaaaaatccttgaaccaagtgcttgaggaattacgcattcctgctccaaatgaatttgaagatttggatctatctccgttagacttcaaaccgcatatcgctccacataagtttgagggaatggtagaaacagctcgtgacttgattcgtaacggagatatgttccaatgtgtactcagccagcgtttttcagcagaagttactggaaatccatttgacttctacagaaatctccgcgtgactaatccttctaattacctttatttctatgattttggggattatcaaatcatcggagctagtccagaaagtttggtttctgtcaaaaatggcatcgtgacaaccaatccgattgcagggacgcgaccaagaggggctacggatgaagaagacaaggccttggcgactgacctcctctctgatgagaaggaaacagcagaacatcgaatgttggtagacttggggcgtaacgatattggccgcatctctgaaacgaccagtgtccaagtcactaagtatatggaagtggagctcttccgctacgtcatgcatttgaccagcgtagtcaaggggcgtttgcttccagaactcactgccatggatgccttgaaagcaacgcttcctgctggaaccgtttctggagcaccaaagattcgagcgatgagacgtatctatgaactggaaacggaaaaacggggagtatacgctggggcaatcggctacttgtctgcgacgggtgatatggatttggccatcgccatccgaaccatgattctcaaaaatcaaagagcctatgtgcaggctggggcagggattgtctacgactctatcgcccaaaacgaataccaagaaaccattaacaaagcaaaatctatgactagaattggagaactaagacca

SEQ ID NO: 3756 - protein, 453 aa, Streptococcus pneumoniae
  anthranilate synthase component I (trpE); Cellular location: cytoplasm; Similar to strain R6 sequence 15903679 (0.E+01)
MERIIHGDVLSPILAYMRLKGQHKVILESIPRDKETARFSILAYNPVFEIKFENGVLYQNGQVIDRDPLDFLYEVIHKSQHHSELPFGGGAIGFVGYDMISLYEEIGQIPEDTIGTPDMHFFVYESYMVFDHKKEKIHVIEDALYSERSQEALEKSLNQVLEELRIPAPNEFEDLDLSPLDFKPHIAPHKFEGMVETARDLIRNGDMFQCVLSQRFSAEVTGNPFDFYRNLRVTNPSNYLYFYDFGDYQIIGASPESLVSVKNGIVTTNPIAGTRPRGATDEEDKALATDLLSDEKETAEHRMLVDLGRNDIGRISETTSVQVTKYMEVELFRYVMHLTSVVKGRLLPELTAMDALKATLPAGTVSGAPKIRAMRRIYELETEKRGVYAGAIGYLSATGDMDLAIAIRTMILKNQRAYVQAGAGIVYDSIAQNEYQETINKAKSMTRIGELRP

SEQ ID NO: 3757 - DNA, 180 bp, Streptococcus pneumoniae
ttgagaatgatgttttcttctctcgtttcagatgaacccaactttacagctttctctgcttgttttcagcaaccacaagctctctgtgagagaaagaactgtaatttttccatctattattttttagcttctagtagtctgcaatcgcagctaggtccttgcctccacgaccagagacat

SEQ ID NO: 3758 - protein, 60 aa, Streptococcus pneumoniae
  hypothetical protein; Cellular location: cytoplasm
MRMMFSSLVSDEPNFTAFSACFQQPQALCERKNCNFSIYYFLASSSLQSQLGPCLHDQRH

SEQ ID NO: 3759 - DNA, 294 bp, Streptococcus pneumoniae
atgaaaatcaaagagcaaactaggaaactagccgcaggctgctcaaaacactgttttgaggttgtggatagaactgacgaagtcagctcaaaacactgttttgaggttgtggatagaactgacgaagtcagctcaaaacactgttttgaggttgtggatagaactgacgaagtcagctcaaaacactgttttgaggttgcagatagaactgacgaagtcagtaaccatacctacggcaaggcgacgttgacgcggtttgaagagattttcgaagagtataaaggtgtaccgaga

SEQ ID NO: 3760 - protein, 98 aa, Streptococcus pneumoniae
  box element
MKIKEQTRKLAAGCSKHCFEVVDRTDEVSSKHCFEVVDRTDEVSSKHCFEVVDRTDEVSSKHCFEVADRTDEVSNHTYGKATLTRFEEIFEEYKGVPR

SEQ ID NO: 3761 - DNA, 93 bp, Streptococcus pneumoniae
ttgatgaacttgagttctatctacagctccatgcctactactaaaagcaaacaaaaaggctggactaatacgaaaaaagctagtaatactcaa

SEQ ID NO: 3762 - protein, 31 aa, Streptococcus pneumoniae
  hypothetical protein; Cellular location: cytoplasm
MMNLSSIYSSMPTTKSKQKGWTNTKKASNTQ

SEQ ID NO: 3763 - DNA, 93 bp, Streptococcus pneumoniae
gtggcaccgcgttaccaacgccctcacacggaagtatattctgtgtgtgggcttttttctatccgtcgtttggtttatcttttattagggcct

SEQ ID NO: 3764 - protein, 31 aa, Streptococcus pneumoniae
  hypothetical protein; Cellular location: cytoplasm
MAPRYQRPHTEVYSVCGLFSIRRLVYLLLGP

SEQ ID NO: 3765 - DNA, 999 bp, Streptococcus pneumoniae
atgaaaaatataaatgggaaaaaggtaactatttatgatattgcacgtttatcaggtttttctccaaaaacagtttcacgagttattaatggtggagtaaatgttaaagaagaaacttatcaagcgattcaaaaagttatagaggaattgtcgtatattccaaatgcgtatgcaaaaaatttaactaaaaaagaagctataaatatattgatttctgtaaaaaaaatcgactcttttcctttaatttggtttcatacgctgttagataaagtgttacggacgtgtaaagaatttggtgttaatgctatagttgagtactttggagaggaggatacaattagtaattcaattatatcaagcacaggtagcctagtagatggtgttattgttttttatgaaagtgtagatgatatcagaattcagtatttaaagaagaaccatatgccttttcttgttttcggtgaatctcaaacgtctggagtagtctatgtatctaataataattttcaagctacttatgatatgatgaaagctgtaactgaagaaaaatttaaaaatatgtggttgcttatgggaggagaatcccatgttaataaggatcgtgaaagaggtgtgcgttcttttctgaatgataaaaattactttatggatttaaaagtcatttatggcttatctacaattgattcagtttattcttatgcaatgcagcacttgactacccaaaattatccggacattatttttgtttcaggagatgaaaaggttcagggcttgattcgtgcgtgctatgagaaaggaattcttattccagatgatatttctatcattggatttgataatattcctatttctcagtattatactccagctttgtctacaattgctcccaattatgttaaattggctaaagaaatgatagaaggtgttttagcaattattaaaggggaaagtgtcacatctgttgaagtttctcctaaatttgttaggagacagagtttc

SEQ ID NO: 3766 - protein, 333 aa, Streptococcus pneumoniae
  sugar-binding transcriptional regulator, LacI family; Cellular location: cytoplasm; Similar to strain R6 sequence 15903681 (0.E+01)
MKNINGKKVTIYDIARLSGFSPKTVSRVINGGVNVKEETYQAIQKVIEELSYIPNAYAKNLTKKEAINILISVKKIDSFPLIWFHTLLDKVLRTCKEFGVNAIVEYFGEEDTISNSIISSTGSLVDGVIVFYESVDDIRIQYLKKNHMPFLVFGESQTSGVVYVSNNNFQATYDMMKAVTEEKFKNMWLLMGGESHVNKDRERGVRSFLNDKNYFMDLKVIYGLSTIDSVYSYAMQHLTTQNYPDIIFVSGDEKVQGLIRACYEKGILIPDDISIIGFDNIPISQYYTPALSTIAPNYVKLAKEMIEGVLAIIKGESVTSVEVSPKFVRRQSF

SEQ ID NO: 3767 - DNA, 366 bp, Streptococcus pneumoniae
atgaaagattataaaatcaattttgatttaggtaaaatagaatattttgataataattgtttgatacaagtatacaaatttatttctttttatgatatttgtgaaatggtgtttgcctttcatttacctcctgatgagttgataacaaatgttatctttaaagaaaaaattaactctatgttaaaatgttacattgacaggctattatatgtttttataaatcctacacattttactgaaaaagttaatctacaattttatggcagttttttctcatatgaatttatttgtcgtgaagttggaaacattcttaaaaataaaggtgtgaaatgcaatttaaacttttttgaaggggaagaatatttg

SEQ ID NO: 3768 - protein, 122 aa, Streptococcus pneumoniae
  conserved domain protein; Cellular location: cytoplasm; Similar to strain R6 sequence 15903682 (3.E-71)
MKDYKINFDLGKIEYFDNNCLIQVYKFISFYDICEMVFAFHLPPDELITNVIFKEKINSMLKCYIDRLLYVFINPTHFTEKVNLQFYGSFFSYEFICREVGNILKNKGVKCNLNFFEGEEYL

SEQ ID NO: 3769 - DNA, 708 bp, Streptococcus pneumoniae
atgacagccactagtcttgggttatcaaatattgaaatagttgtcaggattgttttatcagtagtcattggtagtataattggtttagagagagggagcaaatcccagcctgcaggcatccgaacttatagtattgtttgtctagctgcatgtttgattatgatgacgaatgaatacgtatcttataaatttgggacaggagatcctacacgattaggagctcaagttatatcaggtgtgggttttctaggcgctggaacgattcttattacagataaaaagaaaattacaggtctgacaactgcagcaggcatttgggcttcggcaggaattggattagctattggagtaggtttttatgagggagctcttttagtagccatttctgtttggggtgtgatatccatgttccaaccactaaaaaaatatctgcaaaatcgttctaaaatgattgaattgtatatagtggttaaatctacagaagcctataatcgtgtattggtttattgtgcagaaaatggtatcagaatgaccgattcaagaacagcgtttggagatgttaattctgacagaattgaatactttgatgttccggacaaaaaaatagcgtcatttattactctggaattatcaggtagatttgaacatcttcgactgatggaagaaattgctaatattgtaggtgttatttatgtcgaagaaattagc

SEQ ID NO: 3770 - protein, 236 aa, Streptococcus pneumoniae
  MgtC/SapB family protein; Cellular location: membrane; Similar to strain R6 sequence 15903683 (e-130)
MTATSLGLSNIEIVVRIVLSVVIGSIIGLERGSKSQPAGIRTYSIVCLAACLIMMTNEYVSYKFGTGDPTRLGAQVISGVGFLGAGTILITDKKKITGLTTAAGIWASAGIGLAIGVGFYEGALLVAISVWGVISMFQPLKKYLQNRSKMIELYIVVKSTEAYNRVLVYCAENGIRMTDSRTAFGDVNSDRIEYFDVPDKKIASFITLELSGRFEHLRLMEEIANIVGVIYVEEIS

SEQ ID NO: 3771 - DNA, 153 bp, Streptococcus pneumoniae
atgcctgcaggctgggatttgctccctctctctaaaccaattatactaccaatgactactgataaaacaatcctgacaactatttcaatatttgataacccaagactagtggctgtcatgattatttccttactttacgccccggtctttgtg

SEQ ID NO: 3772 - protein, 51 aa, Streptococcus pneumoniae
  hypothetical protein
MPAGWDLLPLSKPIILPMTTDKTILTTISIFDNPRLVAVMIISLLYAPVFV

SEQ ID NO: 3773 - DNA, 1689 bp, Streptococcus pneumoniae
atgcgtcataaattaaatttaaaagattggcttattcgtttagggttaatctggttcttagtaacatttattatttatccaaactttgatctagtagtgaatgtatttgtaaaaggaggagaattttcccttgatgctgtacatcgtgttctaaaatctcagagggcacttcagagtattatgaacagttttaagttagcattttcactcattattacagttaatgtcgtaggtattctttgtgttctatttacagagtactttgatattaaaggtgctaaaattttaaaattaggttatatgacctctttaatttatggaggagtggttttagcgactggatataaatttgtctatggtccttatggattgattacaaaatttttacaaaatgttatcccttctttagaccctaactggtttattgggtatggtgcagtcttattcattatgacattttcaggaactgctaatcatacattgtttttaacaaatacaattcgaagcgttgactatcacactattgaggctgctcgaaatatgggagcaaaaccatttactgttttccgaaaagtagtgttaccaaccttaattccaactctatttgcacttactattatggtttttcttagtggtttatctgcagtagcagcacccatgattgttggtggtaaagaatttcaaactataaatccaatgattattacatttgcagggatggggaattctcgtgatttagctgccctacttgcaattattttaggtattgcaactacaattttgcttactatcatgaataagatagaaaaaggtggaaattatatttctatctctaagactaaagcgcctcttaaaaaacaaaaaattgcgtctaagccttggaatatcattgctcacattgtagcatatggattgttcacagttttcatgcttccactaatttttatagtattatactcatttacagatccagttgcaattcaaacaggtaacttaacattatcaaactttactttagaaaattatcgcttattctttagtaatagtgcggcattctctccattcttggtcagctttatttattctattattgctgcgacaacagcaacaattctcgcagttgtatttgctcgtgttgtcagaaaacataaatctcgttttgatttcttatttgaatatggtgctctacttccttggttactaccaagtacacttttagcagtaagtttattatttacttttaatcagccacaatttcttgtcttgaatcagattttggtaggtagtttggtaattctacttattgcatatatagttgtaaaaatcccattttcttatagaatggtacgtgctattttatttagtgttgatgatgagatggaagatgcagcaagaagtatgggtgcttcacctttttatactatgatgaaggttatcattccatttattttaccggttgttctctctgttattgctttaaactttaactctttattaactgacttcgacttatctgtattcctttaccatcccctagctcaaccattaggtattacgattcgatctgcaggtgatgaaacagcaacatctaatgcacaagctctggtatttgtttatacaattgttctgatgattatttctggaacggtattatacttcacacaaagaccggggcgtaaagtaaggaaa

SEQ ID NO: 3774 - protein, 563 aa, Streptococcus pneumoniae
  ABC transporter, permease protein; Cellular location: membrane; Similar to strain R6 sequence 15903685 (0.E+01)
MRHKLNLKDWLIRLGLIWFLVTFIIYPNFDLVVNVFVKGGEFSLDAVHRVLKSQRALQSIMNSFKLAFSLIITVNVVGILCVLFTEYFDIKGAKILKLGYMTSLIYGGVVLATGYKFVYGPYGLITKFLQNVIPSLDPNWFIGYGAVLFIMTFSGTANHTLFLTNTIRSVDYHTIEAARNMGAKPFTVFRKVVLPTLIPTLFALTIMVFLSGLSAVAAPMIVGGKEFQTINPMIITFAGMGNSRDLAALLAIILGIATTILLTIMNKIEKGGNYISISKTKAPLKKQKIASKPWNIIAHIVAYGLFTVFMLPLIFIVLYSFTDPVAIQTGNLTLSNFTLENYRLFFSNSAAFSPFLVSFIYSIIAATTATILAVVFARVVRKHKSRFDFLFEYGALLPWLLPSTLLAVSLLFTFNQPQFLVLNQILVGSLVILLIAYIVVKIPFSYRMVRAILFSVDDEMEDAARSMGASPFYTMMKVIIPFILPVVLSVIALNFNSLLTDFDLSVFLYHPLAQPLGITIRSAGDETATSNAQALVFVYTIVLMIISGTVLYFTQRPGRKVRK

SEQ ID NO: 3775 - DNA, 1008 bp, Streptococcus pneumoniae
atgattaaatttgataatattcaaattaaatatggtgattttgttgcaattgataatctgaatttagatatacatgaaggggaattttttacatttcttgggccttcaggatgtggtaaatcaactactttgagagcattggtaggttttctagatccatcatcaggaagtattgaagttaatggaacagatgtcactcatttggaacctgaaaagcgtggaattggtattgtatttcaatcttatgcgctatttccaactatgactgtttttgataatattgcatttggtttaaaagttaagaaggtagctccagatgttattaaagctaaagtatcagcagtggcagcaaaaattaagatctctgatcaacagttacagcgtaatgtatcagaattatctgggggtcaacaacaaagggtagcattggctcgtgctctggttcttgaacctaaaattctttgtctagatgaaccattgtcaaaccttgacgcaaaattacgtgtagatttgagaaaagagttgaaaagacttcaaaaagagttaggtattactactttatatgttactcatgatcaagaggaagccttgactttatctgatagaattgcagtctttaacaatggatacatcgaacaggtcggtacaccagtagagatttatcataattctcaaactgaatttgtatgtgattttattggagatattaatgttttgaccgatgaaacagtccacgaagtattattgaaaaatacaagcgttttcttagaggataaaaaaggatacattcgattagagaaagttcgattcaatcgtgaaactgaacaagattttattctaaaagggacaattattgatgttgagttttctggagttacaattcactatacaataaaagtttctgaaagtcagattcttaatgtaacaagtattgatagtcaggctgctattagatctgtcggagaaagtgtggaattatttatcacaccatcagacgttctgcaattt

SEQ ID NO: 3776 - protein, 336 aa, Streptococcus pneumoniae
  ABC transporter, ATP-binding protein; Cellular location: cytoplasm; Similar to strain R6 sequence 15903686 (0.E+01)
MIKFDNIQIKYGDFVAIDNLNLDIHEGEFFTFLGPSGCGKSTTLRALVGFLDPSSGSIEVNGTDVTHLEPEKRGIGIVFQSYALFPTMTVFDNIAFGLKVKKVAPDVIKAKVSAVAAKIKISDQQLQRNVSELSGGQQQRVALARALVLEPKILCLDEPLSNLDAKLRVDLRKELKRLQKELGITTLYVTHDQEEALTLSDRIAVFNNGYIEQVGTPVEIYHNSQTEFVCDFIGDINVLTDETVHEVLLKNTSVFLEDKKGYIRLEKVRFNRETEQDFILKGTIIDVEFSGVTIHYTIKVSESQILNVTSIDSQAAIRSVGESVELFITPSDVLQF

SEQ ID NO: 3777 - DNA, 1065 bp, Streptococcus pneumoniae
atgaaaaaaatgaaagtttggtctactgtacttgcaacgggagttgctcttactacacttgctgcttgctctggaggttcaaattctacgactgcttcttcatctgaagaaaaagctgataaaagtcaagaattagttatctattcgaactcagtctcaaatggtcgtggtgattggttaactgctaaagcaaaagaagctggttttaatataaaaatggttgatatcgctggcgctcaattagcagaccgtgttattgctgagaagaataatgcagttgcagatatggtatttggaattggtgctgttgattcaaataaaattagagatcaaaaattactagtacagtacaagcctaaatggttagataaaattgatcaatctttatcagataaagataattattataatcctgtgattgttcaaccattagttttaattggggcgcctgatgtaaaagaaatgcctaaagattggactgaattaggtagtaagtataaaggtaaatattcaatttctggtcttcaaggaggtacaggacgggcaattctagcaagtatcttagttcgataccttgatgataaaggtgaattaggtgtttccgaaaaaggttgggaagtagcaaaagaatatttgaaaaatgcatacactcttcaaaagggagaaagttcaattgttaagatgttagacaaagaagatccaatacaatatggaatgatgtggggttctggtgcattagttggacaaaaagaacaaaatgttgttttcaaagttatgactcctgagattggtgtaccatttgtaactgaacaaactatggttttaagcactagtaaaaaacaagcgttagctaaagaatttattgattggtttggtcaatcagaaattcaagtagaatatagtaagaactttggatctattcctgcaaataaagatgccctcaaagatctacctgaagatacgaagaaatttgttgatcaagtgaaaccacaaaatattgactgggaagctgttggaaagcatttggatgaatgggtagaaaaagctgaattagaatacgtacaa

SEQ ID NO: 3778 - protein, 355 aa, Streptococcus pneumoniae
  ABC transporter, substrate-binding protein; Cellular location: lipoprotein; Similar to strain R6 sequence 15903687 (0.E+01)
MKKMKVWSTVLATGVALTTLAACSGGSNSTTASSSEEKADKSQELVIYSNSVSNGRGDWLTAKAKEAGFNIKMVDIAGAQLADRVIAEKNNAVADMVFGIGAVDSNKIRDQKLLVQYKPKWLDKIDQSLSDKDNYYNPVIVQPLVLIGAPDVKEMPKDWTELGSKYKGKYSISGLQGGTGRAILASILVRYLDDKGELGVSEKGWEVAKEYLKNAYTLQKGESSIVKMLDKEDPIQYGMMWGSGALVGQKEQNVVFKVMTPEIGVPFVTEQTMVLSTSKKQALAKEFIDWFGQSEIQVEYSKNFGSIPANKDALKDLPEDTKKFVDQVKPQNIDWEAVGKHLDEWVEKAELEYVQ

SEQ ID NO: 3779 - DNA, 657 bp, Streptococcus pneumoniae
atgaaaaacttaacaaaaattaagttcaaagagaatggggaatttaatcatttccctgggaatacagttgtagcaaatctttatactaaacaagatttgatggaagttgttgatattattcaatcacgttatagagaattaccatttatcgataagtttactttaactccaaggaattctattcacatgactgtaattgaattgttgtgccatgaaaatcgtgaaacggagttttggagcagtaatcttcctctagatacacctttacaggaaatacatgattactttgctaaacaacttgaaatttttccattgttggatgaagaaattcatatgcgtataactgaaatgggaaaacaaaacatactagttgaacctgcagatgaagcttctgcaaagagattagaagaaattcgtacttatgtctcagaaaaagcaggtgtttgtttccctaatcatgatagatatcaattccatatttcaattgggtatcttcggattcctctaaccgaagaggaggaagaagagtttactaaagtcagagcagaattaactgaaattttattagagaagattccaactattactgtaaaccgtattgactatactgtatttgaagatatgagacaatttgttccatatcacgaaaaatttaaa

SEQ ID NO: 3780 - protein, 219 aa, Streptococcus pneumoniae
  hypothetical protein; Cellular location: cytoplasm; Similar to strain R6 sequence 15903688 (e-127)
MKNLTKIKFKENGEFNHFPGNTVVANLYTKQDLMEVVDIIQSRYRELPFIDKFTLTPRNSIHMTVIELLCHENRETEFWSSNLPLDTPLQEIHDYFAKQLEIFPLLDEEIHMRITEMGKQNILVEPADEASAKRLEEIRTYVSEKAGVCFPNHDRYQFHISIGYLRIPLTEEEEEEFTKVRAELTEILLEKIPTITVNRIDYTVFEDMRQFVPYHEKFK

SEQ ID NO: 3781 - DNA, 1008 bp, Streptococcus pneumoniae
atggcaatattggtaacaggcggagctggttatattggtagccataccgtagtagaattactaaatttaggaaaggaagttatcattgtcgacaacctttcgaactctagcatcttggtgctagaccgtattgaagcaattacaggaatacgtcccgtgttttacgaattagatgtttgtgataaacaagcattgagaaaggtatttgaacaagaatcgattgatgctgcaattcattttgcaggttataaagctgtcggagaatccgtgcaaaagcctgtgatgtactacaaaaataatattatgagtacattggcacttgttgaagtgatgtcagaatttaatgttaaaaagattgtcttttcttcaagtgcgactgtatatggaattaacaatcagtcacctctaattgagacgatgcaaacaagtgcgacaaatccttatgggtatacgaaagtgatgcttgagcaaattttaaaagatgttcatgtggcagattcagaatggagtattgcgttgcttcgttatttcaatccaattggtgctcatgagtctggtttgattggggaagatccctcaggaattcctaacaacttgatgccttatattgcacaagtagcggtaggtaagctatcagagctaagtgtgttcggaaatgattatgatacgcttgatggtactggtgtgcgtgattatatccatgtagtagatttagcaataggacatataaaagctttagaaaaagtatctgaaaaaacagatgtttatatctataacctaggctcgggagaaggcactagtgtattacaacttgtaaatacatttgaaagtgttaataagatccctattccttataaaatagttccaagacgttcaggagacgttgcaacttgttatgcaaatgcagacaaagcatataaggaattaaattggaggacaacaaaatcgattgaagacatgtgtagagatacatggaattggcaatcaaaaaatcccaatggctataat

SEQ ID NO: 3782 - protein, 336 aa, Streptococcus pneumoniae
  UDP-glucose 4-epimerase (galE); Cellular location: cytoplasm; Similar to strain R6 sequence 15903689 (0.E+01)
MAILVTGGAGYIGSHTVVELLNLGKEVIIVDNLSNSSILVLDRIEAITGIRPVFYELDVCDKQALRKVFEQESIDAAIHFAGYKAVGESVQKPVMYYKNNIMSTLALVEVMSEFNVKKIVFSSSATVYGINNQSPLIETMQTSATNPYGYTKVMLEQILKDVHVADSEWSIALLRYFNPIGAHESGLIGEDPSGIPNNLMPYIAQVAVGKLSELSVFGNDYDTLDGTGVRDYIHVVDLAIGHIKALEKVSEKTDVYIYNLGSGEGTSVLQLVNTFESVNKIPIPYKIVPRRSGDVATCYANADKAYKELNWRTTKSIEDMCRDTWNWQSKNPNGYN

SEQ ID NO: 3783 - DNA, 1473 bp, Streptococcus pneumoniae
atgaaaacaattattgataattttgttgatagagtaattgaatacggaatgtataatgaaattgacaaaatatatgtgaaaaatagagtactagcgttaataggtgaggagggaattgatcgcatttccgatgaaaatgacctgaaacaaataaaagattacttagtggaaatcgccttaaaaaacggtaaaattaaagatttaatcgaggaaaaggaatgtttaggagcagagttaatgaatttcatagttcctttacctagtcgattaaatgatattttttggagttcatatgatatatcacctcaagaagcagttgaagagttttataagttaagtaaagatagtgattatattaaaacttctgctattgctaagaatattgagtttcgagcatcaactaaatacggagagctagagattacgataaatttgtcaaaacccgaaaaagatccaaaaacaattgctgctgaaaaattagtaaaagcaactaattatcccaaatgtttactatgtatggaaaatgaaggatatcaggggcgaataaattatccagcacgttcgaatcatagaattattcggttgaaacttggtgacgaagtatggggattccagtattctccctactcatactttaatgagcatgcgatatttttgaatagtcaacatgtaccaatggctattacctctaaaacatttgaacaattattggagattgttgatattttgccaggatattttgctggttcaaattctgatcttcctatctcaggaggctccattcttagtcataaccactaccagggagggaaacatattttcccaatggaaaaagcaaaatttgagagtgaattttgttttaaagactttgaggatgttaatgctggtattgtaaaatggccaatgtcagtaattaggttacaaagtgaaaataaaaatcgcttgttagatttagctactaaaattctaaataagtggagagaatattcagatttagaagtagacatcattgctatgactgaagatgtcccacaccatacggtgactcctattgctcgtaaagtggacgggagatacgaattagatattgttctaagagataatcatactactgaacaatacccagatggtgttttccatcctcatcaagatgtacaacatattaaaaaggaaaatatcgggttaatcgaagtgatgggacttgcgatattaccacctcgtttgaaaccagagttagaagaagttggaaaatatcttttaggagaggataatgcaattgcggattatcatttagaatgggccgaccaattgaaagaaaaatatcctcgcattaataaagaagaggttaatagcgtagttcaacacgaagcaggacaagtgtttgcgagagttctggaagatgcaggagtttataagaatacaccgtctgggcatgaagcgtttatgagatttgttaagtcggttggaattaat

SEQ ID NO: 3784 - protein, 491 aa, Streptococcus pneumoniae
  galactose-1-phosphate uridylyltransferase (galT); Cellular location: cytoplasm; Similar to strain R6 sequence 15903690 (0.E+01)
MKTIIDNFVDRVIEYGMYNEIDKIYVKNRVLALIGEEGIDRISDENDLKQIKDYLVEIALKNGKIKDLIEEKECLGAELMNFIVPLPSRLNDIFWSSYDISPQEAVEEFYKLSKDSDYIKTSAIAKNIEFRASTKYGELEITINLSKPEKDPKTIAAEKLVKATNYPKCLLCMENEGYQGRINYPARSNHRIIRLKLGDEVWGFQYSPYSYFNEHAIFLNSQHVPMAITSKTFEQLLEIVDILPGYFAGSNSDLPISGGSILSHNHYQGGKHIFPMEKAKFESEFCFKDFEDVNAGIVKWPMSVIRLQSENKNRLLDLATKILNKWREYSDLEVDIIAMTEDVPHHTVTPIARKVDGRYELDIVLRDNHTTEQYPDGVFHPHQDVQHIKKENIGLIEVMGLAILPPRLKPELEEVGKYLLGEDNAIADYHLEWADQLKEKYPRINKEEVNSVVQHEAGQVFARVLEDAGVYKNTPSGHEAFMRFVKSVGIN

SEQ ID NO: 3785 - DNA, 639 bp, Streptococcus pneumoniae
atgttaaggttatatttagaaaatgaaattatagaattatcaaataatttagagaccatttgggtatctgtgcttgataaatatgagaagttatttgaatatttatcaaatgaagaacgagtagaattgattaaagaagatttaatcataaatgagtcagttctaaatattgataaaaaaggatatgagttaatttgtttacaacatcctgtttcatatgacttaagaagaattattagtgtaataaaaatatcaactgacattgaacgtattggggatagaattgttgaaattttaaaaaatctacagattcttcaaaataatgaaattttgaagaaaattatttcaaaaataaaaatacttcatgaagttatcggactgcatatgaatagggctatatcttgttatagagaggaacaatctggatgtttagatatggttgttatacaaaaacagaatgagatagaagagcttagtataaatatggaaaagaaaataatgaattacatatttgaagatgatgggaacgtttctgaagtaattagtgctttagatattattcatcaccttgataaaattgctcatactacgcaagcaatttataaatggataatgtatagaaaatatgggaacataaat

SEQ ID NO: 3786 - protein, 213 aa, Streptococcus pneumoniae
  phosphate transport system regulatory protein PhoU, putative; Cellular location: cytoplasm; Similar to strain R6 sequence 15903691 (e-116)
MLRLYLENEIIELSNNLETIWVSVLDKYEKLFEYLSNEERVELIKEDLIINESVLNIDKKGYELICLQHPVSYDLRRIISVIKISTDIERIGDRIVEILKNLQILQNNEILKKIISKIKILHEVIGLHMNRAISCYREEQSGCLDMVVIQKQNEIEELSINMEKKIMNYIFEDDGNVSEVISALDIIHHLDKIAHTTQAIYKWIMYRKYGNIN

SEQ ID NO: 3787 - DNA, 480 bp, Streptococcus pneumoniae
gtgtactattctagtttcaatatactatattatcgcttaccaatatttgctaaactttcagaaaaaaagttggagtatatgatgctaggtgactgcgtcatgttagtaaacgaaatggaaataactgatcatagagtagataacttatttgaaaaagggaaaaatgagataaaagattcaattggtacaaatagtgttttaaataaaaaaattattttacaaaaaatcagaaaattatctaatcaaccgagtgggtactggataggttcgttggatgagagatttttagaccatgctattattaatcaaatagatgttactagtgaacaaattgttttaatgagcgatggcttttatgaattctatcaaaataatcaaaataaaacttttgaagagttaattaagatgagatttaattcttctgctattgatccaatctatggaaagaaggatgatgcaagtattctagtcattgatgtt

SEQ ID NO: 3788 - protein, 160 aa, Streptococcus pneumoniae
  hypothetical protein; Cellular location: cytoplasm; Similar to strain R6 sequence 15903692 (7.E-87)
MYYSSFNILYYRLPIFAKLSEKKLEYMMLGDCVMLVNEMEITDHRVDNLFEKGKNEIKDSIGTNSVLNKKIILQKIRKLSNQPSGYWIGSLDERFLDHAIINQIDVTSEQIVLMSDGFYEFYQNNQNKTFEELIKMRFNSSAIDPIYGKKDDASILVIDV

SEQ ID NO: 3789 - DNA, 294 bp, Streptococcus pneumoniae
atggtaaagataaataaaatttgttcgatacaaggaagttccgtagaaaatgaggatattgtaggttcacaaaatcagtatttttggattattggtggagctacagatttatataattctaaagaggagataggttattcagtctcagaagttgtacatattttatcagaaagtttgtcggttaattgtaaagaatcaaaaactcttaaacaaatatttgaaactgctttactcgaggttaaagatgaaatcggtttaaactcatataaattaacagagtatagtaaaatgaaa

SEQ ID NO: 3790 - protein, 98 aa, Streptococcus pneumoniae
  hypothetical protein; Cellular location: cytoplasm; Similar to strain R6 sequence 15903693 (5.E-51)
MVKINKICSIQGSSVENEDIVGSQNQYFWIIGGATDLYNSKEEIGYSVSEVVHILSESLSVNCKESKTLKQIFETALLEVKDEIGLNSYKLTEYSKMK

SEQ ID NO: 3791 - DNA, 2124 bp, Streptococcus pneumoniae
atgaaatattttgttcctaatgaggtattcagtattcgtaaattaaaggtggggacttgctcggtactattggcaatttcaattttgggaagccaaggtattttatcggatgaagttgttactagttcttcaccgatggctacaaaagagtcttctaatgcaattactaatgatttagataattcaccaactgttaatcagaatcgttctgctgaaatgattgcctctaattcaaccactaatggtttagataattcgttaagtgttaatagtatcagctctaatggtactattcgttccaattcacaattagacaacagaacagttgaatctacagtaacatctactaatgaaaataagagttataaggaagatgttataagtgacagaattatcaaaaaagaatttgaagatactgctttaagtgtaaaagattatggtgcggtaggtgatgggattcatgatgatcgacaagcaattcaagatgcaatagatgctgcagctcaagggctaggtggaggaaatgtatattttcctgaaggaacttatttagtaaaagaaattgtttttttaaaaagtcatacacacttagaattgaatgagaaagctacaattctaaatggtataaatattaagaatcacccttccattgtttttatgacaggtttatttacggatgatggtgcgcaagtagaatggggcccaacagaagatattagttattctggtggtacgattgatatgaacggtgctttgaatgaagaaggaactaaagcaaaaaatctaccacttataaattcttcaggtgcatttgctattgggaattcaaataacgtaactataaaaaatgtaacattcaaggatagttatcaagggcatgctattcaaattgcaggttcgaaaaatgtattagttgataattctcgttttcttgggcaagccttacccaaaacgatgaaggatgggcaaatcataagtaaggagagcattcagattgaaccattaactagaaaaggttttccttatgccttgaatgatgatgggaaaaaatctgaaaatgtgactattcaaaattcctattttggcaaaagtgataaatctggggaattagtaacagcaattggcacacactatcaaacattgtcgacacagaacccctctaatattaaaattcaaaataatcattttgataacatgatgtatgcaggtgtacgttttacaggattcactgatgtattaatcaaaggaaatcgctttgataagaaagttaaaggagagagtgtacattatcgagaaagcggagcagctttagtaaatgcttatagctataaaaacactaaagacctattagatttaaataaacaggtggttatcgccgaaaatatatttaatattgccgatcctaaaacaaaagcgatacgagttgcaaaagatagtgcagaatatttaggaaaagtatcagatattactgtaacaaaaaatgtaattaataataattctaaggaaacagaacaaccaaatattgaattattacgagttagtgataatttagtagtctcagagaatagtatattcgggggtaaagaaggaattgttattgaggattcaaagggtaaaataaccgttttaaataaccaattttataatttatccggtaagtatatatcattcatcaaatctaatgcaaatgggaaagaacctgttatacgtgatagcgatggtaatttcaatattgtaacggagaatgggctttacaaaattgtaacaaataatttaagtgataaaaacgaaaaagaaaaaaacaaagaggaaaaacaatctaattcaaataatgtaattgatagtaaccagaagaacggagagtttaactcaagtaaagataatagacaaatgaatgacaagatcgacaataaacaagataataagacagaagaagtaaactataaaatagttggagatggcagagaaactgaaaatcatattaataaatctaaagaaatagtagatgtaaaacaaaaattaccaaagactggttcgaataagattatggaactattcttaacagtgacaggaattggtttacttttgacactaaaagggttgaagtattatggtaaagataaa

SEQ ID NO: 3792 - protein, 708 aa, Streptococcus pneumoniae
  cell wall surface anchor family protein; Cellular location: Peptidoglycan-bound (LPXTG); Similar to strain R6 sequence 15903694 (0.E+01)
MKYFVPNEVFSIRKLKVGTCSVLLAISILGSQGILSDEVVTSSSPMATKESSNAITNDLDNSPTVNQNRSAEMIASNSTTNGLDNSLSVNSISSNGTIRSNSQLDNRTVESTVTSTNENKSYKEDVISDRIIKKEFEDTALSVKDYGAVGDGIHDDRQAIQDAIDAAAQGLGGGNVYFPEGTYLVKEIVFLKSHTHLELNEKATILNGINIKNHPSIVFMTGLFTDDGAQVEWGPTEDISYSGGTIDMNGALNEEGTKAKNLPLINSSGAFAIGNSNNVTIKNVTFKDSYQGHAIQIAGSKNVLVDNSRFLGQALPKTMKDGQIISKESIQIEPLTRKGFPYALNDDGKKSENVTIQNSYFGKSDKSGELVTAIGTHYQTLSTQNPSNIKIQNNHFDNMMYAGVRFTGFTDVLIKGNRFDKKVKGESVHYRESGAALVNAYSYKNTKDLLDLNKQVVIAENIFNIADPKTKAIRVAKDSAEYLGKVSDITVTKNVINNNSKETEQPNIELLRVSDNLVVSENSIFGGKEGIVIEDSKGKITVLNNQFYNLSGKYISFIKSNANGKEPVIRDSDGNFNIVTENGLYKIVTNNLSDKNEKEKNKEEKQSNSNNVIDSNQKNGEFNSSKDNRQMNDKIDNKQDNKTEEVNYKIVGDGRETENHINKSKEIVDVKQKLPKTGSNKIMELFLTVTGIGLLLTLKGLKYYGKDK

SEQ ID NO: 3793 - DNA, 228 bp, Streptococcus pneumoniae
atgagcgatattcaggtaaatatccctggcgaatgcttgtatgacaaggtatttgttctttcatttataatttacaacatatcaacaaatttaaatatagtaaatgggatattttatattcaagctaagaaagatagcatcacttttgaatggaaggctaaagagcaaactaggaagttggccatagatagctcaaaaccctgctttgaggttgtagatatagtaaaa

SEQ ID NO: 3794 - protein, 76 aa, Streptococcus pneumoniae
  hypothetical protein; Cellular location: cytoplasm
MSDIQVNIPGECLYDKVFVLSFIIYNISTNLNIVNGIFYIQAKKDSITFEWKAKEQTRKLAIDSSKPCFEVVDIVK

SEQ ID NO: 3795 - DNA, 123 bp, Streptococcus pneumoniae
atgagtgagattgtggaaactcgcgtctttttttgttttcagaatattgttcaaaattttgtgcctgtctttcatgttctagtcattcttttgcatgatagaatttatagcatgttgatatta

SEQ ID NO: 3796 - protein, 41 aa, Streptococcus pneumoniae
  hypothetical protein; Cellular location: membrane
MSEIVETRVFFCFQNIVQNFVPVFHVLVILLHDRIYSMLIL

SEQ ID NO: 3797 - DNA, 174 bp, Streptococcus pneumoniae
atgatgtctagtaaggattctaaatgctacactaaattgctcacatcttatttcaaaccacgggactcccacaagaaaggaaaatcctataaaaattctctctctgaggagaaaggggcctcaactacaggtgtaaactattatcaattgaaaacaacagtttttacactcaat

SEQ ID NO: 3798 - protein, 58 aa, Streptococcus pneumoniae
  hypothetical protein; Cellular location: cytoplasm; Similar to strain R6 sequence 15903695 (4.E-29)
MMSSKDSKCYTKLLTSYFKPRDSHKKGKSYKNSLSEEKGASTTGVNYYQLKTTVFTLN

SEQ ID NO: 3799 - DNA, 1251 bp, Streptococcus pneumoniae
atgagtacagataaaaggagcaaatcaatgccaaattacaatattccattttcaccgcctgatatcacagaagcagaaattactgaagtagtggataccctgcgttctggttggatcacaacaggtcctaaaacaaaagaactggagcgccgcttgtctctttacacacagacacctaagactgtttgtctcaactctgcgacagccgctctggagttgattttacgcgttttggaagtgggacctggtgatgaagtcatcgttccagccatgacctatacggcttcatgtagtgtcattacgcacgtgggagcaacccctgtcatggtggatatccaagcagatacgtttgagatggactatgacctgcttgagcaagctatcactgagaaaactaaggtgattattccagtagagctcgcagggattgtttgcgattatgaccgtttgttccaagtcgtggagaaaaaacgtgacttctttaccgcttcaagcaagtggcaaaaggcctttaaccgtattgtcattgtctctgatagtgcccacgctttgggatctatttataaaggacaaccttctggttctatcgctgactttacttccttctcattccatgcagttaagaactttacaacggcagaaggtggaagtgcgacttggaaagccaatccagtgattgatgacgaagagatgtacaaggaattccaaatcctttcccttcacgggcaaactaaggatgctcttgccaagatgcaactggggtcatgggaatacgatatcgttacaccagcctataagtgcaacatgaccgatatcatggcttcacttggtttggtacaattggaccgctatccaagtttgttgcaacgccgtaaggacattgtggaccgctatgatagtggttttgcaggttctcgcatccatcctttggcacacaagactgaaactgtcgaatcttcacgccacctctacatcacccgtgtagaaggagcaagcctagaagaacgcaacctcatcatccaagaattggctaaagcaggaattgcaagtaatgttcactacaaaccgcttcctctcttgacagcctataagaatcttggatttgatatgacgaactatcctaaggcctatgccttctttgagaatgaaattaccctccctcttcatactaaattaagcgatgaagaagtagactatatcattgagactttcaaaacagtttctgaaaaagtgctaactttatcaaaaaaa

SEQ ID NO: 3800 - protein, 417 aa, Streptococcus pneumoniae
  capsular polysaccharide biosynthesis protein, putative; Cellular location: cytoplasm; Similar to strain R6 sequence 15903696 (0.E+01)
MSTDKRSKSMPNYNIPFSPPDITEAEITEVVDTLRSGWITTGPKTKELERRLSLYTQTPKTVCLNSATAALELILRVLEVGPGDEVIVPAMTYTASCSVITHVGATPVMVDIQADTFEMDYDLLEQAITEKTKVIIPVELAGIVCDYDRLFQVVEKKRDFFTASSKWQKAFNRIVIVSDSAHALGSIYKGQPSGSIADFTSFSFHAVKNFTTAEGGSATWKANPVIDDEEMYKEFQILSLHGQTKDALAKMQLGSWEYDIVTPAYKCNMTDIMASLGLVQLDRYPSLLQRRKDIVDRYDSGFAGSRIHPLAHKTETVESSRHLYITRVEGASLEERNLIIQELAKAGIASNVHYKPLPLLTAYKNLGFDMTNYPKAYAFFENEITLPLHTKLSDEEVDYIIETFKTVSEKVLTLSKK

SEQ ID NO: 3801 - DNA, 729 bp, Streptococcus pneumoniae
atgttgacaaatagtataataaaaacaaaggagaacagcatgctgaaatgggaagacttgcctgtggaaatgaaatcaagcgaggttgagtcttactaccagcttgtctctaaaaggaagggttcgctgattttcaagcgttgcttggactgggttttggccttggtcttactggttctgacctctcccatctttctcatcttgagcatttggatcaagttggatagcaaagggccagtgatttacaagcaagagcgtgtgacccagtacaaccgtcggttcaagatttggaagtttcgtaccatggtgacggatgcggataaaaaaggaagtctggtgacttctgctaacgatagccgcattaccaaggttggaaatttcatccgacgtgtccgtttggacgaactgcctcagttggtcaatgtccttaaaggtgagatgtcctttgtcggtacacgacctgaagtgccacgttatacagagcagtatagccctgaaatgatggcaaccttgctcttgcaagcagggattacctctccagccagcatcaactacaaggatgaggacacaattatcagtcaaatgacggagaaaggtctgtcagttgatcaggcctatgtggagcatgttcttcctgaaaagatgcgctataacctcgcctatctccgagagtttagtttctttggggacatcaaaatcatgtttcaaaccgtgtttgaggtactaaaa

SEQ ID NO: 3802 - protein, 243 aa, Streptococcus pneumoniae
  glycosyl transferase, putative; Cellular location: membrane; Similar to strain R6 sequence 15903697 (e-129)
MLTNSIIKTKENSMLKWEDLPVEMKSSEVESYYQLVSKRKGSLIFKRCLDWVLALVLLVLTSPIFLILSIWIKLDSKGPVIYKQERVTQYNRRFKIWKFRTMVTDADKKGSLVTSANDSRITKVGNFIRRVRLDELPQLVNVLKGEMSFVGTRPEVPRYTEQYSPEMMATLLLQAGITSPASINYKDEDTIISQMTEKGLSVDQAYVEHVLPEKMRYNLAYLREFSFFGDIKIMFQTVFEVLK

SEQ ID NO: 3803 - DNA, 1749 bp, Streptococcus pneumoniae
atgcagaataaacaagaacaatggactgtattgaagcgcttgatgtcttatctcaagccttatggactcctgacctttttggcactcagttttctcctagcgacgacggtcattaaaagtgtcatacccctcgtggcttcccactttatcgaccagtatctcagcaatcttaaccaactagccgttaccgttttgctggtctactatggtctctacatcctacaaactgtagttcagtatgtcggcaatcttctctttgcgcgcgtgtcttacagtattgttagggatattcgtcgggatgcctttgccaatatggagaaactgggcatgtcttactttgacaagacgccagcaggttctatcgtttctcgtttgaccaacgataccgagacgattagtgatatgttttctgggattttatccagctttatctcagcagtttttatctttctgacaaccctttataccatgttggtgctggattttcgtttgacggctttagtcttgctctttcttcctttgattttccttttggtcaatctctatcgaaaaaagtcagtgaaaatcatcgagaaaaccagaagtctcttgtcagatatcaatagtaagctggcagagaatatcgagggaatcaggattattcaggcctttaatcaagagaagcgcctgcaggcagaatttgatgaaatcaaccaagaacacttggtctacgccaaccgttctgtagccttggatgccctctttttgagacctgccatgagtttgctgaaacttctaggctatgcagtcttgatggcctactttggctaccgtggtttttctatcgggataacggtcgggaccatgtatgcctttatccagtacatcaaccgcctttttgaccccttgattgaggtgacgcaaaacttttcaactctgcaaacggctatggtttctgcaggtcgtgtctttgccctgatagacgagaggacctatgaacctcttcaagaaaatgggcaagccaaagtccaagaaggcaatatccgttttgaacatgtgtgtttctcatatgacggtaaacatccgattctggatgacatttctttctctgttaataagggtgaaaccattgcctttgtaggtcatacaggttcagggaaatcgtctattatcaatgtcctcatgcgcttttatgaattccagtcagggagagttctcttggatgatgtggatatcagggatttcagtcaagaagagctgagaaaaaacatcggtttggtcttgcaggaacccttcctctatcatggaactattaagtccaatatcgccatgtaccaagaaaccagtgatgagcaggttcaggctgcggcagcctttgtggatgcagattcctttattcaagaacttcctcaggggtacgactcccctgtttccgagcgtggttcgagcttctctactgggcaacgccagcttcttgcctttgctagaacagtcgccagccagcctaaaatcctgattttggatgaagcgacagccaatattgactctgaaacagaaagcttggttcaagcttctctggcgaagatgagacagggccgaacaactattgctatcgctcaccgcctttctactattcaagatgccaactgcatctatgtcttggataagggacgcattatcgagagtggaacccatgaggaactcttggctctgggaggaacctatcacaagatgtatagtttgcaggcaggggccatggccgatactctt

SEQ ID NO: 3804 - protein, 583 aa, Streptococcus pneumoniae
  ABC transporter, ATP-binding/permease protein; Cellular location: membrane; Similar to strain R6 sequence 15903698 (0.E+01)
MQNKQEQWTVLKRLMSYLKPYGLLTFLALSFLLATTVIKSVIPLVASHFIDQYLSNLNQLAVTVLLVYYGLYILQTVVQYVGNLLFARVSYSIVRDIRRDAFANMEKLGMSYFDKTPAGSIVSRLTNDTETISDMFSGILSSFISAVFIFLTTLYTMLVLDFRLTALVLLFLPLIFLLVNLYRKKSVKIIEKTRSLLSDINSKLAENIEGIRIIQAFNQEKRLQAEFDEINQEHLVYANRSVALDALFLRPAMSLLKLLGYAVLMAYFGYRGFSIGITVGTMYAFIQYINRLFDPLIEVTQNFSTLQTAMVSAGRVFALIDERTYEPLQENGQAKVQEGNIRFEHVCFSYDGKHPILDDISFSVNKGETIAFVGHTGSGKSSIINVLMRFYEFQSGRVLLDDVDIRDFSQEELRKNIGLVLQEPFLYHGTIKSNIAMYQETSDEQVQAAAAFVDADSFIQELPQGYDSPVSERGSSFSTGQRQLLAFARTVASQPKILILDEATANIDSETESLVQASLAKMRQGRTTIAIAHRLSTIQDANCIYVLDKGRIIESGTHEELLALGGTYHKMYSLQAGAMADTL

SEQ ID NO: 3805 - DNA, 1677 bp, Streptococcus pneumoniae
gtggccctgatcttggtttccgtcctcaatctcattcctcctatggttatggggcgggtcattgatgccatcacatcggggcaattaacccagcaggacctccttcttagcctattttacttgctacttgcagcctttggtatgtactatttgcgctatgtgtggcgtatgtatatccttgggacctcttattgcttgggacagatcatgcggtctcgcttgtttaagcatttcacaaaaatgtcgtcagccttttatcaaacctatcggacgggtgatctgatggcacacgcaaccaatgatatcaatgccttgactcgtttagcaggtggcggtgtcatgtctgcggtggatgcctctatcacggctctggtgactttgttgaccatgctctttagcatctcatggcagatgactcttgttgccattctccccctacctttcatggcctatacgactagtcgcctagggagaaagactcataaggcctttggcgaatcccaagctgctttttctgaactcaataacaaggtacaggagtccgtatcaggtatcaaagtgaccaagtctttcggttatcaggcagacgagttgaagtcttttcaggcagtcaatgaattaaccttccaaaagaacctgcaaaccatgaaatatgatagtctctttgaccctatggttctcttgtttgttggttcgtcctatgttttaacgcttttggttggctccttgatggttcaggaagggcagattacagttgggaatctagtcacctttatcagctatttggatatgctggtctggcctcttctggccatcggtttcctctttaatactactcagcgagggaaggtttcttaccagcggattgaaaatcttttgtctcaggaatctcctgtacaagaccctgagtttcctctggatggtattgaaaatgggcgtttggagtatgccattgacagctttgcttttgaaaatgaggaaacactgacggatattcactttagtttggcaaaagggcaaacactgggcttggttgggcagacaggctctgggaaaacgtccttaatcaagctcctcttgcgtgaatacgatgtggataagggtgccatttatctaaacggtcacgatattcgggactatcgtctgacagaccttcgcagtctcatgggctatgttcctcaggaccagtttctttttgcgacttcaatcctagacaatatccgctttggcaatcctaacttgcccctttcagcggtcgaggaagctactaagctagcccgggtttaccaagatattgtagacatgcctcaaggatttgatacgctgattggtgaaaaaggagtcagtctttctggtggtcaaaagcaacggttggctatgagtcgggctatgattttagaccctgatatcttgattttggatgattccttatccgccgtagatgccaagacagagtatgcgattatcgacaacctcaaggagatgcgaaaggacaagacaaccattatcactgcccatcgcctcagtgctgttgtccatgcagattttattttagttctacaaaatggtcaaattatcgaacgaggcacgcacgaagacttgctagctttggatggctggtatgcccaaacctaccagtctcagcagttggaaatgaaaggagaagaagatgcagaa

SEQ ID NO: 3806 - protein, 559 aa, Streptococcus pneumoniae
  ABC transporter, ATP-binding/permease protein; Cellular location: membrane; Similar to strain R6 sequence 15903699 (0.E+01)
MALILVSVLNLIPPMVMGRVIDAITSGQLTQQDLLLSLFYLLLAAFGMYYLRYVWRMYILGTSYCLGQIMRSRLFKHFTKMSSAFYQTYRTGDLMAHATNDINALTRLAGGGVMSAVDASITALVTLLTMLFSISWQMTLVAILPLPFMAYTTSRLGRKTHKAFGESQAAFSELNNKVQESVSGIKVTKSFGYQADELKSFQAVNELTFQKNLQTMKYDSLFDPMVLLFVGSSYVLTLLVGSLMVQEGQITVGNLVTFISYLDMLVWPLLAIGFLFNTTQRGKVSYQRIENLLSQESPVQDPEFPLDGIENGRLEYAIDSFAFENEETLTDIHFSLAKGQTLGLVGQTGSGKTSLIKLLLREYDVDKGAIYLNGHDIRDYRLTDLRSLMGYVPQDQFLFATSILDNIRFGNPNLPLSAVEEATKLARVYQDIVDMPQGFDTLIGEKGVSLSGGQKQRLAMSRAMILDPDILILDDSLSAVDAKTEYAIIDNLKEMRKDKTTIITAHRLSAVVHADFILVLQNGQIIERGTHEDLLALDGWYAQTYQSQQLEMKGEEDAE

SEQ ID NO: 3807 - DNA, 93 bp, Streptococcus pneumoniae
ttgattttcattgagtattggcctcaggtttccatttgcaatcagaaagggattttatgtccattattcaaaaactttggtggtttttcaagt

SEQ ID NO: 3808 - protein, 31 aa, Streptococcus pneumoniae
  box element
MIFIEYWPQVSICNQKGILCPLFKNFGGFSS

SEQ ID NO: 3809 - DNA, 375 bp, Streptococcus pneumoniae
gtgaaacgtttgattgatggtaagccaactctccttatcaaaaatgggaatattgacccagaagcctgtcgttcagttggtttgtctgcatcggatgtatccctcaaacttcgtagccaagggattttccagatgaagcaagtcaaacgagctgtgcaagagcaaaatgggcaactcatcgttgtgcaaatgggagatgaaaatcctaagtatccagttgtgactgacggtgtgattcaagtagatgtcttggaatcgattggtcgtagcgaagagtggttgcttgataacctcagtaaacaagggcatgacaatgtagccaatatctttattgctgaatatgacaagggtgctgttacagtcgtaacttatgaa

SEQ ID NO: 3810 - protein, 125 aa, Streptococcus pneumoniae
  conserved domain protein; Cellular location: cytoplasm; Similar to strain R6 sequence 15903700 (8.E-67)
MKRLIDGKPTLLIKNGNIDPEACRSVGLSASDVSLKLRSQGIFQMKQVKRAVQEQNGQLIVVQMGDENPKYPVVTDGVIQVDVLESIGRSEEWLLDNLSKQGHDNVANIFIAEYDKGAVTVVTYE

SEQ ID NO: 3811 - DNA, 111 bp, Streptococcus pneumoniae
gtgggagatcgctattatcgtgccctaaatggaagtgagccagacaagtacctgttagagaaagtcgaattgtataagacagacgcaattgaactggtggatgtgaacaaa

SEQ ID NO: 3812 - protein, 37 aa, Streptococcus pneumoniae
  hypothetical protein; Cellular location: cytoplasm; Similar to strain R6 sequence 15903701 (1.E-16)
MGDRYYRALNGSEPDKYLLEKVELYKTDAIELVDVNK

SEQ ID NO: 3813 - DNA, 93 bp, Streptococcus pneumoniae
ttggtcagcatcacgacttatcaaaacaatcaagtttctaacaataaatttcaaacttcacttcatttcatcgaggttgtttccaaagatttg

SEQ ID NO: 3814 - protein, 31 aa, Streptococcus pneumoniae
  hypothetical protein; Cellular location: cytoplasm; Similar to strain R6 sequence 15903701 (6.E-13)
MVSITTYQNNQVSNNKFQTSLHFIEVVSKDL

SEQ ID NO: 3815 - DNA, 225 bp, Streptococcus pneumoniae
atgaaattctactcttatgactatgtactcagccaaatcggtcagcaaaatggtatcatggttggctttgggattgttctattagctgtgacagttttttttgctttcaaggcataccataataaaaagggaagcgaatttcgtgagttggtcatgatttcagatctggccttatttagctctgcttttggtcagcatcacgacttatcaaaacaatcaagtttc

SEQ ID NO: 3816 - protein, 75 aa, Streptococcus pneumoniae
  hypothetical protein; Cellular location: outside
MKFYSYDYVLSQIGQQNGIMVGFGIVLLAVTVFFAFKAYHNKKGSEFRELVMISDLALFSSAFGQHHDLSKQSSF

SEQ ID NO: 3817 - DNA, 825 bp, Streptococcus pneumoniae
atgaaacttatctcatggaatattgattccctaaacgctgccctaactagtgactcagctcgtgccaaattgtcccaagaagtcctacaaaccttggtcgctgaaaatgctgatatcattgctatccaagaaaccaagctttctgccaaaggacctacaaagaaacacgtggaaattttagaagaactcttcccaggctacgaaaacacgtggcgctcttcccaagagcctgcccgtaaaggctatgctggaaccatgttcctttataagaaagaacttacacctactatcagcttcccagaaatcggtgccccttctaccatggacttggaaggtcgtatcatcactctagaatttgatgcatttttcgtaacccaagtttacactccaaacgctggtgacggtctcaaacgcttggaagaacgccaagtctgggatgccaaatatgctgagtatttggctgaactagacaaagaaaaaccagtccttgcgaccggtgactacaacgtagcccacaatgaaatcgaccttgcaaatcctgctagcaaccgccgttcacctggatttactgacgaggaacgtgctggatttaccaaccttttggcaactggatttacagacaccttccgccatgttcatggcgatgttcctgaacgctacacttggtgggcacaacgcagcaaaacttctaaaatcaacaatacaggctggagaatcgactactggctcacaagtaaccgtatcgctgacaaggtcactaaatctgatatgattgactcaggtgctcgccaagaccatacaccgattgtcttggaaattgacttg

SEQ ID NO: 3818 - protein, 275 aa, Streptococcus pneumoniae
  exodeoxyribonuclease (exoA); Cellular location: cytoplasm; Similar to strain R6 sequence 15903702 (e-160)
MKLISWNIDSLNAALTSDSARAKLSQEVLQTLVAENADIIAIQETKLSAKGPTKKHVEILEELFPGYENTWRSSQEPARKGYAGTMFLYKKELTPTISFPEIGAPSTMDLEGRIITLEFDAFFVTQVYTPNAGDGLKRLEERQVWDAKYAEYLAELDKEKPVLATGDYNVAHNEIDLANPASNRRSPGFTDEERAGFTNLLATGFTDTFRHVHGDVPERYTWWAQRSKTSKINNTGWRIDYWLTSNRIADKVTKSDMIDSGARQDHTPIVLEIDL

SEQ ID NO: 3819 - DNA, 141 bp, Streptococcus pneumoniae
atggactacaatgcggtcattcccgagttgcttgtatcgaatatcgaacagtcccggtccttctactgtggtttactgggttttaggattgaataccaacgtccagaagaaaactttctctttctcttgaagagtgtcaac

SEQ ID NO: 3820 - protein, 47 aa, Streptococcus pneumoniae
  hypothetical protein
MDYNAVIPELLVSNIEQSRSFYCGLLGFRIEYQRPEENFLFLLKSVN

SEQ ID NO: 3821 - DNA, 102 bp, Streptococcus pneumoniae
atgttagaggagggaacaaaggatcaactagctgaactgacctatccctttggtcgtggagtcaatctctcctttggcataaaggatgtttcaaaactctat

SEQ ID NO: 3822 - protein, 34 aa, Streptococcus pneumoniae
  hypothetical protein
MLEEGTKDQLAELTYPFGRGVNLSFGIKDVSKLY

SEQ ID NO: 3823 - DNA, 126 bp, Streptococcus pneumoniae
atgaaggcaaactatcctatttatcgtcccttgaccaaaagaaagtttcgtgtcagtgatccctatatctatcctcataaatttgcagttttggatccagatggctattttttaagatttagcgag

SEQ ID NO: 3824 - protein, 42 aa, Streptococcus pneumoniae
  conserved hypothetical protein, FRAMESHIFT POINT MUTATION
MKANYPIYRPLTKRKFRVSDPYIYPHKFAVLDPDGYFLRFSE

SEQ ID NO: 3825 - DNA, 171 bp, Streptococcus pneumoniae
atgccttttatgatggaaaaatcttctaatactcttcgaaaatctcttcaagccacgtcaacgtcgccttaccgtaggtatatgatactggctctgtcaattctatccacaacctcaaaacagtgttttgaggttgtggatagcttcctagtttgctctttgattttcatt

SEQ ID NO: 3826 - protein, 57 aa, Streptococcus pneumoniae
  box element
MPFMMEKSSNTLRKSLQATSTSPYRRYMILALSILSTTSKQCFEVVDSFLVCSLIFI

SEQ ID NO: 3827 - DNA, 579 bp, Streptococcus pneumoniae
atgaaattattagaagagcgcatcctcaaggatgggcatatcttgggtgataacatcctcaaggtagattcctttttaacccaccaagttgactttagcttgatgcgagagattggtaaggtttttgcggaaaaatttgctactactggcattaccaaggtcgtaaccattgaagcgtcgggtattgccccagccgtttttacagctgaagccttaaacgttcccatgattttcgccaaaaaagctaagaacatcaccatgaacgaaggcatcttaactgctcaagtctactcctttaccaagcaggtgaccagcaccgtttctatcgctgaaaaattcctctcaccagaggacaaggttttgattatcgacgatttccttgctaatggccaagctgctaaaggcttgattcaaatcatcgaacaggccggtgccacagtccaagctatcggtatcgtgattgagaaatccttccaagatggtcgtgatttgcttgaaaaagcaggctaccctgtcctatcacttgctcgtttggattgttttgaaaatggtcaagtcgtatttaaggaggcagatctc

SEQ ID NO: 3828 - protein, 193 aa, Streptococcus pneumoniae
  xanthine phosphoribosyltransferase (xpt); Cellular location: cytoplasm; Similar to strain R6 sequence 15903704 (e-100)
MKLLEERILKDGHILGDNILKVDSFLTHQVDFSLMREIGKVFAEKFATTGITKVVTIEASGIAPAVFTAEALNVPMIFAKKAKNITMNEGILTAQVYSFTKQVTSTVSIAEKFLSPEDKVLIIDDFLANGQAAKGLIQIIEQAGATVQAIGIVIEKSFQDGRDLLEKAGYPVLSLARLDCFENGQVVFKEADL

SEQ ID NO: 3829 - DNA, 1260 bp, Streptococcus pneumoniae
atgcaaactcaagaaaaacactcgcaagcagccgttcttggcttgcagcacttactagccatgtactcaggatctatcctggttcccatcatgattgcgacagcccttggctattcagctgagcagttgacctacctgatttctacagatatcttcatgtgtggggtggcaaccttcctccaactccaactcaacaaatactttgggattggactcccagtcgttcttggagttgcattccagtcggtcgctcccttgattatgattgggcaaagccatggtagtggcgctatgtttggtgcccttatcgcatctgggatttacgtggttcttgtttcaggcatcttctcaaaagtagccaatctcttcccatctatcgtaacaggatctgttattaccacgattggtttaaccttgatccctgtcgctattggaaatatgggaaataacgttccagagccaactggtcaaagtctcttgcttgcagctattactgttctgattatcctcttgatcaacatctttaccaaaggatttatcaagtctatctctattttgattggtctggttgttggaactgccattgctgctactatgggcttggtggacttctctcctgttgcggtagctccacttgtccatgtcccaactccactctactttgggatgccaacctttgaaatctcatctattgtcatgatgtgtatcatcgcaacggtgtctatggttgagtcaactggtgtttatctggccttgtctgatatcacaaaggatccaatcgacagcacgcgccttcgcaacggataccgcgcagaaggtttggccgtacttctcggaggaatctttaacaccttcccttacaccggattttcacaaaacgttggtttggttaaattgtcaggcatcaaaaaacgcctgccaatctactacgcagctggtttcctggttctccttggactgcttcctaagtttggcgcccttgcccaaatcattccaagctccgtcctcggtggtgccatgctggtaatgtttggttttgtatcaattcaagggatgcaaatcctcgcccgtgttgactttgctaacaatgaacacaacttccttatcgcagctgtttcaatcgctgcaggtgtcggtctcaacaacagtaatctctttgtcagcatgccgacagccttccaaatgttcttctcaaacggaatcgtcgtagccagcctactcgctattgtcctcaatgccgtattaaatcataaaaagaaa

SEQ ID NO: 3830 - protein, 420 aa, Streptococcus pneumoniae
  xanthine permease (pbuX); Cellular location: membrane; Similar to strain R6 sequence 15903705 (0.E+01)
MQTQEKHSQAAVLGLQHLLAMYSGSILVPIMIATALGYSAEQLTYLISTDIFMCGVATFLQLQLNKYFGIGLPVVLGVAFQSVAPLIMIGQSHGSGAMFGALIASGIYVVLVSGIFSKVANLFPSIVTGSVITTIGLTLIPVAIGNMGNNVPEPTGQSLLLAAITVLIILLINIFTKGFIKSISILIGLVVGTAIAATMGLVDFSPVAVAPLVHVPTPLYFGMPTFEISSIVMMCIIATVSMVESTGVYLALSDITKDPIDSTRLRNGYRAEGLAVLLGGIFNTFPYTGFSQNVGLVKLSGIKKRLPIYYAAGFLVLLGLLPKFGALAQIIPSSVLGGAMLVMFGFVSIQGMQILARVDFANNEHNFLIAAVSIAAGVGLNNSNLFVSMPTAFQMFFSNGIVVASLLAIVLNAVLNHKKK

SEQ ID NO: 3831 - DNA, 459 bp, Streptococcus pneumoniae
atgaaaacgaaacaacttgttgcatcagaagaggtgtatgatttcttaaaagtcatctggcctgattatgaaactgaaagccgttacgataacctaagtttaatcgtctgtaccttatcagatcccgattgtgtgagatggttatctgaaaatatgaaatttggtgacgaaaaacaactagctttgatgaaggaaaaatatgggtgggaagtaggagataaattgccagagtggctacatagctcctatcatagattattgttaataggtgaattattggaaagcaatctaaaactgaaaaagtatacagtagaaattacagaaactttatcacgtttagtaagtatagaggctgaaaatccagatgaagccgaacgacttgtaagagaaaagtataagagttgtgaaattgttcttgatgcagatgattttcaggactatgacactagcatatatgaa

SEQ ID NO: 3832 - protein, 153 aa, Streptococcus pneumoniae
  DpnD protein (dpnD); Cellular location: cytoplasm; Similar to strain R6 sequence 15903706 (2.E-87)
MKTKQLVASEEVYDFLKVIWPDYETESRYDNLSLIVCTLSDPDCVRWLSENMKFGDEKQLALMKEKYGWEVGDKLPEWLHSSYHRLLLIGELLESNLKLKKYTVEITETLSRLVSIEAENPDEAERLVREKYKSCEIVLDADDFQDYDTSIYE

SEQ ID NO: 3833 - DNA, 762 bp, Streptococcus pneumoniae
atggaattacattttaatttagaattagtagaaacctataaaagtaatagccaaaaggcacgtatcttaacggaggattgggtttatcgtcagtcttattgccctaattgtgggaacaatcccttaaatcattttgaaaataatcggcctgtagcagatttttactgtaatcattgtagtgaggagtttgaactaaagagcaaaaaaggaaatttttcatcaacaatcaatgatggtgcttatgcaacgatgatgaagcgtgtgcaggcagataataatcctaatttcttttttttaacttacacaaaaaattttgaggtaaataactttcttgtccttccgaagcaatttgttacaccgaaatcgattattcaaagaaaaccacttgcaccaactgctagacgagcaggttggattggttgtaacattgatttatcacaagtaccttctaaaggaaggatatttcttgtgcaagatggacaagttagagatccagaaaaagttacaaaagaatttaagcaaggtttatttttaaggaagagctctctgtcatcaagaggttggacaatagaaattctaaattgtatagataagatagagggttcagaatttacccttgaagatatgtatcgttttgaaagtgacctaaaaaatatctttgttaagaacaatcatatcaaagaaaagattaggcaacagcttcaaatattaagagacaaagaaataatagaatttaaaggtagaggaaagtatcggaaatta

SEQ ID NO: 3834 - protein, 254 aa, Streptococcus pneumoniae
  type II restriction endonuclease DpnI (dpnC); Cellular location: cytoplasm; Similar to strain R6 sequence 15903707 (e-150)
MELHFNLELVETYKSNSQKARILTEDWVYRQSYCPNCGNNPLNHFENNRPVADFYCNHCSEEFELKSKKGNFSSTINDGAYATMMKRVQADNNPNFFFLTYTKNFEVNNFLVLPKQFVTPKSIIQRKPLAPTARRAGWIGCNIDLSQVPSKGRIFLVQDGQVRDPEKVTKEFKQGLFLRKSSLSSRGWTIEILNCIDKIEGSEFTLEDMYRFESDLKNIFVKNNHIKEKIRQQLQILRDKEIIEFKGRGKYRKL

SEQ ID NO: 3835 - DNA, 225 bp, Streptococcus pneumoniae
ttggcctgtgacaaacatggtaaaggttgctttgcagacatttctgccctcttgattggtgatatccacatccattacacaagttgtacgaccttgatggacacattctcctttaatggtcaatacatcgtcgagttttcctgccttaaggtagttgatagaggattggagtgtcaccccatcaagtcccagcgagataaccaccaaaccactgatttggtcaca

SEQ ID NO: 3836 - protein, 75 aa, Streptococcus pneumoniae
  hypothetical protein
MACDKHGKGCFADISALLIGDIHIHYTSCTTLMDTFSFNGQYIVEFSCLKVVDRGLECHPIKSQRDNHQTTDLVT

SEQ ID NO: 3837 - DNA, 402 bp, Streptococcus pneumoniae
atgaaagactttcattttgacgctatatctgcctttgaaaattacgaaattgaaaaaatgagagatggtcacgttgtggtgacgaccaaagtagtgaactcgtcgctcaactactatggcaatgcccatggtggctatctattcacgctatgtgaccaaatcagtggtttggtggttatctcgctgggacttgatggggtgacactccaatcctctatcaactaccttaaggcaggaaaactcgacgatgtattgaccattaaaggagaatgtgtccatcaaggtcgtacaacttgtgtaatggatgtggatatcaccaatcaagagggcagaaatgtctgcaaagcaacctttaccatgtttgtcacaggccaaaggtctgaggaaagacgggtaaggata

SEQ ID NO: 3838 - protein, 134 aa, Streptococcus pneumoniae
  conserved hypothetical protein; Cellular location: membrane; Similar to strain R6 sequence 15903708 (2.E-74)
MKDFHFDAISAFENYEIEKMRDGHVVVTTKVVNSSLNYYGNAHGGYLFTLCDQISGLVVISLGLDGVTLQSSINYLKAGKLDDVLTIKGECVHQGRTTCVMDVDITNQEGRNVCKATFTMFVTGQRSEERRVRI

SEQ ID NO: 3839 - DNA, 111 bp, Streptococcus pneumoniae
gtgggtgctatctttgcgcgtgtacttgaggatgcaggagtctacaagcagacagaacaagggcagacagcctttatgcgctttgtggaacaggtcggaattttactagac

SEQ ID NO: 3840 - protein, 37 aa, Streptococcus pneumoniae
  galactose-1-phosphate uridylyltransferase-related
MGAIFARVLEDAGVYKQTEQGQTAFMRFVEQVGILLD

SEQ ID NO: 3841 - DNA, 195 bp, Streptococcus pneumoniae
ttggtctgcccactcctgatgataatcggcaactgtaacagcttctcctacaagatagctagcgacttgctccacttcttctttcagacgtggtggcaagattgccaagcccatgacctcaatcaagccgatattttccttcttgatatgttggacatccttgtggggatgatagataccatcaggatactctgc

SEQ ID NO: 3842 - protein, 65 aa, Streptococcus pneumoniae
  hypothetical protein
MVCPLLMIIGNCNSFSYKIASDLLHFFFQTWWQDCQAHDLNQADIFLLDMLDILVGMIDTIRILC

SEQ ID NO: 3843 - DNA, 1478 bp, Streptococcus pneumoniae
gtgaccttagtaaataaatttgtaacacatgtcatttctgaaagctcatttgaggaaatggatcgaatctatctgaccaatcgtgttttggcacgagtgggagaaggtgttttggaagttgagaccaatctggataaattgattgacctcaaggaccagctggttgaagaagccgttcgattagagacgattgaggatagtcagactgcgcgtgaaatccttggtgctgaactgatggatttggtgactccttgtccaagtcaggtcaatcgtgatttttgggcaacctacgcccactctccagaacaagcgatagaggatttttaccaactcagtcagaaaaatgactacatcaaactcaaggccattgctagaaatatcgcttatcgtgttccatctgactacggagaacttgaaattaccatcaatctctctaagcctgaaaaagatcccaaagagattgtggcagccaagttggtgcaagctagtaattatcctcagtgtcagctttgtctagagaatgagggctaccatggtcgagttaaccacccagctcgtagcaatcaccgtattatccgttttgaaatggttggtcaggaatggggtttccagtattcgccctatgcttactttaatgagcattgtatctttttagatggccagcatcgtcccatggccattagtcgtcagagttttgaacgtctgttggctatcgtagaccagtttccaggatattttgctggatctaatgccgacctgccgattgtggggggctctattctaactcatgatcattatcagggaggccgtcacgtatttcctatggaattggctcccttgcaaaaggccttccgatttgctggttttgagcaggtcaaggctggaattgtcaagtggcccatgtctgtcctacgtttgacttcggattccaaagaggatttgatcaatttggctgataagattttgcaggaatggcgccagtattcagatcctgcagtgcagattttggcagagacagacaggacaccgcatcacactatcacacccattgcccgcaaacgcgatggacagtttgagttggacttggtcttgcgagacaatcagacttcagcagagtatcctgatggtatctatcatccccacaaggatgtccaacatatcaagaaggaaaatatcggcttgattgaggtcatgggcttggcaatcttgccaccacgtctgaaagaagaagtggagcaagtcgctagctatcttgtaggagaagctgttacagttgccgattatcatcaggagtgggcagaccaactcaaatcccaacatccagactaacggataaagaaaaagcccttgcaatcgtcaaggactctgtgggtgctatctttgcgcgtgtacttgaggatgcaggagtctacaagcagacagaacaagggcagacagcctttatgcgctttgtggaacaggtcggaattttactagac

SEQ ID NO: 3844 - protein, 442 aa, Streptococcus pneumoniae
  galactose-1-phosphate uridylyltransferase FRAMESHIFT (galT)
MTLVNKFVTHVISESSFEEMDRIYLTNRVLARVGEGVLEVETNLDKLIDLKDQLVEEAVRLETIEDSQTAREILGAELMDLVTPCPSQVNRDFWATYAHSPEQAIEDFYQLSQKNDYIKLKAIARNIAYRVPSDYGELEITINLSKPEKDPKEIVAAKLVQASNYPQCQLCLENEGYHGRVNHPARSNHRIIRFEMVGQEWGFQYSPYAYFNEHCIFLDGQHRPMAISRQSFERLLAIVDQFPGYFAGSNADLPIVGGSILTHDHYQGGRHVFPMELAPLQKAFRFAGFEQVKAGIVKWPMSVLRLTSDSKEDLINLADKILQEWRQYSDPAVQILAETDRTPHHTITPIARKRDGQFELDLVLRDNQTSAEYPDGIYHPHKDVQHIKKENIGLIEVMGLAILPPRLKEEVEQVASYLVGEAVTVADYHQEWADQLKSQHPD

SEQ ID NO: 3845 - DNA, 1176 bp, Streptococcus pneumoniae
atggcacaacatcttactactgaagcccttcgcaaagactttcttgctgtttttggtcaagaagcagatcaaaccttcttttcaccaggccgcattaatttgattggtgaacacacagactacaacggtgggcacgtttttcctgctgctatttccttgggaacttacggtgcagctcgtaagcgtgacgaccaagtcttgcgtttctactcagctaactttgaggacaagggcattatcgaagtgcctctcgctgacctcaagtttgaaaaagagcacaactggaccaattatccaaaaggtgtccttcatttcttgcaagaagctgggcacgtgattgacaaaggttttgatttttatgtttatggaaatattccaaatggtgctggcttgtcttcttctgcatccttggaactcttgacaggagtcgtggctgagcatctctttgatttaaaattagagcgtctcgatttggttaaaatcggcaaacaaacagaaaacaactttatcggagtaaactctggcattatggaccagtttgctattggtatgggggcagaccaacgtgctatttacctagatactaatactttagaatacgacttggtgccacttgatttgaaggacaatgtcgttgttatcatgaacaccaacaaacgccgtgaattggcggactctaaatacaatgaacgtcgtgctgagtgtgaaaaagcagtggaagaattgcaagtttccttggatattcagactctgggtgaattggacgagtgggccgttgaccaatatagctatctgattaaagatgaaaatcgtttgaaacgtgctcgccatgctgtgcttgaaaaccaacgtaccctcaaagctcaagtagcactccaagcaggagatttggaaacatttggacgcttgatgaatgcgtcacacgtttctctggagcatgattatgaagtaactggtttggaattggatacccttgttcacacagcttgggcacaagaaggagttctcggtgctcgtatgacaggggctggttttggtggctgtgccattgccttggttcaaaaagatactgttgaggcctttaaggaagctgtaggcaaacactacgaggaagtagttggatacgctccaagcttctatatcgctgaagttgcaggtggcactcgcgtccttgac

SEQ ID NO: 3846 - protein, 392 aa, Streptococcus pneumoniae
  galactokinase (galK); Cellular location: cytoplasm; Similar to strain R6 sequence 15903709 (0.E+01)
MAQHLTTEALRKDFLAVFGQEADQTFFSPGRINLIGEHTDYNGGHVFPAAISLGTYGAARKRDDQVLRFYSANFEDKGIIEVPLADLKFEKEHNWTNYPKGVLHFLQEAGHVIDKGFDFYVYGNIPNGAGLSSSASLELLTGVVAEHLFDLKLERLDLVKIGKQTENNFIGVNSGIMDQFAIGMGADQRAIYLDTNTLEYDLVPLDLKDNVVVIMNTNKRRELADSKYNERRAECEKAVEELQVSLDIQTLGELDEWAVDQYSYLIKDENRLKRARHAVLENQRTLKAQVALQAGDLETFGRLMNASHVSLEHDYEVTGLELDTLVHTAWAQEGVLGARMTGAGFGGCAIALVQKDTVEAFKEAVGKHYEEVVGYAPSFYIAEVAGGTRVLD

SEQ ID NO: 3847 - DNA, 1005 bp, Streptococcus pneumoniae
atggctaccttaaaagacattgcacagctagcctctgtctctatcgcgaccgtatcccgcgtcctcaaccgcgaccagagcctatctgttacagaagaaaccagacaccgtattttaaccgttgctgaagagctgggctacaccaagcacctcaagacaggcgagtcccacaaacccaagcaaaagattgccattatccaatgggtcagcgaacaaggggagctggacgacctctactactaccagattcgcctaggaatagaaaaaagagcccaagagttggactatgatatcttgcgctattttaatgaccacccttttaccctaagcgaggaagtgattgggattctctgcatcggaaagtttagtcgagctcagatttctgcctttgaagaataccaaaagcctcttgtatttctagacagcgatacactttccctgggacatacctgtattatcacggatttttacactgctatgaaacaggttgtcgattatttcctcagtcaaggaatggaccgtatcgggattctaacaggccttgaagaaacaacagaccaagaagaaatcattcaggacaagcgtctagaaaacttcaaaaactatagtcaagcgaggggaatctatcatgatgaactggtctttcaaggaagatttactgcccagtctggctatgacttaatgaaggaggccattcagagcttgggagaccaacttccgccagcatttttcgcagccagcgatagtttagctatcggtgccctccgtgccctccaagaagctggaatcagcctgccagatcgcgtcagcctcatttcctttaacgacactagtctgaccaaacaggtctatcctcccctctctagtattacagtttatactgaagaaatgggccgagcaggtatggatattcttaacaaggaagtcctccacggtcggaaaatccctagcctgaccatgctgggaaccagactgacattaagagaaagtaccctaaatcaagaa

SEQ ID NO: 3848 - protein, 335 aa, Streptococcus pneumoniae
  galactose operon repressor (galR); Cellular location: cytoplasm; Similar to strain R6 sequence 15903711 (0.E+01)
MATLKDIAQLASVSIATVSRVLNRDQSLSVTEETRHRILTVAEELGYTKHLKTGESHKPKQKIAIIQWVSEQGELDDLYYYQIRLGIEKRAQELDYDILRYFNDHPFTLSEEVIGILCIGKFSRAQISAFEEYQKPLVFLDSDTLSLGHTCIITDFYTAMKQVVDYFLSQGMDRIGILTGLEETTDQEEIIQDKRLENFKNYSQARGIYHDELVFQGRFTAQSGYDLMKEAIQSLGDQLPPAFFAASDSLAIGALRALQEAGISLPDRVSLISFNDTSLTKQVYPPLSSITVYTEEMGRAGMDILNKEVLHGRKIPSLTMLGTRLTLRESTLNQE

SEQ ID NO: 3849 - DNA, 1035 bp, Streptococcus pneumoniae
atgaaatcagcagtatatacaaaggcaggtcaggttggacttgctagcattgaacgtccgcaaataatagaagcggatgatgtgattattcgtgtggttcgtgcgtgcgtttgtggttcagatttatggaggtaccgtaatccagaaacgaaagctggacacaaaaatagtggacacgaagcgattgggattgttgaagaagctggggaagccattacgacggtgaaaccaggtgattttgtgattgtcccttttacacatggatgtggtgagtgtgatgcctgtcttgctggatttgacggttcttgcgacaatcatattggcaataatttggggggtgattttcaggcagaatatattcgcttccactatgcaaactgggcgctggttaaaatccctggtcaaccttctgactatacagaagggatgctcaagtcccttttgactcttgcagatgtcatgccgacaggctatcatgcggcgcgtgttgcaaatgttcaaaaaggggacaaggttgttgttatcggtgatggggctgttggtcaatgtgctgtcatcgcggctaagatgcgtggagcatcacaaattatccttatgagccgtcatgaagaccgtcaaaagatggctatggagtcaggtgcgacagctgttgttgcagaacgtggtcaagaaggaattaccaaggtgcgtgaaatcctcggtggaggagcagatgcagcacttgaatgtgttggtacggaggctgctatagaacaggcgctaggtgttcttcataatggagggcgtatgggctttgtaggagtcccacactataataatcgtgctcttggttcgacatttatgcaaaatatctctgtagcaggtggggcagcttctgctacaacatacgataagcaatttttactaaaagccgtccttgatggtgatatcaatccaggtcgcgtctttacttcaagttataaactggaagatatcgaccaagcctataaagatatggatgaacgtaagacaattaagtctatgattgtaatcgaa

SEQ ID NO: 3850 - protein, 345 aa, Streptococcus pneumoniae
  alcohol dehydrogenase, zinc-containing; Cellular location: membrane; Similar to strain R6 sequence 15903712 (0.E+01)
MKSAVYTKAGQVGLASIERPQIIEADDVIIRVVRACVCGSDLWRYRNPETKAGHKNSGHEAIGIVEEAGEAITTVKPGDFVIVPFTHGCGECDACLAGFDGSCDNHIGNNLGGDFQAEYIRFHYANWALVKIPGQPSDYTEGMLKSLLTLADVMPTGYHAARVANVQKGDKVVVIGDGAVGQCAVIAAKMRGASQIILMSRHEDRQKMAMESGATAVVAERGQEGITKVREILGGGADAALECVGTEAAIEQALGVLHNGGRMGFVGVPHYNNRALGSTFMQNISVAGGAASATTYDKQFLLKAVLDGDINPGRVFTSSYKLEDIDQAYKDMDERKTIKSMIVIE

SEQ ID NO: 3851 - DNA, 351 bp, Streptococcus pneumoniae
gtgaatattaaatctgccagtgatttgttgggaatttcagcggatacgattcggtattatgaacgggttggtcttgtgccaccgattactcgtactgctactgggattcgtgattttcaagatcaggatatcgaagcgctggaatttattaagtgttttcgttcggcgggtgtctctgtagatagtttagttgactatatgtcgctctaccaaaagggagatgaaacgagagaggagaggcttggtattttagaagaggaaaagcaaaaattagaggagcgcttgtctcagctacagacagctttaaatcgtttaaatctcaaaattaaactttataaggaaggaaaattt

SEQ ID NO: 3852 - protein, 117 aa, Streptococcus pneumoniae
  transcriptional regulator, MerR family; Cellular location: cytoplasm; Similar to strain R6 sequence 15903713 (5.E-62)
MNIKSASDLLGISADTIRYYERVGLVPPITRTATGIRDFQDQDIEALEFIKCFRSAGVSVDSLVDYMSLYQKGDETREERLGILEEEKQKLEERLSQLQTALNRLNLKIKLYKEGKF

SEQ ID NO: 3853 - DNA, 897 bp, Streptococcus pneumoniae
atgagaaatatgaaggcaaaatatgctgtttgggtggcttttttcttaaatttgacttatgccattgttgagtttattgcaggtggagtatttggttctagcgctgttcttgctgactctgtgcatgacttgggagatgcgattgcaattggaatatcagcttttctagaaacaatctccaatcgtgaagaagacaatcagtacaccttgggctataagcggtttagcctgctaggagccttggtaacagctgtgattctcgtaacgggctctgttctagtcattttggaaaatgtcacgaagattttgcatccgcaaccagtcaatgatgaggggattctctggttaggaattattgcgattactatcaatctgttagcgagtctggtggttggtaagggaaagacaaagaatgagtctattctgagtctgcattttctggaagatacgctagggtgggtagctgttatcctgatggcgattgttcttcgatttacggactggtatatcctagatcctcttttgtcccttgtcatttctttctttattctttcaaaagcccttccacgtttttggtctacactcaagattttcttggatgctgtgccagaaggtcttgatatcaagcaagtaaagagtggcctggagcgattggacaatgtggccagccttaatcagcttaatctctggactatggatgctttggaaaaaaatgccattgtccatgtttgtctaaaagaaatggaacatatggaaacttgtaaagagtctattcgaattttcctaaaagattgtggttttcaaaatattaccattgaaattgatgctgacctagaaactcaccaaacccataagcgaaaggtgtgtgacttggaacggagttatgagcatcaacat

SEQ ID NO: 3854 - protein, 299 aa, Streptococcus pneumoniae
  cation efflux system protein; Cellular location: membrane; Similar to strain R6 sequence 15903714 (e-170)
MRNMKAKYAVWVAFFLNLTYAIVEFIAGGVFGSSAVLADSVHDLGDAIAIGISAFLETISNREEDNQYTLGYKRFSLLGALVTAVILVTGSVLVILENVTKILHPQPVNDEGILWLGIIAITINLLASLVVGKGKTKNESILSLHFLEDTLGWVAVILMAIVLRFTDWYILDPLLSLVISFFILSKALPRFWSTLKIFLDAVPEGLDIKQVKSGLERLDNVASLNQLNLWTMDALEKNAIVHVCLKEMEHMETCKESIRIFLKDCGFQNITIEIDADLETHQTHKRKVCDLERSYEHQH

SEQ ID NO: 3855 - DNA, 534 bp, Streptococcus pneumoniae
atgactaacattgaccgccgtatcagcaaaaccaaaaaagccatctatcaagcttttatacaacttttgaatgctaagggctacgaggccactactgttcaggatatcattgatctcgcagatgtgggacgatccaccttttactgtcactatgagagtaaggagcttcttctggaccagctctgccgctacctcttccatcatctttttgaaagagagcaagccatttcaaccgaggactacctcgcccacctctttctccattttcataaaaaccaagaccatatcaccagtctgctattttccaaaaatgactacttcctccgtcaactccataaagagctagaacaccatgtctattccgtgctagctgataatttaaaagaagcccaccctaatctgcctacttcttacctccaacacttggtcatgtccaactttatcgagacattgacctggtggctcaaaaaaggtcaagatttcacagaccaggaagttgtccaattttatctagaccttctcattcctaaaaat

SEQ ID NO: 3856 - protein, 178 aa, Streptococcus pneumoniae
  transcriptional regulator, TetR family; Cellular location: cytoplasm; Similar to strain R6 sequence 15903715 (e-103)
MTNIDRRISKTKKAIYQAFIQLLNAKGYEATTVQDIIDLADVGRSTFYCHYESKELLLDQLCRYLFHHLFEREQAISTEDYLAHLFLHFHKNQDHITSLLFSKNDYFLRQLHKELEHHVYSVLADNLKEAHPNLPTSYLQHLVMSNFIETLTWWLKKGQDFTDQEVVQFYLDLLIPKN

SEQ ID NO: 3857 - DNA, 807 bp, Streptococcus pneumoniae
atgatgcatacttatttgcaaaagaaaattgaaaatatcaaaacaaccctaggtgaaatgtcaggtggttaccgtcgtatggttgcggctatggctgatttaggattttcaggaactatgaaggctatctgggatgacctctttgcccatcgtagttttgcccagtggatttatttgctggttttaggaagttttcctctctggctggagttggtttacgaacatcgtattgttgactggattgggatgatttgtagcttgacagggattatctgtgtaatctttgtatcggaaggtcgagcaagtaattatctttttggcttgattaactctgttatttaccttattttggccctacagaaaggcttttatggtgaggtgctgacgacactttacttcacagtcatgcagccaattggacttctagtttggatttatcaggcacagtttaagaaggaaaagcaggagtttgtcgcgcgtaaactggacggcaagggctggacaaagtatctttccattagtgtgctttggtggttggcctttggcttcatttatcagtctattggtgccaatcgtccctatcgtgattcaatcacagatgcaaccaatggggtagggcaaatcctcatgacagctgtttaccgtgaacagtggatattctgggcggctaccaatgtcttttcaatctatctctggtggggagaaagcctgcaaattcaagggaaatatctaatttatctcattaacagtctagttggttggtatcaatggagcaaggcagctaagcagaatactgatttacttaac

SEQ ID NO: 3858 - protein, 269 aa, Streptococcus pneumoniae
  conserved domain protein; Cellular location: membrane; Similar to strain R6 sequence 15903716 (e-160)
MMHTYLQKKIENIKTTLGEMSGGYRRMVAAMADLGFSGTMKAIWDDLFAHRSFAQWIYLLVLGSFPLWLELVYEHRIVDWIGMICSLTGIICVIFVSEGRASNYLFGLINSVIYLILALQKGFYGEVLTTLYFTVMQPIGLLVWIYQAQFKKEKQEFVARKLDGKGWTKYLSISVLWWLAFGFIYQSIGANRPYRDSITDATNGVGQILMTAVYREQWIFWAATNVFSIYLWWGESLQIQGKYLIYLINSLVGWYQWSKAAKQNTDLLN

SEQ ID NO: 3859 - DNA, 1518 bp, Streptococcus pneumoniae
atgactaatttaattgcaacttttcaggatcgttttagtgattggttgacagctctatctcaacatttgcagttgtcgcttttgaccttgttactagctattttgcttgcgattcccttggctgtttttcttcgctatcatgagaagctggccgactgggtcttgcagattgcaggtattttccagaccatcccgtctctggccttgttggggctctttatccctttgatgggaattgggaccttgccggctttgacagctctagtgatttatgcgattttccctattttgcaaaatactatcactgggctgaagggaattgatccgaacctgcaagaggctgggattgcctttgggatgaccagatgggaacgtctcaagaaatttgaaattccactcgccatgcctgttatcatgtctgggattcggacggcagctgttttgattatcggtacggcaaccttggcggccttgattggtgcagggggactaggttcctttattcttttgggaattgaccgtaataatgccagtttgattttgattggggcactttcttctgcagtgctagccattgcctttaacttcctactaaaagtgatggaaaaagcaaaattacggacgattttctcaggttttgccttggtggctttattactgggtctgtcttatagtccagctcttttggttcaaaaagagaaggaaaacttggttattgctgggaaaataggtccagaaccagaaattttggccaatatgtataagttgctgattgaagaaaataccagcatgactgcgactgttaaaccgaattttgggaagacaagcttcctttatgaagctctgaaaaaaggcgatattgacatctatcctgaatttactggtacggtgactgaaagtttgcttcaaccatcacccaaggtgagtcatgaaccagaacaggtttatcaggtggcgcgtgatggcattgctaagcaggatcatctagcctatctcaaacccatgtcttatcaaaacacctatgctgtagctgttccgaaaaagattgctcaagaatatggcttgaagaccatttcagacttgaaaaaagtggaagggcagttgaaggcaggttttacactcgagtttaacgaccgtgaagatggaaataagggcttgcaatcaatgtatggtctcaatctcaatgtagcgaccattgagccagcccttcgctatcaggctattcagtcaggggatattcaaatcacggatgcctattcgactgatgcggaattggagcgttatgatttacaggtcttggaagatgacaagcaactcttcccaccttatcaaggggctccactcatgaaagaagctcttctcaagaaacacccagagttggaaagagttcttaatacattggctggtaagattacagaaagccagatgagccagctcaactaccaagtcggtgttgaaggcaagtcagcaaagcaagtagccaaggagtttctccaagaacaaggtttgttgaagaaa

SEQ ID NO: 3860 - protein, 506 aa, Streptococcus pneumoniae
  choline transporter (proWX); Cellular location: membrane; Similar to strain R6 sequence 15903719 (0.E+01)
MTNLIATFQDRFSDWLTALSQHLQLSLLTLLLAILLAIPLAVFLRYHEKLADWVLQIAGIFQTIPSLALLGLFIPLMGIGTLPALTALVIYAIFPILQNTITGLKGIDPNLQEAGIAFGMTRWERLKKFEIPLAMPVIMSGIRTAAVLIIGTATLAALIGAGGLGSFILLGIDRNNASLILIGALSSAVLAIAFNFLLKVMEKAKLRTIFSGFALVALLLGLSYSPALLVQKEKENLVIAGKIGPEPEILANMYKLLIEENTSMTATVKPNFGKTSFLYEALKKGDIDIYPEFTGTVTESLLQPSPKVSHEPEQVYQVARDGIAKQDHLAYLKPMSYQNTYAVAVPKKIAQEYGLKTISDLKKVEGQLKAGFTLEFNDREDGNKGLQSMYGLNLNVATIEPALRYQAIQSGDIQITDAYSTDAELERYDLQVLEDDKQLFPPYQGAPLMKEALLKKHPELERVLNTLAGKITESQMSQLNYQVGVEGKSAKQVAKEFLQEQGLLKK

SEQ ID NO: 3861 - DNA, 726 bp, Streptococcus pneumoniae
atgattgaatacaaaaatgtagcactgcgctacacagaaaaggatgtcttgagagatgtcaacttacagattgaggatggggaatttatggttttagtagggccttctgggtcaggtaagacgaccatgctcaagatgattaaccgtcttttggaaccaactgatggaaatatttatatggatgggaagcgcatcaaagactatgatgagcgtgaacttcgtctttctactggttatgttttacaggctattgctctttttccaaatctaacagttgcggaaaatattgctctcattcctgaaatgaaggggtggagcaaggaagaaattacgaagaaaacagaagagcttttggctaaggttggtttaccagtagccgagtatgggcatcgcttacctagtgaattatctggtggagaacagcaacgggtcggtattgtccgagctatgattggtcagcccaagattttcctcatggatgaacccttttcggccttggatgctatttcgagaaaacagttgcaggttctgacaaaagaattgcataaagagtttgggatgacaacgatttttgtaacccatgatacggatgaagccttgaagttggcggaccgtattgctgtcttgcaggatggagaaattcgccaggtagcgaatcccgagacaattttaaaagcgcctgcaacagactttgtagcagacttgtttggaggtagtgttcatgac

SEQ ID NO: 3862 - protein, 242 aa, Streptococcus pneumoniae
  choline transporter (proV); Cellular location: cytoplasm; Similar to strain R6 sequence 15903720 (e-132)
MIEYKNVALRYTEKDVLRDVNLQIEDGEFMVLVGPSGSGKTTMLKMINRLLEPTDGNIYMDGKRIKDYDERELRLSTGYVLQAIALFPNLTVAENIALIPEMKGWSKEEITKKTEELLAKVGLPVAEYGHRLPSELSGGEQQRVGIVRAMIGQPKIFLMDEPFSALDAISRKQLQVLTKELHKEFGMTTIFVTHDTDEALKLADRIAVLQDGEIRQVANPETILKAPATDFVADLFGGSVHD

SEQ ID NO: 3863 - DNA, 762 bp, Streptococcus pneumoniae
atgtcacaacaagtgaaaaatgctcacaacctatacatccatgccattcaagacggacgagttgctgaggctcaagcccagtctgtaggggatacctatatccaacattcgacaggtgttcctgacgggaaagaaggatttgcagccttctttgcagatttctttgagcgtcatccagagcgtcagattaagattgtccgcaccattgaggatggcaatctggtctttgttcatgttcatcaatatctgaatggtggagaagctcaatgggtgacgacggatactttccgtgaggatgagaatggttgtattgttgagcattgggatgtcattgactactatcgaacacctgaaaatgaccaactagatcaaatttttggagattttgaaatcaaggatttggataagaaagcagaaaataaaaagctggttcgccgtttcttgacagaaattttccaaaatggggagctagagcagtggagtgattatgtggcagacgatttgattcagcataatcatgatattggacaaggaagtgctgcttataaaaactatgtggctgaatatagtgtcacttttgactttgttttccaactcttaggacaaggaaactatgtggttagctatggtcagactcagattgatggcgttgcttatgcccagtacgatatcttccgtttagagaacgggaaaattgtggagcattgggataataaggaagttatgcctaaggtagaagacttgaccaatcgagggaagttt

SEQ ID NO: 3864 - protein, 254 aa, Streptococcus pneumoniae
  hypothetical protein; Cellular location: cytoplasm; Similar to strain R6 sequence 15903721 (e-151)
MSQQVKNAHNLYIHAIQDGRVAEAQAQSVGDTYIQHSTGVPDGKEGFAAFFADFFERHPERQIKIVRTIEDGNLVFVHVHQYLNGGEAQWVTTDTFREDENGCIVEHWDVIDYYRTPENDQLDQIFGDFEIKDLDKKAENKKLVRRFLTEIFQNGELEQWSDYVADDLIQHNHDIGQGSAAYKNYVAEYSVTFDFVFQLLGQGNYVVSYGQTQIDGVAYAQYDIFRLENGKIVEHWDNKEVMPKVEDLTNRGKF

SEQ ID NO: 3865 - DNA, 441 bp, Streptococcus pneumoniae
atgaaagatggtcatttgctagcccatcatattcgtttgttgaatgggcggatttttcaaaagttactgagtcaagatcctgaggctctttataggggtgaacagggcaagattttagcggttttatggaatagtgaaactggctgcgcaactgcgacagatatcgcgcttgcgactggacttgcgaataatacgctgacgactatgataaaaaagctagaggaacaaaagcttgtaattgttagtccgtgtggaaaagacaagcgtaagaagtatttagttttaacggagttaggcaagtcccagaaagaagtggggcatcgtgtcagtcagaaattggatactatcttttacaaaggattttcagaggaagaaattcaccaatttgaaggttttcaagaaagaattttggcgaatctgaaagagaagggaaatgaggtt

SEQ ID NO: 3866 - protein, 147 aa, Streptococcus pneumoniae
  transcriptional regulator, MarR family; Cellular location: cytoplasm; Similar to strain R6 sequence 15903722 (2.E-81)
MKDGHLLAHHIRLLNGRIFQKLLSQDPEALYRGEQGKILAVLWNSETGCATATDIALATGLANNTLTTMIKKLEEQKLVIVSPCGKDKRKKYLVLTELGKSQKEVGHRVSQKLDTIFYKGFSEEEIHQFEGFQERILANLKEKGNEV

SEQ ID NO: 3867 - DNA, 294 bp, Streptococcus pneumoniae
atggtagaaccaaacctagaaagccttataaaagatctttacaatcatgctcgacatgatttgagtgaagatttagttgctgctctcctagagactactaaaaaactgcctactacaaatgagcaattgcaggcagttcgtctctcaggcctggtcaatcgtgaattgctcctaaatcccaaacatccagcacctgagttgctcaacttggctcgctttgtcaaaagagaagaagccaagtacagaggaactgcgacttctgcgcttatgtatgaggaactctttaaaatgctt

SEQ ID NO: 3868 - protein, 98 aa, Streptococcus pneumoniae
  conserved hypothetical protein; Cellular location: cytoplasm; Similar to strain R6 sequence 15903723 (3.E-50)
MVEPNLESLIKDLYNHARHDLSEDLVAALLETTKKLPTTNEQLQAVRLSGLVNRELLLNPKHPAPELLNLARFVKREEAKYRGTATSALMYEELFKML

SEQ ID NO: 3869 - DNA, 1062 bp, Streptococcus pneumoniae
atgacaacattattttcaaaaattaaagaagtaacagaacttgctgcagtctcaggtcatgaagcgcctgtccgtgcttatcttcgtgaaaagttgacaccgcatgtggatgaagtggtgacagatggcttgggtggtatttttggtatcaaacattcagaagctgtggatgcaccgcgcgtcttggtcgcttctcatatggacgaagttggttttatggtcagcgaaatcaagccagatggtaccttccgtgtcgtagaaatcggtggctggaaccccatggtggttagcagccaacgtttcaaactcttgactcgtgatggtcatgaaattcctgtgatttcaggttctgttcctccgcatttgactcgtggaaaggggggaccaaccatgccagccattgccgatatcgtttttgatggtggttttgcggacaaggctgaggcagaaagttttggcatccgtcctggtgataccattgtaccagatagttctgcaattttgacagccaatgaaaaaaatatcatctcaaaagcttgggataaccgctacggtgtcctcatggtaagcgagctagctgaagctttatcgggtcaaaaactcggcaatgaactctatctgggttctaacgtccaagaagaagttggtctgcgtggcgctcatacctctacaaccaagtttgacccagaagtcttcctcgcagttgattgctcaccagcaggtgatgtctacggtggtcaaggcaagattggagatggaaccttgattcgtttctatgatccaggtcacttgcttctcccagggatgaaggatttccttttgacaacggctgaagaagctggtatcaagtaccaatactactgtggtaaaggcggaacagatgcaggtgcagctcatctgaaaaatggtggtgtcccatcaacaactatcggtgtctgcgctcgttatatccattctcaccaaaccctctatgcaatggatgacttcctagaagcgcaagctttcttacaagccttggtgaagaaattggatcgttcaacggttgatttgattaaacattat

SEQ ID NO: 3870 - protein, 354 aa, Streptococcus pneumoniae
  glutamyl-aminopeptidase (pepA); Cellular location: cytoplasm; Similar to strain R6 sequence 15903724 (0.E+01)
MTTLFSKIKEVTELAAVSGHEAPVRAYLREKLTPHVDEVVTDGLGGIFGIKHSEAVDAPRVLVASHMDEVGFMVSEIKPDGTFRVVEIGGWNPMVVSSQRFKLLTRDGHEIPVISGSVPPHLTRGKGGPTMPAIADIVFDGGFADKAEAESFGIRPGDTIVPDSSAILTANEKNIISKAWDNRYGVLMVSELAEALSGQKLGNELYLGSNVQEEVGLRGAHTSTTKFDPEVFLAVDCSPAGDVYGGQGKIGDGTLIRFYDPGHLLLPGMKDFLLTTAEEAGIKYQYYCGKGGTDAGAAHLKNGGVPSTTIGVCARYIHSHQTLYAMDDFLEAQAFLQALVKKLDRSTVDLIKHY

SEQ ID NO: 3871 - DNA, 120 bp, Streptococcus pneumoniae
ttgcatgtagtgcaaaatctagtaaacattccaaaattaactcgaatatttatttccaaacaaaaaaacaatacaccatcaaagttgtttggatttttcatgaaatttacagaaaatagt

SEQ ID NO: 3872 - protein, 40 aa, Streptococcus pneumoniae
  hypothetical protein; Cellular location: cytoplasm
MHVVQNLVNIPKLTRIFISKQKNNTPSKLFGFFMKFTENS

SEQ ID NO: 3873 - DNA, 699 bp, Streptococcus pneumoniae
atgaccaaaacaattcttgttacaggtgggactagctacattggctcccataccgttaaagctcttttaaatgctggctatcaggtgcatgtcctcgataatctctccacaggaaatcgagcggctgtggatagtcgtgctagctttaaagaactggatgtttatgatgctagcgccttaaaggcttacttagaagaaaatcagattgatgctgtcctccattgtgcaggtgaaattgttgtgagcgaaagtattgaaaatccaagtaaatacttcactgccaacgttgctggtatgaaccaagttctcaaagtcttatctgaagttggcattcaaaaaatcatgttctcttcgactgcttctctctatggaaataactgtattgacaagccggtgactgaagataccctgctcgaccctgtcaacccttatgcagagacaaaactgatgggcgaacgaatgatttactggatggccaatcgctacgactggaaatatgttattttccgttactttaatgttgctggggctgaaatggatgcttcaaacggtctgcgtgtgaaaaatccaactcacatcattccaaatatcaacaagaccgcattgggacaaaatgatagcttaaaaatatttggagatgactacgatacacgtgacggttcatgtattcgagattacatttatgtcttggaccttgca

SEQ ID NO: 3874 - protein, 233 aa, Streptococcus pneumoniae
  NAD-dependent epimerase/dehydratase family protein; Cellular location: cytoplasm; Similar to strain R6 sequence 15903725 (e-132)
MTKTILVTGGTSYIGSHTVKALLNAGYQVHVLDNLSTGNRAAVDSRASFKELDVYDASALKAYLEENQIDAVLHCAGEIVVSESIENPSKYFTANVAGMNQVLKVLSEVGIQKIMFSSTASLYGNNCIDKPVTEDTLLDPVNPYAETKLMGERMIYWMANRYDWKYVIFRYFNVAGAEMDASNGLRVKNPTHIIPNINKTALGQNDSLKIFGDDYDTRDGSCIRDYIYVLDLA

SEQ ID NO: 3875 - DNA, 108 bp, Streptococcus pneumoniae
atgaactacctatttcaagaagacagttcttctcaaatctttaacttaggaactaaaaaaggctatactatcaaagaaatctttaaaactgctgaagaattactaaat

SEQ ID NO: 3876 - protein, 36 aa, Streptococcus pneumoniae
  conserved domain protein; Cellular location: cytoplasm
MNYLFQEDSSSQIFNLGTKKGYTIKEIFKTAEELLN

SEQ ID NO: 3877 - DNA, 972 bp, Streptococcus pneumoniae
atgaaaggacggggtatgaaactttctcattatttaattggcttacttctactcctagtctttctctctattagcattgggaccagtgatttttcatggggaaagctatttgatttcgaccagcagacctggctcctctttcaagagtcccgtctcccaagaactatcagtattctcctgactgcctctagtatgagtatggcaggccttctcatgcagactattacccaaaatcagtttgctgcaccgagtacagttggaacgactgaagccgccaaactgggaatggtgctgagcctttttgtctttccatcggctagtctgacccacaagatgctcttcgcttttgtttcatccatcgtattcaccctcttcttcctagcctttatgaccatttttactgtaaaggaaaggtggatgttgcctctgattgggatcatctatagcgggattatcggctcagtcacagaagttatcgcctatcgtttcaatctggttcagagtatgactgcctggacccagggctccttctccatgattcagacccatcagtatgagtggctcttcttaggcctcatcatcctgataaccgtttggaaattatcccaaaccttcaccatcatgaatctagggaaagaaaccagcgagagtttggggatttcctactccctacttgaaaaactggccctctttctggtggcgctaacgacaagcgtcaccatgattaccgtgggtggcctaccatttctcggagttatcgttcccaatcttgttcgcaagcgctatggagataatctaagtcaaaccaaactcatggtcgcactggttggtgccaatctagttctggcttgcgatatcctatcccgagttctgattaggccctatgagttgtctgtcagtctcttgctaggaatcatcggtagtctcgtctttatcctacttctctggagagggggacgaaaagatgcagac

SEQ ID NO: 3878 - protein, 324 aa, Streptococcus pneumoniae
  iron-compound ABC transporter, permerase protein; Cellular location: membrane; Similar to strain R6 sequence 15903726 (e-179)
MKGRGMKLSHYLIGLLLLLVFLSISIGTSDFSWGKLFDFDQQTWLLFQESRLPRTISILLTASSMSMAGLLMQTITQNQFAAPSTVGTTEAAKLGMVLSLFVFPSASLTHKMLFAFVSSIVFTLFFLAFMTIFTVKERWMLPLIGIIYSGIIGSVTEVIAYRFNLVQSMTAWTQGSFSMIQTHQYEWLFLGLIILITVWKLSQTFTIMNLGKETSESLGISYSLLEKLALFLVALTTSVTMITVGGLPFLGVIVPNLVRKRYGDNLSQTKLMVALVGANLVLACDILSRVLIRPYELSVSLLLGIIGSLVFILLLWRGGRKDAD

SEQ ID NO: 3879 - DNA, 954 bp, Streptococcus pneumoniae
atgcagactaaaagcaaacataccaagctcttctggattctcattattcttgccatcggagcttgtcttctctacttttggcccatcactcacttgtcagcctttgcttggaagttgcgttcccaaaagatcatcgtttatctcttggtagccatcgcgactgggatttcgaccattagttttcaaaccctgacggaaaatcgcttcctgacgcctagtattttgggaattgaatccttctacgtcctactacaaaccctactactggtttttgaaagcaagtttcttcaacttggcaaatcccctatcttagaattcctagtcttacttcttgtccagtccctcttctttctcgccttacaaggttacttgaagacactgatgaagcaagacctggtcttcgtcctgctgatctgtctagcgctcagaagtctctttcgaaatatcagcaccttccttcaagtcctaatggatccaaacgaatacgataaactgcaaaatagtctttttgcctcctttcaacatctcaacacttccatcctagccatcggttctctgatcatcctcgctttgacaatctttttctttcgaaaagcagtcgttctagatgtcttgcacctgcaaagagaaacggctcagatattgggactcgatgttgaaaaagaacagaaagagctcctctggggaatcgtgcttttgacctcaacggccactgccttggtaggacctatggccttcttcggctttatactggccaacctcacctacctgattgtcaaagactatcagcacaagttactctttatagtggccattctggttggatttattagcttaaccttggggcaagccttgattgaacgagtctttgcactggaaattcgtatcagtatgatcattgagagtgtgggtggcttcttattctttatcttactatataggaggtctcgtcag

SEQ ID NO: 3880 - protein, 318 aa, Streptococcus pneumoniae
  iron-compound ABC transporter, permease protein; Cellular location: membrane; Similar to strain R6 sequence 15903727 (e-173)
MQTKSKHTKLFWILIILAIGACLLYFWPITHLSAFAWKLRSQKIIVYLLVAIATGISTISFQTLTENRFLTPSILGIESFYVLLQTLLLVFESKFLQLGKSPILEFLVLLLVQSLFFLALQGYLKTLMKQDLVFVLLICLALRSLFRNISTFLQVLMDPNEYDKLQNSLFASFQHLNTSILAIGSLIILALTIFFFRKAVVLDVLHLQRETAQILGLDVEKEQKELLWGIVLLTSTATALVGPMAFFGFILANLTYLIVKDYQHKLLFIVAILVGFISLTLGQALIERVFALEIRISMIIESVGGFLFFILLYRRSRQ

SEQ ID NO: 3881 - DNA, 750 bp, Streptococcus pneumoniae
gtgaaactggaaaacattgacaaatccattcaaaaacaggatattttgcaaggcatttcgcttgaagtcagtcctcaaaaactgacagcctttattggtccaaatggtgctggaaaatcgactctcctctccatcatgagcaggctaaccaagaaagatcagggagttctcagtatcaaaggacgtgaaatcgagagctggaattcgcaagaactggcccaagaactaaccatcctaaaacagaaaatcaattaccaagccaaattgactgttgaagaactggtcagttttggacgttttccctacagccgaggtcgacttagatcagaagactgggaaaaaatccgagaaactctgaactatttagaactgaccaacttaaaagaccgctacatcaatagcctgtcaggggggcaactccagcgcgtctttatcgctatggtactggcccaggatacggactttatcttgctggacgaaccactcaacaatctcgatatcaagcaaagcgtcagcatgatgcagattcttcgacgactggtggaggaactcggcaagaccattatcatcgtcctccacgatatcaacatggccagtcagtatgcagatgaaattgtcgccttcaaggacggccaggtctttagcaagggaagaaccgatcaaatcatgcaggctgacctgctcagtcaactttatgagattcccatcacgctagctgatatcaatgacaaaaagatctgtatctatagc

SEQ ID NO: 3882 - protein, 250 aa, Streptococcus pneumoniae
  iron-compound ABC transporter, ATP-binding protein; Cellular location: cytoplasm; Similar to strain R6 sequence 15903728 (e-137)
MKLENIDKSIQKQDILQGISLEVSPQKLTAFIGPNGAGKSTLLSIMSRLTKKDQGVLSIKGREIESWNSQELAQELTILKQKINYQAKLTVEELVSFGRFPYSRGRLRSEDWEKIRETLNYLELTNLKDRYINSLSGGQLQRVFIAMVLAQDTDFILLDEPLNNLDIKQSVSMMQILRRLVEELGKTIIIVLHDINMASQYADEIVAFKDGQVFSKGRTDQIMQADLLSQLYEIPITLADINDKKICIYS

SEQ ID NO: 3883 - DNA, 963 bp, Streptococcus pneumoniae
atgaaaacatcccttaaactttatttcactgccctagtggccagcttcttgctcctacttggtgcatgtagtacaaactcaagcactagtcagacagagaccagtagctctgctccaacagaggtaaccattaaaagttcactggacgaggtcaaactttccaaagttcctgaaaagattgtgacctttgacctcggcgctgcggatactattcgcgctttaggatttgaaaaaaatatcgtcggaatgcctacaaaaactgttccgacttatctaaaagacctagtgggaactgtcaaaaatgttggttctatgaaagaacctgatttagaagctatcgccgcccttgagcctgatttgattatcgcttcgccacgtacacaaaaattcgtagacaaattcaaagaaatcgccccaaccgttctcttccaagcaagcaaggacgactactggacttctaccaaggctaatatcgaatccttagcaagtgccttcggcgaaactggtacacagaaagccaaggaagaattgaccaagctagacaagagcatccaagaagtcgctactaaaaatgaaagctctgacaaaaaagcccttgcgatcctccttaatgaaggaaaaatggcagcctttggtgccaaatctcgtttctctttcttgtaccaaaccttgaaattcaaaccaactgatacaaaatttgaagactcacgccacggacaagaagtcagctttgaaagtgtcaaagaaatcaaccctgacatcctctttgtcatcaaccgtacccttgccatcggtggggacaactctagcaacgacggtgtcctagaaaatgcccttatcgctgaaacacctgctgctaaaaatggtaagattatccaactaacaccagacctctggtatctaagcggaggcggacttgaatcaacaaaactcatgattgaagacatacaaaaagctttgaaa

SEQ ID NO: 3884 - protein, 321 aa, Streptococcus pneumoniae
  iron-compound ABC transporter, iron-compound-binding protein; Cellular location: lipoprotein; Similar to strain R6 sequence 15903729 (e-177)
MKTSLKLYFTALVASFLLLLGACSTNSSTSQTETSSSAPTEVTIKSSLDEVKLSKVPEKIVTFDLGAADTIRALGFEKNIVGMPTKTVPTYLKDLVGTVKNVGSMKEPDLEAIAALEPDLIIASPRTQKFVDKFKEIAPTVLFQASKDDYWTSTKANIESLASAFGETGTQKAKEELTKLDKSIQEVATKNESSDKKALAILLNEGKMAAFGAKSRFSFLYQTLKFKPTDTKFEDSRHGQEVSFESVKEINPDILFVINRTLAIGGDNSSNDGVLENALIAETPAAKNGKIIQLTPDLWYLSGGGLESTKLMIEDIQKALK

SEQ ID NO: 3885 - DNA, 153 bp, Streptococcus pneumoniae
gtgaacttgataggatgcgttttagaatgtcaaaattttatactcttcgaaaatctcttcaaaccgcgtcagctttcatctgcaacctcaaaacagtgttttgagcaacctgcggctagtttcctagtttgctctttgattttcattgagtat

SEQ ID NO: 3886 - protein, 51 aa, Streptococcus pneumoniae
  box element
MNLIGCVLECQNFILFENLFKPRQLSSATSKQCFEQPAASFLVCSLIFIEY

SEQ ID NO: 3887 - DNA, 240 bp, Streptococcus pneumoniae
atgaaacgaattttaatagcgcctgtgcgcttttaccaacgttttatctcaccagtctttccaccctcttgtcgctttgagctgacttgttccaactacatgattcaggctattgaaaaacatgggtttaagggggtattgatgggcttggctcggattttacgttgtcatccctggtcgaaaacaggtaaggaccccgttccagaccgcttttcccttaaacgaaatcaagaaggggaa

SEQ ID NO: 3888 - protein, 80 aa, Streptococcus pneumoniae
  conserved hypothetical protein; Cellular location: cytoplasm; Similar to strain R6 sequence 15903730 (3.E-43)
MKRILIAPVRFYQRFISPVFPPSCRFELTCSNYMIQAIEKHGFKGVLMGLARILRCHPWSKTGKDPVPDRFSLKRNQEGE

SEQ ID NO: 3889 - DNA, 720 bp, Streptococcus pneumoniae
atgagaatcaataagtatattgcccacgcaggtgtggccagtaggagaaaagcagaagagctgattaagcaaggcttggtgacggttaacggccaagtggtgcgtgaactagcaaccactatcaagtcaggcgacaaggtcgaagttgaaggtcaacctatctacaacgaagaaaaggtctactatctgcttaacaaaccacgcggtgtgatttccagtgtgacagatgataagggtcgcaagacggttgtcgacctcttgcccaatgtcaaagagcgtatttaccctgtgggtcgtttggactgggatacatcaggtgtcttgattttgaccaatgatggggactttacagacgagatgattcaccctcgtaatgagattgacaaggtttatgtcgcgcgtgttaaaggtgtggccaataaggacaatctccgccccttgacccgtggtcttgagattgatggtaagaaaaccaagccagctgtttatgaaattctcaaagtggacccagtcaaaaatcgctctgtggtgcagttgaccatccatgaagggcgtaaccatcaggttaaaaagatgtttgaagctgttggtctccaagtagataagttgtctcggactcgtttcggacacctagacttgacaggactccgtccaggagaatcccgtcgtcttaataaaaaagaaatcagccaactacacaccatggctgtaactaagaaa

SEQ ID NO: 3890 - protein, 240 aa, Streptococcus pneumoniae
  ribosomal large subunit pseudouridine synthase B (rluB); Cellular location: cytoplasm; Similar to strain R6 sequence 15903731 (e-135)
MRINKYIAHAGVASRRKAEELIKQGLVTVNGQVVRELATTIKSGDKVEVEGQPIYNEEKVYYLLNKPRGVISSVTDDKGRKTVVDLLPNVKERIYPVGRLDWDTSGVLILTNDGDFTDEMIHPRNEIDKVYVARVKGVANKDNLRPLTRGLEIDGKKTKPAVYEILKVDPVKNRSVVQLTIHEGRNHQVKKMFEAVGLQVDKLSRTRFGHLDLTGLRPGESRRLNKKEISQLHTMAVTKK

SEQ ID NO: 3891 - DNA, 567 bp, Streptococcus pneumoniae
atgagtactttagcaaaaatagaagcgctcttgtttgtagcgggtgaagatgggattcgggtccgccagttagctgaactcctctctctgccaccgacaggcatccagcaaagtttaggaaaattagcccagaagtatgaaaaggacccagattccagtttggctttgattgagacaagtggtgcttatagattggtgaccaagcctcaatttgcagagattttgaaggaatactctaaggcgcctatcaaccagagcttgtctcgggctgcccttgagaccttgtccattattgcctacaaacagccgattacgcggatagaaattgatgccatccgtggagttaactcgagtggagccttggcaaagttgcaggcttttgacctgataaaggaagacgggaaaaaggaagtattggggcgccccaacctctatgtgactacggattatttcctagattacatggggataaaccatttagaagaattaccagtgattgatgagcttgagattcaagcccaagaaagccaattatttggtgaaaggatagaagaagatgagaatcaa

SEQ ID NO: 3892 - protein, 189 aa, Streptococcus pneumoniae
  conserved hypothetical protein; Cellular location: cytoplasm; Similar to strain R6 sequence 15903732 (e-102)
MSTLAKIEALLFVAGEDGIRVRQLAELLSLPPTGIQQSLGKLAQKYEKDPDSSLALIETSGAYRLVTKPQFAEILKEYSKAPINQSLSRAALETLSIIAYKQPITRIEIDAIRGVNSSGALAKLQAFDLIKEDGKKEVLGRPNLYVTTDYFLDYMGINHLEELPVIDELEIQAQESQLFGERIEEDENQ

SEQ ID NO: 3893 - DNA, 726 bp, Streptococcus pneumoniae
atggatattaaattaaaagattttgaaggacccctggacttgctcttgcatctggtttctaagtaccagatggatatctacgatgtgcccattacggaagtcatcgaacagtatctagcctatgtctcaaccctgcaggccatgcgtctggaagtgacgggtgagtacatggtcatggctagtcagctcatgctgattaagagtcgtaaactccttccgaaggtagcagaagtgacagacttgggggatgacctggagcaggacctcctctctcaaatcgaagaatatcgcaagttcaagctcttgggtgagcacttggaagccaagcaccaagaacgggcccagtattattccaaagcgccgacagagttgatttacgaagatgcggagcttgtgcatgacaagacgaccattgacctctttttgactttttcaaatatcctagccaagaaaaaagaggagtttgcacaaaatcacacgacgatcttgcgggatgagtataagattgaggacatgatgattatcgtgaaagagtccttgattggacgagatcaattgcgcttgcaggatttgttcaaggaagcccagaatgtccaagaggtcatcaccctctttttggcaaccctagagttaatcaaaacccaggagttgatcctcgtgcaagaggagagttttggagatatctatctcatggaaaagaaggaagaaagtcaagtgcctcaaagc

SEQ ID NO: 3894 - protein, 242 aa, Streptococcus pneumoniae
  conserved hypothetical protein; Cellular location: cytoplasm; Similar to strain R6 sequence 15903733 (e-132)
MDIKLKDFEGPLDLLLHLVSKYQMDIYDVPITEVIEQYLAYVSTLQAMRLEVTGEYMVMASQLMLIKSRKLLPKVAEVTDLGDDLEQDLLSQIEEYRKFKLLGEHLEAKHQERAQYYSKAPTELIYEDAELVHDKTTIDLFLTFSNILAKKKEEFAQNHTTILRDEYKIEDMMIIVKESLIGRDQLRLQDLFKEAQNVQEVITLFLATLELIKTQELILVQEESFGDIYLMEKKEESQVPQS

SEQ ID NO: 3895 - DNA, 738 bp, Streptococcus pneumoniae
atgccaatgagagacaggatttcagcctttttagaggaaaagcagggcttgtctgtcaattccaagcagtcctataagtatgatttggagcaatttttagacatggtaggtgagcggatttctgagaccagtctcaagatttaccaagcccagctagccaatctaaaaatcagcgcccagaagcgaaagatttcggcctgtaaccaatttctatactttctctatcaaaaaggagaggtggacagcttttaccgcttggaattagccaaacaagctgaaaagaagacggaaaagccagagattctatacctagactctttttggcaggaaagcgaccatccagagggccgcttgctagcgctcttaatcctagaaatggggctcttgcccagtgagattttagccatcaaggttgcggacatcaatctggattttcaggtgttgcgaatcagcaaggcttcccaacagaggattgtcaccattcccacggccttgctttcagaattggaacccttgatggggcagacctatctttttgaaagaggagagaaaccctattctcgtcagtgggcctttcgtcagttagaatcttttgtcaaggagaaaggttttccatccttatcagctcaagtcttacgtgaacagtttattctaagacaaatagaaaacaaggtcgatttgtacgaaattgcaaaaaaattaggattaaaaacagtcctgaccttagaaaaatataga

SEQ ID NO: 3896 - protein, 246 aa, Streptococcus pneumoniae
  integrase/recombinase, phage integrase family; Cellular location: membrane; Similar to strain R6 sequence 15903734 (e-136)
MPMRDRISAFLEEKQGLSVNSKQSYKYDLEQFLDMVGERISETSLKIYQAQLANLKISAQKRKISACNQFLYFLYQKGEVDSFYRLELAKQAEKKTEKPEILYLDSFWQESDHPEGRLLALLILEMGLLPSEILAIKVADINLDFQVLRISKASQQRIVTIPTALLSELEPLMGQTYLFERGEKPYSRQWAFRQLESFVKEKGFPSLSAQVLREQFILRQIENKVDLYEIAKKLGLKTVLTLEKYR

SEQ ID NO: 3897 - DNA, 459 bp, Streptococcus pneumoniae
atgattgccaaggagtttgagactttcttgttggggcaggaggaaacttttttgacccctgctaaaaatctagctgtgttgattgatacccacaatgcggatcatgcgaccctcttgctcagtcagatgacctatacccgtgttcccgttgtgacagatgaaaaacagtttgttgggacgattggactcagagatattatggcttatcagatggagcatgacttgagccaagaaatcatggcggatacggatatcgttcatatgacaaaaacggacgtagcggttgtttcgcctgatttcaccattacggaggtcttgcacaagctagtagatgagtccttcttaccggttgtggatgcagagggtattttccaagggattattacgcgcaagtccatcctcaaggccgttaatgccctcttgcatgactttagtaaggaatatgagattcgatgccaa

SEQ ID NO: 3898 - protein, 153 aa, Streptococcus pneumoniae
  CBS domain protein; Cellular location: cytoplasm; Similar to strain R6 sequence 15903735 (1.E-83)
MIAKEFETFLLGQEETFLTPAKNLAVLIDTHNADHATLLLSQMTYTRVPVVTDEKQFVGTIGLRDIMAYQMEHDLSQEIMADTDIVHMTKTDVAVVSPDFTITEVLHKLVDESFLPVVDAEGIFQGIITRKSILKAVNALLHDFSKEYEIRCQ

SEQ ID NO: 3899 - DNA, 519 bp, Streptococcus pneumoniae
atggcaaagcaaaccatcattgtaatgagcgattcccatggcgatagcttgattgtggaagaagtccgtgatcgctatgtgggcaaagtcgatgctgtttttcataacggcgattctgaactacgtccggattctccactttgggagggcatccgcgttgttaaagggaacatggacttctacgccggctacccagaacgtctggtgactgagcttggttcgaccaagattatccaaactcatggtcacttgtttgacatcaatttcaactttcaaaagttggactactgggctcaggaggaagaggccgctatctgcctctatggtcacttgcatgtgccaagtgcttggttggaaggcaagatcctctttctaaatccaggttctatcagtcaaccacgaggtaccatcagagaatgtctctatgctcgtgtggagattgatgatagttacttcaaagtggactttttgacacgagatcacgaggtgtatccaggtttgtccaaggagtttagccga

SEQ ID NO: 3900 - protein, 173 aa, Streptococcus pneumoniae
  conserved hypothetical protein; Cellular location: cytoplasm; Similar to strain R6 sequence 15903736 (e-101)
MAKQTIIVMSDSHGDSLIVEEVRDRYVGKVDAVFHNGDSELRPDSPLWEGIRVVKGNMDFYAGYPERLVTELGSTKIIQTHGHLFDINFNFQKLDYWAQEEEAAICLYGHLHVPSAWLEGKILFLNPGSISQPRGTIRECLYARVEIDDSYFKVDFLTRDHEVYPGLSKEFSR

SEQ ID NO: 3901 - DNA, 738 bp, Streptococcus pneumoniae
atgggacgaaacttggaagttattcaacgtcatggggccctgctcttggttgaaaatgggcaactcttgtatgtagaattgcctaaagaaggggtcaatgttcatgatttctttgagacaagcaaggtcagagaaaccttgttgattgcgactcgtaacgaaggtaaaaccaaggaattccgagctatctttgataagttaggctacgatgtggaaaatcttaatgactaccctgacctgcctgaagtagcagaaacaggtatgacctttgaagaaaatgcccgccttaaggcagaaaccatttctcaattaacgggcaagatggttttggcagatgattctggtctcaaagtcgatgtccttggtggcttaccaggcgtctggtcagctcgtttcgcaggtgtgggagcaactgaccgtgaaaataatgccaaactcttgcacgaattggccatggtctttgaactcaaggaccgctcggctcagttccacacaaccctagtcgtagccagcccaaataaggaaagtttagttgttgaagcagactggtcaggttatattaactttgaacctaagggtgaaaatggctttggctatgatcccctcttccttgtaggagaaacaggtgagtcatcagctgaattaaccctggaagaaaaaaatagtcaatctcaccgtgccttagccgttaagaaacttttggaggtatttccatcatggcaaagcaaaccatcattg

SEQ ID NO: 3902 - protein, 246 aa, Streptococcus pneumoniae
  HAM1 protein; Cellular location: cytoplasm; Similar to strain R6 sequence 15903737 (e-112)
MGRNLEVIQRHGALLLVENGQLLYVELPKEGVNVHDFFETSKVRETLLIATRNEGKTKEFRAIFDKLGYDVENLNDYPDLPEVAETGMTFEENARLKAETISQLTGKMVLADDSGLKVDVLGGLPGVWSARFAGVGATDRENNAKLLHELAMVFELKDRSAQFHTTLVVASPNKESLVVEADWSGYINFEPKGENGFGYDPLFLVGETGESSAELTLEEKNSQSHRALAVKKLLEVFPSWQSKPSL

SEQ ID NO: 3903 - DNA, 792 bp, Streptococcus pneumoniae
atggataatcgaccaattggttttttggattcgggtgtcgggggcttgaccgttgtgcgcgagctcatgcgccagcttccccatgaagaaatcgtctatattggagattcggcgcgggcgccctatggcccccgtcctgctgagcaaattcgtgaatatacttggcagctggtcaactttctcttgaccaaggatgtcaaaatgattgtcattgcttgtaacactgcgactgcggtcgtctgggaagaaatcaaggctcaactagatattcctgtcttgggtgtaattttgccaggagcttcggcagccatcaagtccagtcaaggtgggaaaatcggagtgattggaacgcccatgacggtacaatcagacatataccgtcagaaaatccatgatctggatcccgacttacaggtggagagcttggcctgtcccaagtttgctcccttggttgagtcaggtgccctgtcaaccagtgttaccaagaaggtggtctatgaaaccctgcgtcccttggttggaaaggtggatagcctgattttgggctgtactcattatccactccttcgccctattatccaaaatgtgatggggccaaaggttcagctcatcgatagtggggcagagtgcgtacgggatatctcagtcttactcaattattttgaaatcaatcgtggtcgcgatgctggaccactccatcaccgtttttacacaacagccagtagccaaagttttgcacaaattggtgaagaatggctggaaaaagagattcatgtggagcatgtagaatta

SEQ ID NO: 3904 - protein, 264 aa, Streptococcus pneumoniae
  glutamate racemase (murI); Cellular location: membrane; Similar to strain R6 sequence 15903738 (e-152)
MDNRPIGFLDSGVGGLTVVRELMRQLPHEEIVYIGDSARAPYGPRPAEQIREYTWQLVNFLLTKDVKMIVIACNTATAVVWEEIKAQLDIPVLGVILPGASAAIKSSQGGKIGVIGTPMTVQSDIYRQKIHDLDPDLQVESLACPKFAPLVESGALSTSVTKKVVYETLRPLVGKVDSLILGCTHYPLLRPIIQNVMGPKVQLIDSGAECVRDISVLLNYFEINRGRDAGPLHHRFYTTASSQSFAQIGEEWLEKEIHVEHVEL

SEQ ID NO: 3905 - DNA, 246 bp, Streptococcus pneumoniae
atggatttacttttagcaattgtattgattgtgctagcttttctaggaggagctctaggaggaatgtacttggttcgtaagcaaatcgaaaaagaatttgctgacaacccacgtttgaatgctgaagcagttcgtactcttttgagtgcaaatggtcaaaaaccaagcgaagctaaggtacaacaagtttaccaccaaatcatccgccaacaaaaggcagcccttgctaacaataaaaagaaaaaa

SEQ ID NO: 3906 - protein, 82 aa, Streptococcus pneumoniae
  conserved hypothetical protein; Cellular location: outside; Similar to strain R6 sequence 15903739 (5.E-41)
MDLLLAIVLIVLAFLGGALGGMYLVRKQIEKEFADNPRLNAEAVRTLLSANGQKPSEAKVQQVYHQIIRQQKAALANNKKKK

SEQ ID NO: 3907 - DNA, 1623 bp, Streptococcus pneumoniae
atgacacttgataaaggaaaagtagtctatcaaatctatccaaaatcttacaaagacaccactgaaaacggtattggggatttccgtgggattatcgaaaaaattccctatttagccaaactaggtgtggatatggtctggctcaatccattctatccaagccctcaacgggataatggttacgatatttcagattatatggcagtggatcctctttttggtgatatggctgattttgagaaaatggtgtgtgtcggtaaagagcacaagattgactttatgctggacatggtacttaatcattgttcgacagagcatgaatggtttcagaaagccctagctggtgataagtattatcaagactttttcttcatccaagaccaaccaacagattggcagtctaagtttggtggttctgcatggacgcctttcggggatactgggaaatactatcttcacctatttgatgagacccaggctgaccttaactggcgcaattccaatgtccgtaaggagcttttcaaggttgttaatttctggcgcgacaagggtgtcaaaggtttccgatttgatgtgatcaatttgatcggtaaggacgaggtttcagtggactgtcctgaaaatgaagggaagccagcttatacagacaaacccatcgttcataactatttgcgtatgatgaaccaagccacttttggatccgacgatagctttatgacagttggggaaatgtcttctaccaccatggaaaactgtgtcctctattcgtcgcctgatcgtcaggaattatccatgacctttaattttcatcacctcaaggtggactataaggatggacaaaagtggaccttggctccctttgattttgaagagttgaagagtctttaccatagttggggtaaggaaatgagtgataaagacggttggagtgccctcttttggaataatcacgatcaaccacgtgccttgaaccgttttgtcgatattcaaaacttccgcaaggaaggagccaccatgctagcagccagcattcacctgtcacgtgggacaccttatatctacatgggtgaggaaatcgggatgattgacccagactatgattctatggctgattatgtggatgtcgaatcgcttaatgcctatcagatgctcttagaagaaggaaagagtcagcaagaagccttccagattattcaagctaagtcgcgtgataattcacgcattcccatgcagtgggatgcttcggaaaatgcaggattttcaacaggcactccttggttgaaagctggtaaatcctataaatacatcaatgtagaaaatgaaatccagggtccgatttttaccttctatcaagacttgattcgactgcgtaaggaaatgccaatcatttcagaaggaagttacaaaccagcctttgaagatagcaaacaagtctacgcttttgaacgccagtttgaggatcaaaagttactagtgctcaataacttttatgctaaagaagtggaaatcgacttgccagcagtctaccaaaatggacagattttgatatcaaactatgaagatgcagaagtgtctgagaaaattctactcaaaccctatcaaacactggctatttatgtaaat

SEQ ID NO: 3908 - protein, 541 aa, Streptococcus pneumoniae
  dextran glucosidase DexS, putative, FRAMESHIFT; Cellular location: cytoplasm; Similar to strain R6 sequence 15903740 (0.E+01)
MTLDKGKVVYQIYPKSYKDTTENGIGDFRGIIEKIPYLAKLGVDMVWLNPFYPSPQRDNGYDISDYMAVDPLFGDMADFEKMVCVGKEHKIDFMLDMVLNHCSTEHEWFQKALAGDKYYQDFFFIQDQPTDWQSKFGGSAWTPFGDTGKYYLHLFDETQADLNWRNSNVRKELFKVVNFWRDKGVKGFRFDVINLIGKDEVSVDCPENEGKPAYTDKPIVHNYLRMMNQATFGSDDSFMTVGEMSSTTMENCVLYSSPDRQELSMTFNFHHLKVDYKDGQKWTLAPFDFEELKSLYHSWGKEMSDKDGWSALFWNNHDQPRALNRFVDIQNFRKEGATMLAASIHLSRGTPYIYMGEEIGMIDPDYDSMADYVDVESLNAYQMLLEEGKSQQEAFQIIQAKSRDNSRIPMQWDASENAGFSTGTPWLKAGKSYKYINVENEIQGPIFTFYQDLIRLRKEMPIISEGSYKPAFEDSKQVYAFERQFEDQKLLVLNNFYAKEVEIDLPAVYQNGQILISNYEDAEVSEKILLKPYQTLAIYVN

SEQ ID NO: 3909 - DNA, 105 bp, Streptococcus pneumoniae
gtgctatttcaattatactcaatgaaaatcaaagaacaaactaggaagctagccacaggttgctcaaaacactattttgaggttgcagatagagctgacgtggtt

SEQ ID NO: 3910 - protein, 35 aa, Streptococcus pneumoniae
  box element
MLFQLYSMKIKEQTRKLATGCSKHYFEVADRADVV

SEQ ID NO: 3911 - DNA, 1965 bp, Streptococcus pneumoniae
atgggaaaatttgaacaagaagccaaagatctgcttcaggcaatcggaggcaaagaaaatgtgactgccgtaactcactgtgcgacacggatgcggtttgttttaggagatgataagaaggctaatgttaaagctatcgagtcaattccagctgttaaaggaacctttacaaatgcaggtcaatttcaggtaatcattggaaatgacgtgcccatcttttataatgattttacagccgtttcaggtattgagggtgtttccaaagaagcagccaagtctgcagctaagagtaatcaaaacgtggtccaaggtgttatgaccactctggcggagatttttactccgattattccagccttgatagtcggaggattgatcctcggtttccgtaatgtcttggaaggtgtccattggtcgatgttggatggcaagaccatcacagaatcctctcagttttgggcaggtgtcaatcacttcctctggttgcctggtgaagctatcttccagttcttaccagtagggattacttggtctgtttctcgtaagatgggaaccagccaaattttgggaattgttctcggaatctgtttggtatcgcctcagttgctcaatgcctatgcggttgcttcaacgccagcagctgatatcgcggcaaactgggtttggaattttggctattttactgttaatcgtatcggttaccaagcccaagttatcccagccttgcttgcaggtttgagtctgtcttatcttgaaatcttctggcacaagcatatcccagaagtcatttctatgatttttgtacctttcttgtcattgattccagccttgattttggctcatactgttttgggaccaatcggttggacaattggacaaggactttcatcagttgtcttggcaggtttaactggtccagttaaatggctcttcggtgcaatttttggcgccctctacgctccatttgtcatcacaggtctgcaccatatgaccaatgccattgatacacaattgattgcggatgctggtggcactgccctatggccaatgattgctctttctaatattgctcaaggctcagccgtgtttgcctattatttcatgcatcgccatgatgagcgtgaggctcaggtttcacttcctgcaaccatttcagcctatctcggtgttacagaaccagctctttttggggttaacgtaaaatatatttatccatttgttgctgggatgactggttcagcccttgcaggcatgttatccgttacttttaatgtaactgcggcttctattggtatcggtggtttgccaggtattctctctattcaacctcaatacatgctgccatttgcaggaactatgctagttgcgattgttgttccaatgctcttgactttcttcttccgcaaggctggtctctttacaaaaacagagggcgatacgaacttgcaggcagaattcgttgctcaagaagaagcagaatttgtgaaccatgaaccagtagaacttacttcggtagaaattatcagcccactaactggccaagtgaaagaattgagtcaagcgacggatcctatttttgcatcaggtgtcatggggcaaggtctagtcattgaaccaagccaaggtgagttgacctctccagttaatgggacagtgacggttcttttccctaccaagcatgccatcggcattgtctctgacgagggagttgaattgctcatccacatcggtatggatacagtaggtcttgatggcaaaggttttgaaagtcttgtagtccaaggagatcacgttacagttggtcagcaactgattcgttttgatatggatgtcattaaggctgcaggtctggtgacagaaactcctgttatcatcaccaaccaagatgcttatacagcgactattcccggaacttatccgacaacgatccaagctggagcatctctcatggtcgctacacgaatc

SEQ ID NO: 3912 - protein, 655 aa, Streptococcus pneumoniae
  PTS system, IIABC components; Cellular location: membrane; Similar to strain R6 sequence 15903741 (0.E+01)
MGKFEQEAKDLLQAIGGKENVTAVTHCATRMRFVLGDDKKANVKAIESIPAVKGTFTNAGQFQVIIGNDVPIFYNDFTAVSGIEGVSKEAAKSAAKSNQNVVQGVMTTLAEIFTPIIPALIVGGLILGFRNVLEGVHWSMLDGKTITESSQFWAGVNHFLWLPGEAIFQFLPVGITWSVSRKMGTSQILGIVLGICLVSPQLLNAYAVASTPAADIAANWVWNFGYFTVNRIGYQAQVIPALLAGLSLSYLEIFWHKHIPEVISMIFVPFLSLIPALILAHTVLGPIGWTIGQGLSSVVLAGLTGPVKWLFGAIFGALYAPFVITGLHHMTNAIDTQLIADAGGTALWPMIALSNIAQGSAVFAYYFMHRHDEREAQVSLPATISAYLGVTEPALFGVNVKYIYPFVAGMTGSALAGMLSVTFNVTAASIGIGGLPGILSIQPQYMLPFAGTMLVAIVVPMLLTFFFRKAGLFTKTEGDTNLQAEFVAQEEAEFVNHEPVELTSVEIISPLTGQVKELSQATDPIFASGVMGQGLVIEPSQGELTSPVNGTVTVLFPTKHAIGIVSDEGVELLIHIGMDTVGLDGKGFESLVVQGDHVTVGQQLIRFDMDVIKAAGLVTETPVIITNQDAYTATIPGTYPTTIQAGASLMVATRI

SEQ ID NO: 3913 - DNA, 708 bp, Streptococcus pneumoniae
atgaagaaataccaacaattatttaagcaaatccaagaaaccattcaaaacgagacttacgctgtcggagatttccttcctagcgagcacgaccttatggagcaatatcaagtgagtcgtgataccgtccgaaaggccctgtctctcctccaagaggaaggattgatcaaaaagataagagggcaaggttctcaagtcgtcaaagaagaaaccgtcaatttccctgtatccaacctaaccagctaccaagaactagttaaagaacttggactgcgctctaaaaccaacgtggtcagtctggacaagattattattgataaaaaatcctcactgataaccggtttcccagagtttcggatggtttggaaggtggtccgccagcgtgtggtggatgatctggtatccgttctggatacggactatctggatatggaactcatcccaaatctcactcgccaaattgctgagcagtctatctattcttatatagaaaatggcctcaaactccttattgattatgctcagaaggaaatcaccattgaccactcaagcgaccgagacaagattctcatggacattggcaaagacccttatgtcgtttcgattaaatcaaaagtctatctccaagacggacgccaatttcagtttaccgaaagtcgccataagttagagaaatttagatttgtagattttgcaaaacgcaagaaa

SEQ ID NO: 3914 - protein, 236 aa, Streptococcus pneumoniae
  trehalose operon transcriptional repressor (treR); Cellular location: cytoplasm; Similar to strain R6 sequence 15903742 (e-131)
MKKYQQLFKQIQETIQNETYAVGDFLPSEHDLMEQYQVSRDTVRKALSLLQEEGLIKKIRGQGSQVVKEETVNFPVSNLTSYQELVKELGLRSKTNVVSLDKIIIDKKSSLITGFPEFRMVWKVVRQRVVDDLVSVLDTDYLDMELIPNLTRQIAEQSIYSYIENGLKLLIDYAQKEITIDHSSDRDKILMDIGKDPYVVSIKSKVYLQDGRQFQFTESRHKLEKFRFVDFAKRKK

SEQ ID NO: 3915 - DNA, 1324 bp, Streptococcus pneumoniae
atggaacaattacattttatcacaaaactgctcgatattaaagacccaaacatcaagattctagacatcatcaatatggatacccacaaagaaattatcgctaagctggattatgaggctccatcttgccctgattgtggaagtctaatgaagaaatatgactttcaaaaaccgtctaagatcccttacctcgaaacaactggtatgcctactagaattctccttagaaagcgtcgtttcaagtgctatcattgttctaaaatgatggtcgctgaaacttctatcgtcaagaagaatcatcaaattcctcgtattatcaaccaaaaaattgcgcaaaagttgattgagaagatttctatgaccgatattgctcatcagctggccatttcaacttcaactgtcattcgaaagctcaatgattctcactttgagcatgatttttcgcgtcttcctgagattatgtcctgggacgttgaaacagtccggggagtgactgtttcaatcgggagatggagatgagctttattgcgcaagattttaacaatttcaatatcatcactgttcttgaaggtagaacacaagctgtcatccgagatcactttcttaaatatgatagagccgtccgatgtcgcgtcaaaatcattactatggctatgtttagcccttactatgacttggctaaacagcttcgctttcaaatttctaggctcaggctgaaacagtctcccaggctgtttcactcccgaatgctaaaatcgttcttgatcgctttcacattgtacaacatcttagccgtgctatgagtcgtgtgcatgtccaaatcatgaatcagtttcatcgaaaatcccatgaatacaaggctatcaagcgctactggaaactcattcaacaggatagccgtaaactgagtgataagcgattttatcgccctacttttcgcatgcacttaacaaataaagaaattcttgacaagattttaagctattcagaagacttgaaacaccactatcagatctatcaactcttactttttcactttcagaacaaagaccctgagaaatttttcggactcattgaggacaatctgaagcaggttcatcctctttttcagactgtctttaaaacctttctcaaagataaagaaaagattatcaacgcccttcaactacactattctaatgccaaactggaagcgaccaataatctcatcaaacttatcaagcgcaatgcctttggttttcgaaactttgaaaacttcaaaaaacggatttttatcgctttgaacatcaaaaaagaaaggacgaaatttgtcctttctcgagct

SEQ ID NO: 3916 - protein, 172 aa, Streptococcus pneumoniae
  IS1167, transposase FRAMESHIFT
MEQLHFITKLLDIKDPNIKILDIINMDTHKEIIAKLDYEAPSCPDCGSLMKKYDFQKPSKIPYLETTGMPTRILLRKRRFKCYHCSKMMVAETSIVKKNHQIPRIINQKIAQKLIEKISMTDIAHQLAISTSTVIRKLNDSHFEHDFSRLPEIMSWDVETVRGVTVSIGRWR

SEQ ID NO: 3917 - DNA, 285 bp, Streptococcus pneumoniae
atgagctttattgcgcaagattttaacaatttcaatatcatcactgttcttgaaggtagaacacaagctgtcatccgagatcactttcttaaatatgatagagccgtccgatgtcgcgtcaaaatcattactatggctatgtttagcccttactatgacttggctaaacagcttcgctttcaaatttctaggctcaggctgaaacagtctcccaggctgtttcactcccgaatgctaaaatcgttcttgatcgctttcacattgtacaacatcttagccgtgcta

SEQ ID NO: 3918 - protein, 95 aa, Streptococcus pneumoniae
  transposase-related
MSFIAQDFNNFNIITVLEGRTQAVIRDHFLKYDRAVRCRVKIITMAMFSPYYDLAKQLRFQISRLRLKQSPRLFHSRMLKSFLIAFTLYNILAVL

SEQ ID NO: 3919 - DNA, 525 bp, Streptococcus pneumoniae
atgagtcgtgtgcatgtccaaatcatgaatcagtttcatcgaaaatcccatgaatacaaggctatcaagcgctactggaaactcattcaacaggatagccgtaaactgagtgataagcgattttatcgccctacttttcgcatgcacttaacaaataaagaaattcttgacaagattttaagctattcagaagacttgaaacaccactatcagatctatcaactcttactttttcactttcagaacaaagaccctgagaaatttttcggactcattgaggacaatctgaagcaggttcatcctctttttcagactgtctttaaaacctttctcaaagataaagaaaagattatcaacgcccttcaactacactattctaatgccaaactggaagcgaccaataatctcatcaaacttatcaagcgcaatgcctttggttttcgaaactttgaaaacttcaaaaaacggatttttatcgctttgaacatcaaaaaagaaaggacgaaatttgtcctttctcgagct

SEQ ID NO: 3920 - protein, 175 aa, Streptococcus pneumoniae
  transposase
MSRVHVQIMNQFHRKSHEYKAIKRYWKLIQQDSRKLSDKRFYRPTFRMHLTNKEILDKILSYSEDLKHHYQIYQLLLFHFQNKDPEKFFGLIEDNLKQVHPLFQTVFKTFLKDKEKIINALQLHYSNAKLEATNNLIKLIKRNAFGFRNFENFKKRIFIALNIKKERTKFVLSRA

SEQ ID NO: 3921 - DNA, 924 bp, Streptococcus pneumoniae
atgtctgaaaaattagtagaaatcaaagatttagaaatttccttcggtgaaggaagtaagaagtttgtcgcggttaaaaatgctaacttctttatcaacaagggagaaactttctcgcttgtaggtgagtccggtagtgggaaaacaactattggtcgtgctatcatcggtctaaatgatacaagtaatggagatatcatttttgatggtcaaaagattaatggtaagaaatcgcgtgaacaagctgcggaattgattcgtcgaatccagatgattttccaagaccctgccgcaagtttgaatgaacgtgcgactgttgattatattatttctgaaggtctttacaatcaccgtttatttaaggatgaagaagaacgtaaagagaaagttcaaaatattatccgtgaagtaggtcttcttgctgagcacttgactcgttaccctcatgaattctcaggcggtcaacgtcaacgtatcggtattgcccgtgccttggtcatgcaaccagactttgttattgcagatgagccaatttcagccttggacgtttctgtacgtgcccaagtcttgaacttgctcaaaaaattccaaaaagagctcggcctgacctatctcttcatcgcccatgacttgtcggttgttcgctttatttcagatcgtatcgcagttatttacaagggtgttattgtagaggttgcagaaacagaagaattgtttaacaatccaattcacccatatactcaagccttgctttcagcggtaccaatcccagatccaatcttggaacgtaagaaggtcttgaaggtttacgatccaagtcaacacgactatgagactgataagccatctatggtagaaatccgtccaggtcactatgtttgggcgaaccaagccgaattggcacgttatcaaaaaggactaaac

SEQ ID NO: 3922 - protein, 308 aa, Streptococcus pneumoniae
  oligopeptide ABC transporter, ATP-binding protein AmiF (amiF); Cellular location: cytoplasm; Similar to strain R6 sequence 15903745 (e-174)
MSEKLVEIKDLEISFGEGSKKFVAVKNANFFINKGETFSLVGESGSGKTTIGRAIIGLNDTSNGDIIFDGQKINGKKSREQAAELIRRIQMIFQDPAASLNERATVDYIISEGLYNHRLFKDEEERKEKVQNIIREVGLLAEHLTRYPHEFSGGQRQRIGIARALVMQPDFVIADEPISALDVSVRAQVLNLLKKFQKELGLTYLFIAHDLSVVRFISDRIAVIYKGVIVEVAETEELFNNPIHPYTQALLSAVPIPDPILERKKVLKVYDPSQHDYETDKPSMVEIRPGHYVWANQAELARYQKGLN

SEQ ID NO: 3923 - DNA, 1065 bp, Streptococcus pneumoniae
atgacaaaagaaaaaaatgtaattttgactgctcgcgatattgtcgtggaatttgacgttcgtgacaaagtattgacagccattcgcggcgtttcccttgaactagtcgaaggagaagtattagccttggtaggtgagtcaggatcaggtaaatctgttttgacaaagaccttcacaggtatgctcgaagaaaatggtcgtattgcccaaggtagtattgactaccgtggtcaggacttgacagctttatcttctcacaaggattgggaacaaattcgtggtgctaagattgcgactatcttccaggacccaatgactagtttggaccccattaaaacaattggtagtcagattacagaagttattgtaaaacaccaaggaaaaacagctaaagaagcgaaagaattggccattgactacatgaataaggttggcattccagacgcagatagacgttttaatgaatacccattccaatattctggaggaatgcgtcaacgtatcgttattgctattgcccttgcctgccgacctgatgtcttgatctgtgatgagccaacaactgccttggatgtaactattcaagctcagattattgatttgctaaaatctttacaaaacgagtatcatttcacaacaatctttattacccacgaccttggtgtggtggcaagtattgcggataaggtagcggttatgtatgcaggagaaatcgttgagtatggaacggttgaggaagtcttctatgaccctcgccatccatatacatggagtctcttgtctagcttgcctcagcttgctgatgataaaggggatctttactcaatcccaggaacacctccgtcactttatactgacctgaaaggggatgcttttgccttgcgttctgactacgcaatgcagattgacttcgaacaaaaagctcctcaattctcagtatcagagacacattgggctaaaacttggcttcttcatgaggatgctccgaaagtagaaaaaccagctgtgattgcaaatctccatgataagatccgtgaaaaaatgggatttgcccatctggctgac

SEQ ID NO: 3924 - protein, 355 aa, Streptococcus pneumoniae
  oligopeptide ABC transporter, ATP-binding protein AmiE (amiE); Cellular location: membrane; Similar to strain R6 sequence 15903746 (0.E+01)
MTKEKNVILTARDIVVEFDVRDKVLTAIRGVSLELVEGEVLALVGESGSGKSVLTKTFTGMLEENGRIAQGSIDYRGQDLTALSSHKDWEQIRGAKIATIFQDPMTSLDPIKTIGSQITEVIVKHQGKTAKEAKELAIDYMNKVGIPDADRRFNEYPFQYSGGMRQRIVIAIALACRPDVLICDEPTTALDVTIQAQIIDLLKSLQNEYHFTTIFITHDLGVVASIADKVAVMYAGEIVEYGTVEEVFYDPRHPYTWSLLSSLPQLADDKGDLYSIPGTPPSLYTDLKGDAFALRSDYAMQIDFEQKAPQFSVSETHWAKTWLLHEDAPKVEKPAVIANLHDKIREKMGFAHLAD

SEQ ID NO: 3925 - DNA, 924 bp, Streptococcus pneumoniae
atgtctacaatcgataaagaaaaatttcagtttgtaaaacgtgacgattttgcctctgaaactattgatgcgccagcatattcttactggaaatcagtgtttaaacaatttatgaagaaaaaatcaactgtagtcatgttgggaatcttggtagccatcattttgataagtttcatctacccaatgttttctaagtttgatttcaatgatgtcagcaaggtaaacgactttagtgttcgttatatcaagccaaatgcggagcattggttcggtactgacagtaacggtaaatcgctctttgacggtgtctggttcggagctcgtaactccatcctcatttctgtgattgcgacagtgattaacttggttatcggtgtttttgtcggtggtatttggggtatttcaaaatcagttgaccgtgtcatgatggaagtttacaacgtcatctcaaacatcccacctcttttgattgttattgtcttgacttactcaatcggagctggattctggaatctgatttttgccatgagcgtaacaacatggattggtattgccttcatgatccgtgtgcaaatcttgcgctatcgtgacttggaatacaacttggcgtcacgtactttgggaacaccaaccttgaagattgttgccaaaaatatcatgcctcaattggtatctgttattgtgacaaccatgactcaaatgcttccaagctttatctcatacgaagccttcttgtctttcttcggtcttggattaccgattacagtgccaagtttgggtcgtttgatttcggattattcacaaaacgtaacaaccaatgcttacttgttctggattccattgacaacccttgtcttggtatccttgtcccttttcgtagttggtcaaaacttagcggatgctagtgatccacgtacacataga

SEQ ID NO: 3926 - protein, 308 aa, Streptococcus pneumoniae
  oligopeptide ABC transporter, permease protein AmiD (amiD); Cellular location: membrane; Similar to strain R6 sequence 15903747 (e-175)
MSTIDKEKFQFVKRDDFASETIDAPAYSYWKSVFKQFMKKKSTVVMLGILVAIILISFIYPMFSKFDFNDVSKVNDFSVRYIKPNAEHWFGTDSNGKSLFDGVWFGARNSILISVIATVINLVIGVFVGGIWGISKSVDRVMMEVYNVISNIPPLLIVIVLTYSIGAGFWNLIFAMSVTTWIGIAFMIRVQILRYRDLEYNLASRTLGTPTLKIVAKNIMPQLVSVIVTTMTQMLPSFISYEAFLSFFGLGLPITVPSLGRLISDYSQNVTTNAYLFWIPLTTLVLVSLSLFVVGQNLADASDPRTHR

SEQ ID NO: 3927 - DNA, 1494 bp, Streptococcus pneumoniae
atgaaaaaatatatttttatgcgtgttttgcggtcattggtttcgattttcttagtaacgactttgacctacacgattatctataccttggttcctcgaaaattgattttcaagcaggatcctaactataataaaattgcgacaacggctgataaacgtgataactatgaaaatactgtgtttgagcgtatgggctacattgagtattacgatactaaagagttgcaagaaaaggcaagtagcatggattcttctgtaacagtagaagcaaatgcgaccaataaagctatttatgaaaagtacatcaatcaattaggtcatggttggactttgggagaatttactgaaagtggtcaattctatgctactcgtgaaattccaatttttgaacgtgtttttcacttctatgctaacttgattgacattgaccatacaaataaaatccaagaccctgaaaatccagacttgaaacgctaccttcgttttgaaaatgatccagctatcggatggtcattggtcggttcaggaactaaacataaatatctcttgtactttaacagtcagttcccatttgttcatcaaaactttgtgaacttgaatttaggtgactcttacccaacctatgctaatacaccagttcttcaggttattactcaaggtcaaggacaaaccaaaactgcccaagttcagttcccaacaggtaagaaaacgtcttctgtaaatatttactcaagaacctacaagtcacctagtcaggctgactctcgtgaagtagctagctatgggaaagatgatccttatacagcgactgaaagtaattaccaatatccatctatgattgtcagctctgctattactggtttgattggtttggttcttgcctatgctcttgccgtgccacttggttcagccatggctcgtttcaagaacacttggattgatagcctctcaacaggggctttgaccttcttgcttgctcttccaacgattgccttggtttacatcgttcgattgattggatcatctattgcccttccagattcattccctatcttgggagctggagattggcgttcttacgttttaccagcagtcatccttggtttgttgggtgctcctggtacagccatttggattcgtcgttacatgattgacttgcaatctcaagactttgttcgtttcgctcgtgcaaaaggtttgtctgaaaaagaaatttcaaacaaacacatctttaaaaatgccatggttccgctggtttcaggaattcctgctgccattattggggttatcggtggtgcaacccttactgaaacagtcttcgccttcccaggtatgggtaaaatgttgattgactctgtaaaagcatctaataactctatggtcgttggtcttgtcttcatctttacatgtatttctatcttctcacgtcttttgggagatatttggatgactattattgacccacgtattaaattgactgagaaaggaggcaaa

SEQ ID NO: 3928 - protein, 498 aa, Streptococcus pneumoniae
  oligopeptide ABC transporer, permease protein AmiC (amiC); Cellular location: membrane; Similar to strain R6 sequence 15903748 (0.E+01)
MKKYIFMRVLRSLVSIFLVTTLTYTIIYTLVPRKLIFKQDPNYNKIATTADKRDNYENTVFERMGYIEYYDTKELQEKASSMDSSVTVEANATNKAIYEKYINQLGHGWTLGEFTESGQFYATREIPIFERVFHFYANLIDIDHTNKIQDPENPDLKRYLRFENDPAIGWSLVGSGTKHKYLLYFNSQFPFVHQNFVNLNLGDSYPTYANTPVLQVITQGQGQTKTAQVQFPTGKKTSSVNIYSRTYKSPSQADSREVASYGKDDPYTATESNYQYPSMIVSSAITGLIGLVLAYALAVPLGSAMARFKNTWIDSLSTGALTFLLALPTIALVYIVRLIGSSIALPDSFPILGAGDWRSYVLPAVILGLLGAPGTAIWIRRYMIDLQSQDFVRFARAKGLSEKEISNKHIFKNAMVPLVSGIPAAIIGVIGGATLTETVFAFPGMGKMLIDSVKASNNSMVVGLVFIFTCISIFSRLLGDIWMTIIDPRIKLTEKGGK

SEQ ID NO: 3929 - DNA, 1977 bp, Streptococcus pneumoniae
atgaaaaaaaatcgtgtatttgctacagcaggtcttgttttattagcagcaggtgtacttgcagcatgcagttcttcaaaatcatctgattcatcagcccctaaagcttatggctatgtttatacagcagacccagaaaccttggactacctgatttcaagtaaaaatagtacaacagtagtgacttcaaatgggattgatggtttattcactaacgataattacggtaatcttgctcctgcagttgcagaggattgggaagtctctaaggatggtttgacctacacttataagattcgtaaaggggttaaatggtttacctctgatggagaagaatatgcagaggtgacggctaaagatttcgtgaacggtttaaaacacgcagcagataaaaaatcagaagctatgtatttagctgaaaattcggttaaaggcttggcagattatctatcaggaacttcaacagatttttcaacagttggtgtcaaggcggttgatgattatacgttacaatacactttgaaccagcctgaaccgttctggaactctaagttgacctattctattttctggcctctgaatgaagaattcgaaacatcaaaaggaagcgattttgctaaaccaacagatccgacatccttgctttataatggtccattcttgttgaaagggttgactgcaaaatcttctgtagagtttgtaaaaaatgagcaatattgggataaagaaaatgtccacctagatactatcaatctagcttactatgatggatcagatcaggagtcgctagagcgtaacttcactagtggagcttatagttatgcccgtctttaccctaccagctccaactattctaaggttgcagaagaatacaaggacaatatctattacacacaatcaggctctgggattgctggtctgggtgtgaatattgatcgccaaagttacaactatacttctaaaactacagattcagagaaagtagctactaagaaggcattgcttaacaaagatttccgtcaagccttgaattttgctcttgatcgctcagcttactcagctcaaatcaatggtaaagatggagcagctttagcagttcgtaatttatttgtaaaaccagactttgtttcagctggtgagaagacctttggtgatttagtcgctgctcaacttcctgcttatggtgatgagtggaaaggtgtgaatttagctgatgggcaggatggtttattcaatgctgacaaggccaaggcagagtttgcgaaagctaagaaagctttagaagcagacggcgttcagtttcctattcatctggacgttccagtagaccaagcatcaaaaaactacatatctcgtattcagtcctttaaacaatctgtagaaacagttcttggtgttgaaaatgtcgttgttgatattcaacaaatgacaagtgatgaattccttaatattacttactatgctgccaatgcttcatctgaggattgggatgtatcaggaggagtttcatgggggccagactatcaagacccatctacttacctggatattttaaaaacaactagcagtgaaactacaaaaacatatttaggatttgataatccaaatagcccttcagtagttcaagttggtttgaaagaatacgataaattagttgatgaagctgccagagagacaagcgacttgaatgtccgttatgaaaaatatgcagcggctcaagcatggttgacagatagttcactctttattcctgctatggcttcttctggtgcagcaccagtgctttcacgaattgttccatttactggagcttctgcgcaaacaggctctaaggggtcagatgtttacttcaaatatttgaaatcacaagataaagtggtgactaaggaagagtatgaaaaagctcgtgaaaaatggttgaaagaaaaagctgaatcaaatgagaaagctcaaaaagaattggcaagtcatgtgaag

SEQ ID NO: 3930 - protein, 659 aa, Streptococcus pneumoniae
  oligopeptide ABC transporter, oligopeptide-binding protein AmiA (amiA); Cellular location: lipoprotein; Similar to strain R6 sequence 15903749 (0.E+01)
MKKNRVFATAGLVLLAAGVLAACSSSKSSDSSAPKAYGYVYTADPETLDYLISSKNSTTVVTSNGIDGLFTNDNYGNLAPAVAEDWEVSKDGLTYTYKIRKGVKWFTSDGEEYAEVTAKDFVNGLKHAADKKSEAMYLAENSVKGLADYLSGTSTDFSTVGVKAVDDYTLQYTLNQPEPFWNSKLTYSIFWPLNEEFETSKGSDFAKPTDPTSLLYNGPFLLKGLTAKSSVEFVKNEQYWDKENVHLDTINLAYYDGSDQESLERNFTSGAYSYARLYPTSSNYSKVAEEYKDNIYYTQSGSGIAGLGVNIDRQSYNYTSKTTDSEKVATKKALLNKDFRQALNFALDRSAYSAQINGKDGAALAVRNLFVKPDFVSAGEKTFGDLVAAQLPAYGDEWKGVNLADGQDGLFNADKAKAEFAKAKKALEADGVQFPIHLDVPVDQASKNYISRIQSFKQSVETVLGVENVVVDIQQMTSDEFLNITYYAANASSEDWDVSGGVSWGPDYQDPSTYLDILKTTSSETTKTYLGFDNPNSPSVVQVGLKEYDKLVDEAARETSDLNVRYEKYAAAQAWLTDSSLFIPAMASSGAAPVLSRIVPFTGASAQTGSKGSDVYFKYLKSQDKVVTKEEYEKAREKWLKEKAESNEKAQKELASHVK

SEQ ID NO: 3931 - DNA, 165 bp, Streptococcus pneumoniae
atgattcaaattgtcgttcgaagtgtcaaagactacagtgaaaataggaaatttgacgcagaaactttggagtttaggaagacatacagtaaaatgaaatacggacggaacaatgtgattttggaattcaaattaaattataacaatattgtagaagtatcattc

SEQ ID NO: 3932 - protein, 55 aa, Streptococcus pneumoniae
  hypothetical protein; Cellular location: cytoplasm
MIQIVVRSVKDYSENRKFDAETLEFRKTYSKMKYGRNNVILEFKLNYNNIVEVSF

SEQ ID NO: 3933 - DNA, 1191 bp, Streptococcus pneumoniae
ttgaaatcaataggctttattgaaaagctgaaggggttgtctagtaaagagctgattttattgggaattatcctgagtatctttttacccttttatctttttgtagttgtactctgtttatatattatcagtttgatttttacaggagacatgaaaagtattcttcagaaaatgggggagcatccgatgctgcttctttttcttagctatagtactgttatatccattcttgcacaaaattggatgggtcttgtggcttcagtaggaatgtttctatttactattttctttttgcactatcagtcgattttatcccataaattctttcgattgattttgcagtttgtcttgtttggtagtgtcttgtcagctgcttttgccagtttagaacatttccaaattgtgaagaaatttaactatgcttttctttcacccaatatgcaggtgtggcatcagaaccgggcagaagtgaccttctttaatcctaattattatggaattatttgttgtttctgtattatgattgctttctatctgtttacaacgaccaagttgaattggttgaaagtattctgtgtgattgcaggctttgttaatctctttggtttgaactttactcaaaatcgaactgcctttcctgctattatcgctggagcaattatctatctctttacgactattaaaaactggaaggccttttggcttagtattggggtcttcgcgattggtttgagtttcctcttttctagtgatttgggagttcgaatgggtactttagactcttctatggaagaacgcatttctatctgggatgctgggatggccttgtttaagcaaaatcctttttggggtgaagggccattgacctatatgaactcttatcctcggatacatgctccttatcatgaacatgcccacagtctttatattgatacgattctgagttacggaattgtggggactattttattagttttgtcttctgttgctcctgttcgcttgatgatggatatgagtcaggagtcggggaaacgtccgattatcggcctttatctatctttccttacagtggttgctgtgcacggaatttttgacttggctctcttctggattcagtcaggctttattttcttgctagttatgtgcagtattccattggagcatcgaatgttggtatcggacatgacggat

SEQ ID NO: 3934 - protein, 397 aa, Streptococcus pneumoniae
  hypothetical protein; Cellular location: membrane; Similar to strain R6 sequence 15903750 (0.E+01)
MKSIGFIEKLKGLSSKELILLGIILSIFLPFYLFVVVLCLYIISLIFTGDMKSILQKMGEHPMLLLFLSYSTVISILAQNWMGLVASVGMFLFTIFFLHYQSILSHKFFRLILQFVLFGSVLSAAFASLEHFQIVKKFNYAFLSPNMQVWHQNRAEVTFFNPNYYGIICCFCIMIAFYLFTTTKLNWLKVFCVIAGFVNLFGLNFTQNRTAFPAIIAGAIIYLFTTIKNWKAFWLSIGVFAIGLSFLFSSDLGVRMGTLDSSMEERISIWDAGMALFKQNPFWGEGPLTYMNSYPRIHAPYHEHAHSLYIDTILSYGIVGTILLVLSSVAPVRLMMDMSQESGKRPIIGLYLSFLTVVAVHGIFDLALFWIQSGFIFLLVMCSIPLEHRMLVSDMTD

SEQ ID NO: 3935 - DNA, 1470 bp, Streptococcus pneumoniae
ttggcttcaattagaaaaaggagagtaatgatgccaattcaaaataaaaccatgttgattacctattctgatagccttggaaataatcttaaagacttatatgataatttggaagagcattttggagatgctattggaggagttcaccttttaccatttttcccatcaacagttgatcgtggatttgcgccagttgactacgacgaagtggactcagcttttggtgattgggaggatgtgaagcgtttaggtgagaaatattatcttatgtttgattttatgattaatcatatttctcgtcaatccaagtattataaggactatcaagaaaaacatgaagccagtgaatttaaagctctctttttaaactgggataagttttggccagaaaaccgtccgacacagtctgatgtagatttaatttacaagcgtaaggatcgtgcaccaaagcaagagattgtgtttgaagatggttcagtggaacatttgtggaatacctttggtgaggagcagattgatcttgatgtgaccaaagaagtaactatggaatttatccgtaagaccattcagcacttggcaagtaatgggtgtgatttgattcgtctagatgcctttgcttatgcagtgaagaaattggatactaatgatttctttgtggaaccagatatttgggatttattggacaaagttcgagatatcgctgctgagtatgggacagagcttttacctgagattcatgaacactattcgattcagtttaaaatagcagaccatgattactatgtttatgattttgctcttccaatggtgacactttatactctttacagttccagaacagagcgtttggctaagtggttaaagatgagcccgatgaagcaatttacgacgctagatacccatgatgggattggagtagtagatgtcaaggatatcctgaccgatgaggagattgactatgcttcaaatgaactctataaggttggagccaatgtcaaacgtaagtactctagtgccgagtataacaacttagatatctaccaaatcaattcaacctactattcagcgcttggagatgatgatgtcaagtattttctcgctcgtctaattcaagcttttgccccaggtattcctcagatttactatgtgggtctattagcaggcaagaatgacttgaaattattagaagaaactaaagaaggtcgaaatattaatcgtcattactatagcaacgaggaaatagcaaaagaagtgcaacgacctgttgtgaaggcccttctcaatctattttctttccgtaaccgttcagaagcctttgatctagaagggactactgagatagagacaccaacagctcacagcattgtaatcaaacgtcaaaataaagataagtccgtaacagcagtagtagaaattgatttgcaaaatcagacttatcgggtaattgagaatggagttgaagtatcattt

SEQ ID NO: 3936 - protein, 490 aa, Streptococcus pneumoniae
  sucrose phosphorylase (gftA); Cellular location: cytoplasm; Similar to strain R6 sequence 15903751 (0.E+01)
MASIRKRRVMMPIQNKTMLITYSDSLGNNLKDLYDNLEEHFGDAIGGVHLLPFFPSTVDRGFAPVDYDEVDSAFGDWEDVKRLGEKYYLMFDFMINHISRQSKYYKDYQEKHEASEFKALFLNWDKFWPENRPTQSDVDLIYKRKDRAPKQEIVFEDGSVEHLWNTFGEEQIDLDVTKEVTMEFIRKTIQHLASNGCDLIRLDAFAYAVKKLDTNDFFVEPDIWDLLDKVRDIAAEYGTELLPEIHEHYSIQFKIADHDYYVYDFALPMVTLYTLYSSRTERLAKWLKMSPMKQFTTLDTHDGIGVVDVKDILTDEEIDYASNELYKVGANVKRKYSSAEYNNLDIYQINSTYYSALGDDDVKYFLARLIQAFAPGIPQIYYVGLLAGKNDLKLLEETKEGRNINRHYYSNEEIAKEVQRPVVKALLNLFSFRNRSEAFDLEGTTEIETPTAHSIVIKRQNKDKSVTAVVEIDLQNQTYRVIENGVEVSF

SEQ ID NO: 3937 - DNA, 165 bp, Streptococcus pneumoniae
atgaaaatcaaagagcaaactaggaagctagccgcaggttgctcaaaacactgttttgaggttgtggatgaaactgacgaagtcagtaaccatacctacggcaaggtgaagctgacgtggtttgaagagattttcgaagagtataagaagagctcatggaatcta

SEQ ID NO: 3938 - protein, 55 aa, Streptococcus pneumoniae
  box element
MKIKEQTRKLAAGCSKHCFEVVDETDEVSNHTYGKVKLTWFEEIFEEYKKSSWNL

SEQ ID NO: 3939 - DNA, 855 bp, Streptococcus pneumoniae
ttgaaatttaagaggagaagcatgatgaaacaagatgaaagaaaagccctgattggcaaatacattctattgattctaggatcggttctgattttagtgccgctccttgctaccctctttagttccttcaaacccactaaggatattgtagataatttctttggctttccaaccaacttcacatgggacaactttagccgtctcttagctgatgggattggaggctattattggaactctgtcgtcatcactgtcttgtctttacttgcagtaatgatctttatccctatggcagcctactccatcgctcgcaatatgagtaaaagaaaagcctttaccatcatgtataccctcttaatcctcggaatcttcgtacctttccaagtcatcatgattccgattacggttatgatgagtaaactcggtttggctaatacctttggtttgatcttgctctacttgacctatgcgattccacagaccctctttctctatgttggctatatcaaaatctcgattccagaaagtctggatgaagcagcagagatcgatggggctaatcaatttacaacctatttccgcatcatcttcccaatgatgaaaccgatgcatgcgacaaccatgatcatcaatgccctttggttctggaatgacttcatgttgccactccttgtcttgaaccgggattccaaaatgtggactctgcctttgttccaatacaactacgcaggccaatatttcaacgactacggaccaagctttgcctcttacgtggtcggcattatcagtatcaccattgtctatctcttcttccaacgccatatcatttcaggaatgagcaacggggcagtgaag

SEQ ID NO: 3940 - protein, 285 aa, Streptococcus pneumoniae
  sugar ABC transporter, permease protein (msmG); Cellular location: membrane; Similar to strain R6 sequence 15903752 (e-159)
MKFKRRSMMKQDERKALIGKYILLILGSVLILVPLLATLFSSFKPTKDIVDNFFGFPTNFTWDNFSRLLADGIGGYYWNSVVITVLSLLAVMIFIPMAAYSIARNMSKRKAFTIMYTLLILGIFVPFQVIMIPITVMMSKLGLANTFGLILLYLTYAIPQTLFLYVGYIKISIPESLDEAAEIDGANQFTTYFRIIFPMMKPMHATTMIINALWFWNDFMLPLLVLNRDSKMWTLPLFQYNYAGQYFNDYGPSFASYVVGIISITIVYLFFQRHIISGMSNGAVK

SEQ ID NO: 3941 - DNA, 888 bp, Streptococcus pneumoniae
atgtggattaggagtagagagactatgaaaaaagtattacaaaaatattgggcatgggcttttgtggtcatccccctcttgttacaagcaattttcttctatgtgccgatgtttcaaggagccttttacagttttaccaactggacaggattgacttataactacaaatttgttggcttaaacaactttaagctcctcttcatggatccaaaattcatgaatgcgattggctttaccgcaatcattgcgattgccatggtggttggtgagattgcactcgggatcttcattgcgcgtgtcttgaattctaaaatcaaaggccaaaccttcttccgtgcttggttcttcttcccagctgttttatctggtttgacagtggctttgatcttcaagcaagtcttcaactacggtcttccagcgattggaaatgcccttcatattgaatttttccaaaccagtcttttagggactaagtggggagcaatctttgcggctgtctttgtccttctttggcaaggggtggctatgcccatcatcatcttcctagctggtttgcaatctattccaactgagattacagaggcagcaaggattgatggtgcgactagcaagcaagttttctggaacattgaattgccttacttgctaccaagtgtctctatggtctttatcctagccctaaaaggtgggctgactgcctttgaccaagtctttgccatgaccggtggtggtccaaacaatgccacaacctcacttgggctcttggtttataactatgcctttaaaaacaaccaattcggttatgccaatgccattgccgtaatcttgttcttcttaattgtagtgatttcgatcatccaattgagagtatctaagaaatttgaaatt

SEQ ID NO: 3942 - protein, 296 aa, Streptococcus pneumoniae
  sugar ABC transporter, permease protein (msmF); Cellular location: membrane; Similar to strain R6 sequence 15903753 (e-167)
MWIRSRETMKKVLQKYWAWAFVVIPLLLQAIFFYVPMFQGAFYSFTNWTGLTYNYKFVGLNNFKLLFMDPKFMNAIGFTAIIAIAMVVGEIALGIFIARVLNSKIKGQTFFRAWFFFPAVLSGLTVALIFKQVFNYGLPAIGNALHIEFFQTSLLGTKWGAIFAAVFVLLWQGVAMPIIIFLAGLQSIPTEITEAARIDGATSKQVFWNIELPYLLPSVSMVFILALKGGLTAFDQVFAMTGGGPNNATTSLGLLVYNYAFKNNQFGYANAIAVILFFLIVVISIIQLRVSKKFEI

SEQ ID NO: 3943 - DNA, 1257 bp, Streptococcus pneumoniae
atggaatggtataaaaaaatcggacttcttgcaactacaggtttagctttgtttgggctcggcgcttgctccaactatggtaaatctgcggatggcacagtgaccatcgagtatttcaaccagaaaaaagaaatgaccaaaaccttggaagaaatcactcgtgattttgagaaggaaaaccctaagatcaaggtcaaagtcgtcaatgtaccaaatgctggtgaagtattgaagacacgcgttctcgcaggagatgtgcctgatgtggtcaatatttacccacagtccatcgaactgcaagaatgggcaaaagcaggtgtttttgaagatttgagcaacaaagactacctgaaacgcgtgaaaaatggctacgctgaaaaatatgctgtaaacgaaaaagtttacaacgttccttttacagctaatgcttatggaatttactacaacaaagataaattcgaagaactgggcttgaaggttcctgaaacctgggatgaatttgaacagttagtcaaagatatcgttgctaaaggacaaacaccatttggaattgcaggtgcagatgcttggacactcaatggttacaatcaattagcctttgcgacagcaacaggtggaggaaaagaagcaaatcaataccttcgttattctcaaccaaatgccattaaattgtcggatccgattatgaaagatgatatcaaggtcatggacatccttcgcatcaatggatctaagcaaaagaactgggaaggtgctggctataccgatgttatcggagccttcgcacgtggggatgtcctcatgacaccaaatgggtcttgggcgatcacagcgattaatgaacaaaaaccgaactttaagattgggaccttcatgattccaggaaaagaaaaaggacaaagcttaaccgttggtgcgggagacttggcatggtctatctcagccaccaccaaacatccaaaagaagccaatgcctttgtggaatatatgacccgtccagaagtcatgcaaaaatactacgatgtggacggatctccaacagcgatcgaaggggtcaaacaagcaggagaagattcaccgcttgctggtatgaccgaatatgcctttacggatcgtcacttggtctggttgcaacaatactggaccagtgaagcagacttccataccttgaccatgaactatgtcttgaccggtgataaacaaggcatggtcaatgatttgaatgccttctttaacccgatgaaagcggatgtggat

SEQ ID NO: 3944 - protein, 419 aa, Streptococcus pneumoniae
  sugar ABC transporter, sugar-binding protein (msmE); Cellular location: lipoprotein; Similar to strain R6 sequence 15903754 (0.E+01)
MEWYKKIGLLATTGLALFGLGACSNYGKSADGTVTIEYFNQKKEMTKTLEEITRDFEKENPKIKVKVVNVPNAGEVLKTRVLAGDVPDVVNIYPQSIELQEWAKAGVFEDLSNKDYLKRVKNGYAEKYAVNEKVYNVPFTANAYGIYYNKDKFEELGLKVPETWDEFEQLVKDIVAKGQTPFGIAGADAWTLNGYNQLAFATATGGGKEANQYLRYSQPNAIKLSDPIMKDDIKVMDILRINGSKQKNWEGAGYTDVIGAFARGDVLMTPNGSWAITAINEQKPNFKIGTFMIPGKEKGQSLTVGAGDLAWSISATTKHPKEANAFVEYMTRPEVMQKYYDVDGSPTAIEGVKQAGEDSPLAGMTEYAFTDRHLVWLQQYWTSEADFHTLTMNYVLTGDKQGMVNDLNAFFNPMKADVD

SEQ ID NO: 3945 - DNA, 2160 bp, Streptococcus pneumoniae
atgggagttaggatagagaataatctattttatgttgagagtaaaaatctaagtttgattattgaaaatcgaaatggctacttacttttgaaacatttaggaaagactattaagaactataaaggttccaatagtgtttatgaacgagaccatgccttttcaggaaatccaacggctactaatcgaacctttagtttagatactcagcgacagatttttggacaacatggcttaggagattttaggaaaccaaccatacaggttcagcatagtgtaactgaagtaacagactttcgatttgtagaagcaaagattttaaaaggtcagaatggtccacagggcttaccttctccacatagcatggacgatacagagactcttgtcttaatgttagaagattctaaggctcaacttagtctgactttgtattatactacttttaataatgatgcgactattgctagctacagtaaattagataataatagtaatcaggaagttgtcatccataaagatttttcttttatggctgattttccagctgcagattacgaaatagtaactctgcagggtgcttatgctcgtgaaaagactgttagacgtcaacaggtagaacaaggaatcttttcgattagttcaaaccgaggtgcttctggtcatgctcaaacaccagctcttctactatgcgaacaaggagtcacagaggatgctgggaatgtgtttgctattcaactaatgtatagtggcaactttgaagcttttgttcaaaaaaatcaattgaatgaagttcgggtggctattggcattaatccagaaaacttttcttggaagttagctcctgaggaatactttgaaacaccggtagctttagtgactcattcagatcagggattaactggtattagtcatgaaagtcagaattttgtactgaagcacattatgctaagtgaattttctaaaaaagaacgtccaattctaatcaataactgggaagctacttactttgactttcagagagaaaaactgttagagttagcagatgaagctaagaaagttggcattgaactttttgtattagatgatggttggtttggcaatcgttttgatgataatcgtgctttaggtgattgggttgttaatgaggaaaaactgggtggaagtctagaaagtctgatttcagctatccatgaaagaggtttgcagtttggactttggttagaacccgaaatgatttctgtagatagtgatttgtatcgtcaacatcctgactgggctattcaggttcctggctatgagcatacttattctcggaatcaattagtacttaatcttgccaatcctcaggtagtagaatacttgaaaagtgtcttagatcaactcctattttatcatgatattgattacattaaatgggatatgaaccgcaatatcactaagctagggaatggattaacttatctagagacacagatgcaatctcatcagtacatgctggggctttatgaactcgtttcttatctgacagagaagcacagccatattctctttgagtcctgctctggtggtggtggacgaaatgatcttggtatgatgcgctatttcccacaagtctgggctagtgataatactgatgccattgcacgtttaccaattcaatacggttcatcctatctctatccaaccatttctatgggggctcatgtgtcagcagtaccgaatcatcagatgggacgaatgacaccattagaaacacgtggccttgtagcaatgatgggaaatttgggctatgaacttgatttgacaaatttatcagatgaagagaaagctacgattgctaatcaggtgaacttgtataaagaattacgaccagtagttcagttaggacagcagtatagactaattaatcctgatactgtatccaatgaagcagctgtacaatttaattacggaaatcaaacgattgtaacctacgttcgcgttttatctgttgtagagaccatggaaacaactttaaaattaaaagatttggatgaagagggactatataaattacaggaaaatggcgaagtttactcaggtgcagaactaatgtatgcgggcttaactgttatcttatcccaaggagattttttgagtagacagtatatttttagaaaacta

SEQ ID NO: 3946 - protein, 720 aa, Streptococcus pneumoniae
  alpha-galactosidase (aga); Cellular location: cytoplasm; Similar to strain R6 sequence 15903755 (0.E+01)
MGVRIENNLFYVESKNLSLIIENRNGYLLLKHLGKTIKNYKGSNSVYERDHAFSGNPTATNRTFSLDTQRQIFGQHGLGDFRKPTIQVQHSVTEVTDFRFVEAKILKGQNGPQGLPSPHSMDDTETLVLMLEDSKAQLSLTLYYTTFNNDATIASYSKLDNNSNQEVVIHKDFSFMADFPAADYEIVTLQGAYAREKTVRRQQVEQGIFSISSNRGASGHAQTPALLLCEQGVTEDAGNVFAIQLMYSGNFEAFVQKNQLNEVRVAIGINPENFSWKLAPEEYFETPVALVTHSDQGLTGISHESQNFVLKHIMLSEFSKKERPILINNWEATYFDFQREKLLELADEAKKVGIELFVLDDGWFGNRFDDNRALGDWVVNEEKLGGSLESLISAIHERGLQFGLWLEPEMISVDSDLYRQHPDWAIQVPGYEHTYSRNQLVLNLANPQVVEYLKSVLDQLLFYHDIDYIKWDMNRNITKLGNGLTYLETQMQSHQYMLGLYELVSYLTEKHSHILFESCSGGGGRNDLGMMRYFPQVWASDNTDAIARLPIQYGSSYLYPTISMGAHVSAVPNHQMGRMTPLETRGLVAMMGNLGYELDLTNLSDEEKATIANQVNLYKELRPVVQLGQQYRLINPDTVSNEAAVQFNYGNQTIVTYVRVLSVVETMETTLKLKDLDEEGLYKLQENGEVYSGAELMYAGLTVILSQGDFLSRQYIFRKL

SEQ ID NO: 3947 - DNA, 858 bp, Streptococcus pneumoniae
atgttagttttttcagaataccagactggaacaatcgaccttgccctaagcttttatggatatgaggaatgcacacctaattactcttttggtccagccattcgtgatacatacgttctacattacattactaaaggacaaggaaaatttcattacaagggtaaaattgttgatttaaaagaaggagatttctttctattaaaaccagaggaactaaccttttatcaagcagatagtaaagaaccttgggcctactactggttaggaatcactggagggaaagcccctgattattttgctctttcccaaatttctgatcaatcctatctcatccaatctgaaacttgtcatacccagactactgcaaaactcatctcagacattgtccgcttcgctcagattacaaaatcaagtgaattagctcaactccatatcatgggacaacttcatgaactgatgtttcatctgggaactattgctcccaatcagaaaaaaaagaatatttcatcaacccaccaactctatcttgaatgcaaacgattaattgatagccactatcctcaatcacttacaattcaagatttagcaaaagaactatccgttcacagaagctacttatcaagcgtattcaaagaatttaataccttatcacccaaagaatacctactctacgttcgaatgcaccgagctagacaacttctcgaaaatacccaagagtccatcaaggtaattgcatactcggtaggtttttcagatccactccatttttcgaaagcttataaacaatactttaatcagactccaagtcatacaagaaaagaatactctcaataccaactagtaagaaaggcaacatta

SEQ ID NO: 3948 - protein, 286 aa, Streptococcus pneumoniae
  msm operon regulatory protein (msmR); Cellular location: cytoplasm; Similar to strain R6 sequence 15903756 (e-166)
MLVFSEYQTGTIDLALSFYGYEECTPNYSFGPAIRDTYVLHYITKGQGKFHYKGKIVDLKEGDFFLLKPEELTFYQADSKEPWAYYWLGITGGKAPDYFALSQISDQSYLIQSETCHTQTTAKLISDIVRFAQITKSSELAQLHIMGQLHELMFHLGTIAPNQKKKNISSTHQLYLECKRLIDSHYPQSLTIQDLAKELSVHRSYLSSVFKEFNTLSPKEYLLYVRMHRARQLLENTQESIKVIAYSVGFSDPLHFSKAYKQYFNQTPSHTRKEYSQYQLVRKATL

SEQ ID NO: 3949 - DNA, 933 bp, Streptococcus pneumoniae
atgaaatcctaccaagctgtctaccaaatcctatctaaagaaaccgactatatcagcggagaaaaaatcgcagaaaaactatccctaagccgaacagcaatttggaaagccatcaagcgactagaacaagaaggcattgaaattgatagtatcaaaaatagaggatataaactgatgaatggtgaccttattcttccagagattctagaagaaaatcttccaattaaagtcagctttaaacccgaaacaaaatcaacacaactagatgcaaaagaagcaattgatttaggccatgaagcaaataccctctatctagcttcctatcaaacagcaggccgaggccgttttcaacgttccttctactcaccacaaggtggtatttatatgacactccatcttaaaccaaatctcccctatgacaaattaccatcctacacactacttgtagctggagctgtctacaaagccattaagaacctaactttaatagatgtcgacataaaatgggtcaatgatatctatctaaacaatcataaaattggaggaatccttactgaagcaatgacctctgtagaaactggcttagtcacagatatcattattggagtaggtatcaatttcactattaaagacttccctcaggaattaaaagaaaaagctgccagcttatttaaagctacagctcctataacaaggaatgaattgatcatagaaatctggcgtgctttcttcgaaacaccagcagaagagctattatacctatacaaaaaacagtcattcattctaggaaaagaagtcactttcacactagagcaaaaagactacaagggacttgctaaagacatctcagaaaatggaaaacttttagttcaatgtgataacggaaaagaaatctggctaaatagtggcgaaatttctctcaatagttggaag

SEQ ID NO: 3950 - protein, 311 aa, Streptococcus pneumoniae
  BirA bifunctional protein (birA); Cellular location: membrane; Similar to strain R6 sequence 15903757 (e-177)
MKSYQAVYQILSKETDYISGEKIAEKLSLSRTAIWKAIKRLEQEGIEIDSIKNRGYKLMNGDLILPEILEENLPIKVSFKPETKSTQLDAKEAIDLGHEANTLYLASYQTAGRGRFQRSFYSPQGGIYMTLHLKPNLPYDKLPSYTLLVAGAVYKAIKNLTLIDVDIKWVNDIYLNNHKIGGILTEAMTSVETGLVTDIIIGVGINFTIKDFPQELKEKAASLFKATAPITRNELIIEIWRAFFETPAEELLYLYKKQSFILGKEVTFTLEQKDYKGLAKDISENGKLLVQCDNGKEIWLNSGEISLNSWK

SEQ ID NO: 3951 - DNA, 1353 bp, Streptococcus pneumoniae
atgaatctgaaagtgaaacaaaaaataccattaaaaatcaagcgcatgggaattaacggtgagggaatcggcttttaccaaaaaacattagtctttgtaccaggagctctcaaaggcgaagatatctattgtcagattacttctattagacgcaactttgttgaagcaaaattactgaaggtcaacaagaagtctaaatttcgaattgtgccatcttgtactatttataatgaatgcggaggctgccaaatcatgcacctgcattatgataagcagctggagttcaagacggacttacttcatcaagcgctgaaaaaatttgctcctgcaggatatgaaaattatgaaattcgtccaactattggaatgcaggaaccaaaatattacagagctaagttacaatttcagactcgaaaatttaaaaatcaggtcaaggcgggcttatatgcacaaaactctcactatttagtagagttgaaagactgcctggtacaagataaggaaacccaagtgattgctaatcgcttagcagaattacttacttatcaccagattccaatcacggatgagagaaaagttctaggtgtccgtactattatggtccgacgcgcgagaaagaccggacaggttcagattattattgttacaaaccgccagcttaatttaactcaattggtaaaagagttggttaaagatttcccagaagttgtgacagtagctgttaatacaaatacagctaaaaccagtgagatatatggtgaaaagacagagattatctgggggcaagagagtattcaagaaggtgtactcaattatgaattttcactatcccctcgagctttttatcaactaaatcctgagcaaacagaagtcctctatagcgaagcagtaaaagcgctggatgttgataaagaagaccatttgattgacgcttattgtggagttggaacgattggatttgcctttgcaaagaaagtaaaaacactcagaggtatggatattattccagaagctattgaagatgccaagcgaaatgctaaaagaatgggatttgacaatactcattatgaagctggaacggcagaagagattattcctcgttggtacaaggaaggctaccgagcagatgctttgattgttgacccaccacgtacaggtctggatgataagttattagatactattcttacttatgtaccagaaaaaatggtttatatttcttgtaatgtttcgaccttggctcgtgatttggtacgcttagtagaagtctatgatcttcattatatccagtcggtcgatatgttcccacatacagctcgaactgaagctgttgtaaaattaataaaaaaagtt

SEQ ID NO: 3952 - protein, 451 aa, Streptococcus pneumoniae
  RNA methyltransferase, TrmA family; Cellular location: cytoplasm; Similar to strain R6 sequence 15903759 (0.E+01)
MNLKVKQKIPLKIKRMGINGEGIGFYQKTLVFVPGALKGEDIYCQITSIRRNFVEAKLLKVNKKSKFRIVPSCTIYNECGGCQIMHLHYDKQLEFKTDLLHQALKKFAPAGYENYEIRPTIGMQEPKYYRAKLQFQTRKFKNQVKAGLYAQNSHYLVELKDCLVQDKETQVIANRLAELLTYHQIPITDERKVLGVRTIMVRRARKTGQVQIIIVTNRQLNLTQLVKELVKDFPEVVTVAVNTNTAKTSEIYGEKTEIIWGQESIQEGVLNYEFSLSPRAFYQLNPEQTEVLYSEAVKALDVDKEDHLIDAYCGVGTIGFAFAKKVKTLRGMDIIPEAIEDAKRNAKRMGFDNTHYEAGTAEEIIPRWYKEGYRADALIVDPPRTGLDDKLLDTILTYVPEKMVYISCNVSTLARDLVRLVEVYDLHYIQSVDMFPHTARTEAVVKLIKKV

SEQ ID NO: 3953 - DNA, 858 bp, Streptococcus pneumoniae
atgcgcttgatttttaatggtattttttgtttcactttcagattcatacccctatcttatcacattttgagttataatagagctatgaaaatcacaaaacttgaaaagaaaaaaagactctatctgatggagcttgataatggcgacaaatgctatatcaccgaagacacaattgttcgttttatgttatcgagagataaggtgataagcgaagaggaattgaaagagattcaagactttgctcaattttcttatggtaagaatctggccctctaccacttatcctttaaagcacgtactgaaaaagaggtcagagaatatctgaaaaaatatgatattaatgaaaacatcgtttctcaagtcattgctaatcttaaagaagagaagtggattaatgatagccagtacgcttatgctatcatcaatgccaatcaactttcaggagacaagggaccttatgtactgactcagaaattagcacaaaaaggaatttcaaaatctactatagaagaaatcttgaatgattttgatttttcggaagttgctcaacgtgtagccaataaactattgaaaaaatatgagggaaaacttccagctcgtgccctgcaagataagattatccagaacttgactaacaagggcttctcttattttgatgctaaaattgcctttgacgaattggatagtcaagttgatgaagaaacgactcaggaactcatcttcaaggaacttgataagcaatatactaagtatgcccgaaagtatgaaggatacgaactgaagcagcgtttaactcaagttttagcacgaaagggctacgatttttcggatatagcaagcgctcttagagaatatctt

SEQ ID NO: 3954 - protein, 286 aa, Streptococcus pneumoniae
  conserved hypothetical protein; Cellular location: cytoplasm; Similar to strain R6 sequence 15903760 (e-139)
MRLIFNGIFCFTFRFIPLSYHILSYNRAMKITKLEKKKRLYLMELDNGDKCYITEDTIVRFMLSRDKVISEEELKEIQDFAQFSYGKNLALYHLSFKARTEKEVREYLKKYDINENIVSQVIANLKEEKWINDSQYAYAIINANQLSGDKGPYVLTQKLAQKGISKSTIEEILNDFDFSEVAQRVANKLLKKYEGKLPARALQDKIIQNLTNKGFSYFDAKIAFDELDSQVDEETTQELIFKELDKQYTKYARKYEGYELKQRLTQVLARKGYDFSDIASALREYL

SEQ ID NO: 3955 - DNA, 531 bp, Streptococcus pneumoniae
atgaagcttccaaaagaaggcgactttattacaattcaaagttataagcatgatgggagtctccaccgaacttggcgggacaccatggtactaaaaacaacagaaaacgccattattggtgtcaacgatcatacacttgttaccgaaagtgatggtcgtcgttgggtcactcgagaaccggctattgtttactttcacaagaaatattggtttaatatcattgccatgattcgtgataatggaacttcttactattgcaatatggctagcccctactatctggatgaagaagcactgaagtatattgattacgatttggatgttaaaatttttacagatggggaaaaacgtctcttggacgttgaagagtacgagcgtcacaaacgcaaaatgaattattctgatgacttggactatattttaaaagaacatgtcaaaattcttgttgattggattaacaatggacgtggtcctttctcagaagcctatgtaaacatttggtacaagcgctatgtagaactaaagaatcgg

SEQ ID NO: 3956 - protein, 177 aa, Streptococcus pneumoniae
  conserved hypothetical protein; Cellular location: cytoplasm; Similar to strain R6 sequence 15903761 (e-106)
MKLPKEGDFITIQSYKHDGSLHRTWRDTMVLKTTENAIIGVNDHTLVTESDGRRWVTREPAIVYFHKKYWFNIIAMIRDNGTSYYCNMASPYYLDEEALKYIDYDLDVKIFTDGEKRLLDVEEYERHKRKMNYSDDLDYILKEHVKILVDWINNGRGPFSEAYVNIWYKRYVELKNR

SEQ ID NO: 3957 - DNA, 204 bp, Streptococcus pneumoniae
atgaaattaaaaaaattattaaaggatgacacaaaagtttttgaaaaatctacattcaaatttgtagaaggatataaaatatacctgacagaatctaaagaatctggaattaaacaaatggacaatgtcataaaatattttgagtttattgaatctaaaagtattgctttatattttcaaaaacgattaaatgagctgatagat

SEQ ID NO: 3958 - protein, 68 aa, Streptococcus pneumoniae
  hypothetical protein; Cellular location: cytoplasm; Similar to strain R6 sequence 15903762 (7.E-34)
MKLKKLLKDDTKVFEKSTFKFVEGYKIYLTESKESGIKQMDNVIKYFEFIESKSIALYFQKRLNELID

SEQ ID NO: 3959 - DNA, 1304 bp, Streptococcus pneumoniae
atggaacaattacattttatcacaaaactgctcgatattaaagaccctaatatccagattttagacatcatcaataaggatacacacaaggaaatcatcgccaaactggactacgacgccccatcttgccctgagtgcggaaaccaattgaagaaatatgactttcaaaaaccttctaaaattccttatcttgaaacgactggtatgccttctagaattctccttagaaagcgtcgtttcaagtgctatcactgttcaaaaatgatggttgctgagactcccctggtaaagaaaaatcaccaaatccctcgtatcatcaaccaaaagattgctcaaaagttaattgaaaaaatttctatgactgatattgcccatcagctggccatttcaacttcaactgtcattcgcaagctcaatgactttcactttgagcatgatttttctcggcttccaaagattatgtcttgggatgagtatgccttcactaagggaaagatgagtttcattgcgcaagattttgataatcttaatattatcactgttcttgaaggcagaacacaagctgtcatccgaaatcactttcttcgctacgatagagccgttcgttgtcaagtgaaaatcattacgatggatatgtttagtccttactatgacttggctaaacagcttcgctttcaaatttctaggctcaggctgaaacagtctcccagactgtttcactcccgaatgctaaaatcgtgttggatcgctttcacattgtacaacatcttagccgtgctatgagtcgtgtgcgtgttcaaattatgaaccaattggatcgaaaatcccatgaatacaaggctatcaagcgctactggaagctcatacaacaggatagccgtaaactgagtgataagcgattttatcgtcctacttttcgtatgcatttaaccaataaagagattttagacaagcttttgagctattcacaagacttgaaacatcactatcagctctatcaactcttgctgtttcactttcagaataaggaaccggagaaatttttcggacttattgaggacaatcttaagcaagttcatcctatttttcagactgtctttaaaaccttcctcaaagataaagaaaagattatcaacgcccttcaactacactattctaacgccaaaccggaagcgaccaataatctcatcaaacttatcaagcgcaatgcctttggttttcgaaactttgaaaacttcaaaaaacggatttttatcgctttgaacatcaaaaaagaaaggacgaaatttgtcctttctcgagct

SEQ ID NO: 3960 - protein, 260 aa, Streptococcus pneumoniae
  IS1167, transposase FRAMESHIFT
MEQLHFITKLLDIKDPNIQILDIINKDTHKEIIAKLDYDAPSCPECGNQLKKYDFQKPSKIPYLETTGMPSRILLRKRRFKCYHCSKMMVAETPLVKKNHQIPRIINQKIAQKLIEKISMTDIAHQLAISTSTVIRKLNDFHFEHDFSRLPKIMSWDEYAFTKGKMSFIAQDFDNLNIITVLEGRTQAVIRNHFLRYDRAVRCQVKIITMDMFSPYYDLAKQLRFQISRLRLKQSPRLFHSRMLKSCWIAFTLYNILAVL

SEQ ID NO: 3961 - DNA, 567 bp, Streptococcus pneumoniae
gtgttggatcgctttcacattgtacaacatcttagccgtgctatgagtcgtgtgcgtgttcaaattatgaaccaattggatcgaaaatcccatgaatacaaggctatcaagcgctactggaagctcatacaacaggatagccgtaaactgagtgataagcgattttatcgtcctacttttcgtatgcatttaaccaataaagagattttagacaagcttttgagctattcacaagacttgaaacatcactatcagctctatcaactcttgctgtttcactttcagaataaggaaccggagaaatttttcggacttattgaggacaatcttaagcaagttcatcctatttttcagactgtctttaaaaccttcctcaaagataaagaaaagattatcaacgcccttcaactacactattctaacgccaaaccggaagcgaccaataatctcatcaaacttatcaagcgcaatgcctttggttttcgaaactttgaaaacttcaaaaaacggatttttatcgctttgaacatcaaaaaagaaaggacgaaatttgtcctttctcgagct

SEQ ID NO: 3962 - protein, 189 aa, Streptococcus pneumoniae
  transposase
MLDRFHIVQHLSRAMSRVRVQIMNQLDRKSHEYKAIKRYWKLIQQDSRKLSDKRFYRPTFRMHLTNKEILDKLLSYSQDLKHHYQLYQLLLFHFQNKEPEKFFGLIEDNLKQVHPIFQTVFKTFLKDKEKIINALQLHYSNAKPEATNNLIKLIKRNAFGFRNFENFKKRIFIALNIKKERTKFVLSRA

SEQ ID NO: 3963 - DNA, 1620 bp, Streptococcus pneumoniae
atgtcaaaagaaattaaattttcatcagatgcccgttcagccatggttcgtggtgtcgatatccttgcagacactgttaaagtaaccttgggaccaaaaggtcgcaatgtcgttcttgaaaagtcattcggttcacccttgattaccaatgacggtgtgaccattgccaaagaaatcgaattggaagaccattttgaaaatatgggtgctaagttagtatcagaagtagcttctaaaaccaatgatatcgcaggtgacggaactacgactgcaacagtcttgacccaagctatcgtccgtgaaggaatcaaaaacgtcacagcaggtgcaaatccaatcggtattcgtcgtgggattgaaacagcagttgccgcagcagttgaagctttgaaaaacaacgccatccctgttgccaataaagaagctatcgctcaagttgcagccgtatcttctcgttctgaaaaagttggtgagtacatctctgaagcaatggaaaaagttggcaaagacggtgtcatcaccatcgaagagtcacgtggtatggaaacagagcttgaagtcgtagaaggaatgcagtttgaccgtggttacctttcacagtacatggtgacagatagcgaaaaaatggtggctgaccttgaaaatccgtacattttgattacagacaagaaaatttccaatatccaagaaatcttgccacttttggaaagcattctccaaagcaatcgtccactcttgattattgcggatgatgtggatggcgaggctcttccaactcttgttttgaacaagattcgtggaaccttcaacgtagtagcagtcaaggcacctggttttggtgaccgtcgcaaagccatgcttgaagatatcgccatcttaacaggcggaacagttatcacagaagaccttggtcttgagttgaaagatgcgacaattgaagctcttggtcaagcagcgagagtgaccgtggacaaagatagcacggttattgtagaaggtgcaggaaatcctgaagcgatttctcaccgtgttgcggttatcaagtctcaaatcgaaactacaacttctgaatttgaccgtgaaaaattgcaagaacgcttggccaaattgtcaggtggtgtagcggttattaaggttggagccgcaactgaaactgagttgaaagaaatgaaactccgcattgaagatgccctcaacgctactcgtgcagctgttgaagaaggtattgttgcaggtggtggaacagctcttgccaatgtgattccagctgttgctaccttggaattgacaggagatgaagcaacaggacgtaatattgttctccgtgctttggaagaacccgttcgtcaaattgctcacaatgcaggatttgaaggatctatcgttatcgatcgtttgaaaaatgctgagcttggtataggatttaacgcagcaactggcgagtgggttaacatgattgatcaaggtatcattgatccagttaaagtgagtcgttcagccctacaaaatgcagcatctgtagccagcttgattttgacaacagaagcagtcgtagccaataaaccagaaccagtagccccagctccagcaatggatccaagcatgatgggcgggatgatg

SEQ ID NO: 3964 - protein, 540 aa, Streptococcus pneumoniae
  chaperonin, 60 kDa (groEL); Cellular location: membrane; Similar to strain R6 sequence 15903764 (0.E+01)
MSKEIKFSSDARSAMVRGVDILADTVKVTLGPKGRNVVLEKSFGSPLITNDGVTIAKEIELEDHFENMGAKLVSEVASKTNDIAGDGTTTATVLTQAIVREGIKNVTAGANPIGIRRGIETAVAAAVEALKNNAIPVANKEAIAQVAAVSSRSEKVGEYISEAMEKVGKDGVITIEESRGMETELEVVEGMQFDRGYLSQYMVTDSEKMVADLENPYILITDKKISNIQEILPLLESILQSNRPLLIIADDVDGEALPTLVLNKIRGTFNVVAVKAPGFGDRRKAMLEDIAILTGGTVITEDLGLELKDATIEALGQAARVTVDKDSTVIVEGAGNPEAISHRVAVIKSQIETTTSEFDREKLQERLAKLSGGVAVIKVGAATETELKEMKLRIEDALNATRAAVEEGIVAGGGTALANVIPAVATLELTGDEATGRNIVLRALEEPVRQIAHNAGFEGSIVIDRLKNAELGIGFNAATGEWVNMIDQGIIDPVKVSRSALQNAASVASLILTTEAVVANKPEPVAPAPAMDPSMMGGMM

SEQ ID NO: 3965 - DNA, 282 bp, Streptococcus pneumoniae
atgttgaaaccattaggggaccgtgtggtcttaaaaatagaagaaaaagaacaaactgttggaggctttgtccttgcaggctcagcccaagaaaaaaccaaaacagctcaagttgtggctactggacaaggtgttcgtaccttgaacggtgacttggttgctccaagtgttaaaactggagatcgtgtcttagttgaagcccacgcaggtcttgatgtcaaagatggcgatgaaaagtacatcatcgtaggcgaagctaacattttggcaatcattgaggaa

SEQ ID NO: 3966 - protein, 94 aa, Streptococcus pneumoniae
  chaperonin, 10 kDa (groES); Cellular location: cytoplasm; Similar to strain R6 sequence 15903765 (1.E-47)
MLKPLGDRVVLKIEEKEQTVGGFVLAGSAQEKTKTAQVVATGQGVRTLNGDLVAPSVKTGDRVLVEAHAGLDVKDGDEKYIIVGEANILAIIEE

SEQ ID NO: 3967 - DNA, 393 bp, Streptococcus pneumoniae
atgtataataaagttatcttgattggacgtttaacgtctacaccagaattgcacaaaaccaacaatgacaagtcggtagcgcgagcaactatcgctgtgaaccgtcgttacaaagaccaaaacggtgaacgtgaagctgattttgtcaatatggtcctatggggcagactagcagaaactttggcaagctacgcaaccaaaggtagtctcatttccgttgatggagaattgcgtacccgtcgctttgagaaaaatggccaaatgaactacgtgaccgaagtacttgtcacaggattccaactcttggaaagtcgtgcccaacgtgctatgcgtgaaaataatgcaggccaagatttggcagatttggtcttggaagaggaagaattgccattt

SEQ ID NO: 3968 - protein, 131 aa, Streptococcus pneumoniae
  single-strand binding protein, putative; Cellular location: cytoplasm; Similar to strain R6 sequence 15903766 (2.E-70)
MYNKVILIGRLTSTPELHKTNNDKSVARATIAVNRRYKDQNGEREADFVNMVLWGRLAETLASYATKGSLISVDGELRTRRFEKNGQMNYVTEVLVTGFQLLESRAQRAMRENNAGQDLADLVLEEEELPF

SEQ ID NO: 3969 - DNA, 759 bp, Streptococcus pneumoniae
atggcaaaaaatgttgtgattacaggagcgacatcaggaatcggtgaagcgattgcgcgtgcttatctggagcagggtgaggatgtcgttctaacaggacgacggatagacagactagaagctcttaaggcggagtttgcagaaacttttccaaatcaaacagtttggacttttctcctagatgtcacggatatgacaatggtaaagactgtctgctctgatattttagaaacgataggtcagattgacatcctggtcaataacgcaggactggctcttggcttagctccctatcaagactatgaagagttggatatgctgaccatgttggataccaatgtcaaaggtttgatggcagtcactcgctgtttcttgccagcaatggtaaaagccaatcaaggtcatattatcaatatggggtcaaccgcaggaatttatgcctatgctggtgcagctgtttactcagccaccaaggcggcagttaagaccttttcagatggactgcgaattgataccatcgcaacggatatcaaggtgacgaccattcagcctggaattgtcgaaacagatttttctacagtgcgttttcatggtgataaagaacgagctgcgtccgtttaccaaggaatagaagctttgcaagctcaggatattgcagatacagtagtctatgtgactagtcaacctcgtcgtgttcagattacagatatgaccattatggccaatcaacaggcgacaggtttcatggttcataaaaaa

SEQ ID NO: 3970 - protein, 253 aa, Streptococcus pneumoniae
  oxidoreductase, short chain dehydrogenase/reductase family; Cellular location: cytoplasm; Similar to strain R6 sequence 15903767 (e-134)
MAKNVVITGATSGIGEAIARAYLEQGEDVVLTGRRIDRLEALKAEFAETFPNQTVWTFLLDVTDMTMVKTVCSDILETIGQIDILVNNAGLALGLAPYQDYEELDMLTMLDTNVKGLMAVTRCFLPAMVKANQGHIINMGSTAGIYAYAGAAVYSATKAAVKTFSDGLRIDTIATDIKVTTIQPGIVETDFSTVRFHGDKERAASVYQGIEALQAQDIADTVVYVTSQPRRVQITDMTIMANQQATGFMVHKK

SEQ ID NO: 3971 - DNA, 624 bp, Streptococcus pneumoniae
atgatttttacatataataaagaacatgtcggtgatgtccttatggtcatcgtgaaaaatagcggagatgccaaactggatgtggagcgcaaaggcaaggtagcccgtgtttttctcaaagataatggggaaacagtggcttggaatattttcgaagtttcaagtttatttgaaattgcagagcgcggtcaagtctttttgacagatgagcaagtcgctcgtttgaaccaagagttgcaggcggaaggttttacagaagaaattgttaatgataaggaacctaagtttgttgtaggtgaaattgttgagatggtagcccatccagatagtgaccacctcaacatctgccaagttgcagtcgcaagtgataagactgtacaaatcgttgcaggagctcccaatgcgcgtgtggggttgaaaaccattgtcgcgcttcctggagctatgatgccaaaagggaatctcattttcccaggtgaacttcgtggtgaaaagagttttggtatgatgtgcagtcctcgtgaattgcatctgccaaatgctccacaaaaacgtggggtgcttgaattatcagaagaccaagttgtcggaacaccgttcgacccagcgaaacactggactgcc

SEQ ID NO: 3972 - protein, 208 aa, Streptococcus pneumoniae
  conserved hypothetical protein; Cellular location: cytoplasm; Similar to strain R6 sequence 15903768 (e-115)
MIFTYNKEHVGDVLMVIVKNSGDAKLDVERKGKVARVFLKDNGETVAWNIFEVSSLFEIAERGQVFLTDEQVARLNQELQAEGFTEEIVNDKEPKFVVGEIVEMVAHPDSDHLNICQVAVASDKTVQIVAGAPNARVGLKTIVALPGAMMPKGNLIFPGELRGEKSFGMMCSPRELHLPNAPQKRGVLELSEDQVVGTPFDPAKHWTA

SEQ ID NO: 3973 - DNA, 315 bp, Streptococcus pneumoniae
atgatacagccagcaagtttagaagaattagcatctttagtggaaaaagcgggcaagaaggtcttcatttttgtggcagactggtgtagcgattgtcgttatatttatcctgccttaccagagattgaggagaccaatccagagttcacctttattcgaatggaccgagatcagtatatggatttggccaaactctgggatgtttacggaattcctagccttgttgttctagaaaaggacaaggaaatcggtcgttttgtcaatcgcgaccgtaaaagcaagcaacaaatcaatgactttttagcaggactgaaa

SEQ ID NO: 3974 - protein, 105 aa, Streptococcus pneumoniae
  thioredoxin, putative; Cellular location: cytoplasm; Similar to strain R6 sequence 15903769 (5.E-57)
MIQPASLEELASLVEKAGKKVFIFVADWCSDCRYIYPALPEIEETNPEFTFIRMDRDQYMDLAKLWDVYGIPSLVVLEKDKEIGRFVNRDRKSKQQINDFLAGLK

SEQ ID NO: 3975 - DNA, 297 bp, Streptococcus pneumoniae
atgaatggtatgaaagctaaaaaaatgtggatggcaggcttggctctgctaggtatcggaagccttgctcttgctacgaaaaaagttgcagatgaccgtaagctcatgaagactcaggaagagttgacagagattgtgcgagaccatttttccgacatgggggaaattgcgaccctttatgttcaagtttacgaaagcagtctggagagcttggttggtggcgtcatttttgaggatggccgtcattatacctttgtctatgaaaatgaagacctagtctatgaggaggaagtctta

SEQ ID NO: 3976 - protein, 99 aa, Streptococcus pneumoniae
  hypothetical protein; Cellular location: outside; Similar to strain R6 sequence 15903770 (2.E-52)
MNGMKAKKMWMAGLALLGIGSLALATKKVADDRKLMKTQEELTEIVRDHFSDMGEIATLYVQVYESSLESLVGGVIFEDGRHYTFVYENEDLVYEEEVL

SEQ ID NO: 3977 - DNA, 129 bp, Streptococcus pneumoniae
atgaaaatcaaagaccaaactaggaagctagccgcaggctgctcaaagcactgctttgaggttgtagatagaactgacgaagtcagctcaaaacactgttttgaggttgtggatgaagctgacgtggtt

SEQ ID NO: 3978 - protein, 43 aa, Streptococcus pneumoniae
  hypothetical protein
MKIKDQTRKLAAGCSKHCFEVVDRTDEVSSKHCFEVVDEADVV

SEQ ID NO: 3979 - DNA, 264 bp, Streptococcus pneumoniae
gtgcctggcaataagaataatactcttcgaaaatctcttcaaaccacgtcagcttcatccacaacctcaaaacagtgttttgagctgacttcgtcagttctatctacaacctcaaagcagtgctttgagcagcctgcggctagcttcctagtttggtctttgattttcattgagtataagaagtccttttccttaaaggaagaggctttttacttgcttttctgctgcttcctcatttgtcctgaagccttttttgtgttaaaa

SEQ ID NO: 3980 - protein, 88 aa, Streptococcus pneumoniae
  box element
MPGNKNNTLRKSLQTTSASSTTSKQCFELTSSVLSTTSKQCFEQPAASFLVWSLIFIEYKKSFSLKEEAFYLLFCCFLICPEAFFVLK

SEQ ID NO: 3981 - DNA, 213 bp, Streptococcus pneumoniae
ttggcttttacgtttgatgtatctatgtactacagcgtagatgatgtagtgtcaaatgcttttaaaaaacgaatgatattggacagtttttttgcctttaattgctcaggaaccatgaaagtcagtacttgggtttatgacaagggagaatggtattatgtaagttcttctggttccatgattgcgaatgattgggtcaaagacaatggcaag

SEQ ID NO: 3982 - protein, 71 aa, Streptococcus pneumoniae
  cspC-related protein POINT MUTATION
MAFTFDVSMYYSVDDVVSNAFKKRMILDSFFAFNCSGTMKVSTWVYDKGEWYYVSSSGSMIANDWVKDNGK

SEQ ID NO: 3983 - DNA, 672 bp, Streptococcus pneumoniae
atgaaaaagaaagcatttggtattgttttattggttttagcagcttggatcttgctgcaagggaattttggaattccttctttggatggtaaaatatggcctttactaggtattgttttttttgcttataagtccattgagtccatccttagacgtcatctcacttcggcagtttttacaggtttactggcgctcatcattgcaaattacgcttatgacttgttaccagttaccaatcattctcttatttgggctagcatcttggtggtacttggtgttggttatctgacgcattcaagtaagttctggaatgaaaaaaaatggtggtacaatgggaaaaaaacagtcgtcacggataaggaagtcgcttttggtagcgggaccttctataagcaagatcaagatctcgtagatgaccaagtggaagtcgcttttggggatgctaaaatctactatgataatgcagagatgctaggtgattttgcaactttaaatattgaagtggccttcgggaatgcaaccgtctatgttccacaacactggcgtgtagatttgaaagtagaaacctcctttggtgcagctaaggctgacgctcctgtagccccaaccagcaaaaccttgattatccgtggagatgtggcttttgggaagttggaaattgtctacgttaaa

SEQ ID NO: 3984 - protein, 224 aa, Streptococcus pneumoniae
  hypothetical protein; Cellular location: membrane; Feature of note: RGD motif; Similar to strain R6 sequence 15903772 (e-128)
MKKKAFGIVLLVLAAWILLQGNFGIPSLDGKIWPLLGIVFFAYKSIESILRRHLTSAVFTGLLALIIANYAYDLLPVTNHSLIWASILVVLGVGYLTHSSKFWNEKKWWYNGKKTVVTDKEVAFGSGTFYKQDQDLVDDQVEVAFGDAKIYYDNAEMLGDFATLNIEVAFGNATVYVPQHWRVDLKVETSFGAAKADAPVAPTSKTLIIRGDVAFGKLEIVYVK

SEQ ID NO: 3985 - DNA, 447 bp, Streptococcus pneumoniae
gtgatgaagttacgaattgagattgacggcaatttagaggagactgaaattgtcatcaagacccccactttgacagatgaaattgcagacttgcaacgcctcttgcaagagtcaaaggctccgaggttgactttttacaaggggacaggtgaatattatctagacctgtcagaaattctcttctttgaaacagaagggagcaagatctacgctcataaccagaaggaagcttatgaggttcgcctcaagctctatgagttggagtctatcttgcctcgctattttaatcgagtttccaagtcaacgatcgcaaacatccgtcagatttactcagtggacaagtccttttcaggaacgggcaccatttccttttatcagacgcacaaggaggttcatgtctcacggcattaccaatccctcctaaaagaaaatctaagaaacatgagg

SEQ ID NO: 3986 - protein, 149 aa, Streptococcus pneumoniae
  hypothetical protein; Cellular location: cytoplasm; Similar to strain R6 sequence 15903773 (2.E-80)
MMKLRIEIDGNLEETEIVIKTPTLTDEIADLQRLLQESKAPRLTFYKGTGEYYLDLSEILFFETEGSKIYAHNQKEAYEVRLKLYELESILPRYFNRVSKSTIANIRQIYSVDKSFSGTGTISFYQTHKEVHVSRHYQSLLKENLRNMR

SEQ ID NO: 3987 - DNA, 501 bp, Streptococcus pneumoniae
atgaaaaattatcaagaatggtatcgaaatatcagctccagactaactagttgtccaattcttttattcctattacgcagtttcaatcgtttgatgacagtcgccatgcccctggtctatctgatcttgctagtcaccacttacctgcaactaggacttggtcagcaagttggggtttatgtgcttattcctgcatcaggttttgtggccttgtccctgtttcgtaagaaaatcaatcacccgagaccttatgaaacttgggatatctgtccccttcttgataaggatagttcgggacggtcgatgcccagtcgccatgtcttttcggcaactatcatctccatggcctgtctgcatgctagtctacctattggcttagtatgcttgatcttttcagctttgctggggttggtgagggttttagggggtgttcattatcccaaggatgtcttggttggctatgcttgtggtttggtgtggggattccttttcttcctattc

SEQ ID NO: 3988 - protein, 167 aa, Streptococcus pneumoniae
  PAP2 family protein; Cellular location: membrane; Similar to strain R6 sequence 15903774 (8.E-93)
MKNYQEWYRNISSRLTSCPILLFLLRSFNRLMTVAMPLVYLILLVTTYLQLGLGQQVGVYVLIPASGFVALSLFRKKINHPRPYETWDICPLLDKDSSGRSMPSRHVFSATIISMACLHASLPIGLVCLIFSALLGLVRVLGGVHYPKDVLVGYACGLVWGFLFFLF

SEQ ID NO: 3989 - DNA, 360 bp, Streptococcus pneumoniae
atgagtcagaaattatacaatatgaaatttgctgctgtctacttagccttgattgcaaaagttgagcgaaagggtggaaaggcagagtcagttcaccaagtgaccagttggttgacagggtatgaagtgagtgatgttcttgcttgtctggatagggatgttacttacggagatttttttagacaagcaccatattatgtccctgaacgaattgcaattacagggaagatttgcggtgtccgtattgaggaaattgatgatcctctgatgcaggaaatacgtcgcttggacaagctagtggattggcttgccaaggggaaaacatctcaacaagttctagaaaagtatgagaagcataaa

SEQ ID NO: 3990 - protein, 120 aa, Streptococcus pneumoniae
  hypothetical protein; Cellular location: outside; Similar to strain R6 sequence 15903775 (1.E-66)
MSQKLYNMKFAAVYLALIAKVERKGGKAESVHQVTSWLTGYEVSDVLACLDRDVTYGDFFRQAPYYVPERIAITGKICGVRIEEIDDPLMQEIRRLDKLVDWLAKGKTSQQVLEKYEKHK

SEQ ID NO: 3991 - DNA, 1029 bp, Streptococcus pneumoniae
atgggcttccttctcatgggagcactcttcatcgttcttccccgaactatggtctctgctaagcggattaatcaagttttagatttgcattcttctatccaaaaccctgttcaagtgcagctgactgatgaaaacttcaaaggtcaggtcgagtttaaggatgtgaccttccgctatgcggcaaattcggaggcagttattgaacatgttagctttaaagcagaaactggtcaaacagtggcctttattgggtcaacaggttctggtaaatcaactctggtcaatctgattccacgtttctacgacgtgtcagcaggagaaattctggtggacggtgtcaatgttcaagactatgacttctctgcgacagctcatgctggtcaaaaggttgccattgttgggccgactggggctggtaagacaaccattgtcaatcttttgatgaaattctatgagattgataagggaagtattcgcattgatggtgtggataccaaggctatgacgcgttcagaagtgcatgatgccttttcaatggtcttgcaggatacctggctctttgaaggaactattcgagacaatctcatctataatcaaatagggattagtgatgaacgaatgatggaagctagtaaggctgtgggaattcaccactttattatgaccttgccagatggctatgataccatcttggatgacaccgtgaccttgtctgtaagacaaaaacaactattgactattgctcgtgcccttcttaaggatgcaccgcttttgattttggatgaggcgacttcttctgttgacacacggacagaggaattgatccaaaaagccatggaccgtttgatggaaggacgcacatcctttgtcattgcccaccgcttgtcaaccatccgaaatgcagacttgatcttggtcatgaaagatggaaatatcatcgagcaaggcaactatgaggaactgatggcgcaaggtggcttctacgctgacttgtacaatagtcaatttacagaagatgaagcagaagaa

SEQ ID NO: 3992 - protein, 343 aa, Streptococcus pneumoniae
  ABC transporter, ATP-binding protein; Cellular location: cytoplasm; Similar to strain R6 sequence 15903776 (0.E+01)
MGFLLMGALFIVLPRTMVSAKRINQVLDLHSSIQNPVQVQLTDENFKGQVEFKDVTFRYAANSEAVIEHVSFKAETGQTVAFIGSTGSGKSTLVNLIPRFYDVSAGEILVDGVNVQDYDFSATAHAGQKVAIVGPTGAGKTTIVNLLMKFYEIDKGSIRIDGVDTKAMTRSEVHDAFSMVLQDTWLFEGTIRDNLIYNQIGISDERMMEASKAVGIHHFIMTLPDGYDTILDDTVTLSVRQKQLLTIARALLKDAPLLILDEATSSVDTRTEELIQKAMDRLMEGRTSFVIAHRLSTIRNADLILVMKDGNIIEQGNYEELMAQGGFYADLYNSQFTEDEAEE

SEQ ID NO: 3993 - DNA, 819 bp, Streptococcus pneumoniae
atgattttactagccattctctttacttgcttttcggtctatctagagttggaagtgccgacctatatctcgaaaattacggatttgctaggtagtcaagaaactaatttagatgagttgtggcagtcggcaagcatgatgatgggaatgtcctttcttgccttcttgtccgtagttgcagttggattttttgcatcccgagtggcggcttcttatactagtaggctgagaagtgatatttttaaccgagttttggattactcgcagacagagattaagaaattttcaattcctagcctcttgacgcgtactaccaatgacattactcaagttcaaatgttgattactatgggcttgcaagtggtaacgcgtggttcaattatggctatctgggctattgggaagattttaggtcattcagaatactggctctgggccgtacttgtggcagtgattatcaacgtcctgatgacgaccgttttgatgacgctagcctttccaaaacagtccttgattcaggggctgacagataaactgaacagtatcactcgtgagagtttaacaggtattcgtgtcgttcgtgcctacaatgcagaggattatcaaaatgaaaaatttgcagcagtaaatgatgaattgacccgtttgaatttgtttgtcaaccgtcttatggctattttgaatcctatcatgatggggatttcaagtggtttgagtgtggcgatttactggattggggcctatgtgattaacgacgctgctccgatagcgcgtctgcctctctttagtgacatgattgttttcatgtcttatgccatg

SEQ ID NO: 3994 - protein, 273 aa, Streptococcus pneumoniae
  ABC transporter, permease protein; Cellular location: membrane; Similar to strain R6 sequence 15903778 (e-112)
MILLAILFTCFSVYLELEVPTYISKITDLLGSQETNLDELWQSASMMMGMSFLAFLSVVAVGFFASRVAASYTSRLRSDIFNRVLDYSQTEIKKFSIPSLLTRTTNDITQVQMLITMGLQVVTRGSIMAIWAIGKILGHSEYWLWAVLVAVIINVLMTTVLMTLAFPKQSLIQGLTDKLNSITRESLTGIRVVRAYNAEDYQNEKFAAVNDELTRLNLFVNRLMAILNPIMMGISSGLSVAIYWIGAYVINDAAPIARLPLFSDMIVFMSYAM

SEQ ID NO: 3995 - DNA, 447 bp, Streptococcus pneumoniae
atggataaaccgatgttagtctttaagcgttttggtcatcaaattcacctgatggtgcaaaaggaagccaaacgttgcggcattgaatttatgggtgggccgcaaggtcaggttgtgcgttttttggataatcgcgagaaaaaccaagacttggtcttgattaaagatatcgagcaggaactcaatattaccaagcctgttgctagtaatctggttaagcgtatagtgcaaaatggtttggtggaattggaggcgagtcctgttgataagcgggctaagtttgttcgtctgacggacaaagcacgttctcagatgcaacaggttaaggctttttttgaacgcatagacaagcagttgatggaagacattgatgaagatgaattactgatttttgagaaggttctcggtcaactacaggcaaaatatcaagggaataggaggagagaa

SEQ ID NO: 3996 - protein, 149 aa, Streptococcus pneumoniae
  transcriptional regulator, MarR family; Cellular location: cytoplasm; Similar to strain R6 sequence 15903779 (1.E-57)
MDKPMLVFKRFGHQIHLMVQKEAKRCGIEFMGGPQGQVVRFLDNREKNQDLVLIKDIEQELNITKPVASNLVKRIVQNGLVELEASPVDKRAKFVRLTDKARSQMQQVKAFFERIDKQLMEDIDEDELLIFEKVLGQLQAKYQGNRRRE

SEQ ID NO: 3997 - DNA, 93 bp, Streptococcus pneumoniae
atgatcctaagtgagaaaatcacttgggatttttttaatcaagaaaatagttctcatagaaatttaattattctccagagaactatttttatt

SEQ ID NO: 3998 - protein, 31 aa, Streptococcus pneumoniae
  hypothetical protein; Cellular location: cytoplasm
MILSEKITWDFFNQENSSHRNLIILQRTIFI

SEQ ID NO: 3999 - DNA, 714 bp, Streptococcus pneumoniae
atgggacgtaaatgggccaatatcgtagccaagaaaacggctaaagatggagctaactctaaagtatatgcaaaatttggtgtagaaatctatgtagcagctaaaaaaggtgatccagatccagaatcaaactcagctttgaaattcgttatcgaccgtgctaaacaagcccaagtgccaaaacacattatcgataaagcgattgataaagccaaaggaaacacagacgaaacctttacagaaggacgttacgaaggttttgggccaaatggctctatgctaattgtggatactttgacttctaacgtcaaccgtacagcagccaatgtccgtgcagcctttggtaaaaacggcggaaacatgggcgcttcaggttctgtttcttacctctttgacaacaaaggtgttattgtatttggaggtgaagatgcggacgcagtctttgagcaattgctcgaagcggatgtggatgtggatgacgtagaagcacaagaaggtacaatcacagtttacacagcgccaactgaccttcacaaggctatcgttgccctccgtgagtctggtattgaagaattccaagtgactgaattggaaatgattcctcagtcagaagtggaattgtcaggcgaagaccttgaaacctttgaaaaactttacagcgttcttgaagacgacgaagacgtccaaaagatttatacgaacgtagatgggttt

SEQ ID NO: 4000 - protein, 238 aa, Streptococcus pneumoniae
  conserved hypothetical protein; Cellular location: cytoplasm; Similar to strain R6 sequence 15903780 (e-134)
MGRKWANIVAKKTAKDGANSKVYAKFGVEIYVAAKKGDPDPESNSALKFVIDRAKQAQVPKHIIDKAIDKAKGNTDETFTEGRYEGFGPNGSMLIVDTLTSNVNRTAANVRAAFGKNGGNMGASGSVSYLFDNKGVIVFGGEDADAVFEQLLEADVDVDDVEAQEGTITVYTAPTDLHKAIVALRESGIEEFQVTELEMIPQSEVELSGEDLETFEKLYSVLEDDEDVQKIYTNVDGF

SEQ ID NO: 4001 - DNA, 1413 bp, Streptococcus pneumoniae
atggcaaataaagcagtaaatgactttatactagctatgaattacgataaaaagaaactcttgacccatcagggagaaagtattgaaaatcgtttcatcaaagagggtaatcagctacccgatgagtttgttgttatcgaaagaaagaagcggagcttgtcgacaaatacaagtgatatttctgtaacagctaccaacgacagtcgcctctatcctggagcacttctcgtagtggatgagaccttgttagagaataatcccactcttcttgcggtcgatcgtgctccgatgacttatagtattgatttgcctggtttggcaagtagcgatagctttctccaagtggaagaccccagcaattcaagtgttcgcggagcggtaaacgatttgttggctaagtggcatcaagattatggtcaggtcaataatgtcccagctagaatgcagtatgaaaaaatcacggctcacagcatggaacaactcaaggtcaagtttggttctgactttgaaaagacagggaattctcttgatattgattttaactctgtccattcaggcgaaaagcagattcagattgttaattttaagcagatttattatacagtcagcgtagatgctgttaaaaatccaggagatgtgtttcaagatactgtaacggtagaggatttaaaacagagaggaatttctgcagagcgtcctttggtctatatttcgagtgttgcttatgggcgccaagtctatctcaagttggaaaccacgagtaagagtgatgaagtagaggctgcttttgaagctttgataaaaggagtcaaggtagctcctcagacagagtggaaacagattttggacaatacagaagtgaaggcggttattttagggggcgacccaagttcgggtgcccgagttgtaacaggcaaggtggatatggtagaggacttgattcaagaaggcagtcgctttacagcagatcatccaggcttgccgatttcctatacaacttcttttttacgtgacaatgtagttgcgacctttcaaaatagtacagactatgttgagactaaggttacagcttacagaaacggagatttactgctggatcatagtggtgcctatgttgcccaatattatattacttggaatgaattatcctatgatcatcaaggtaaggaagtcttgactcctaaggcttgggacagaaatgggcaggatttaacggctcactttaccactagtattcctttaaaagggaatgttcgtaatctctctgtcaaaattagagagtgtaccgggcttgcctgggaatggtggcgtacggtttatgaaaaaaccgatttgccactagtgcgtaagcggacgatttctatttggggaacaactctctatcctcaggtagaagataaggtagaaaatgac

SEQ ID NO: 4002 - protein, 471 aa, Streptococcus pneumoniae
  pneumolysin (ply); Cellular location: cytoplasm; Feature of note: similar to alveolysin, toxin; Similar to strain R6 sequence 15903781 (0.E+01)
MANKAVNDFILAMNYDKKKLLTHQGESIENRFIKEGNQLPDEFVVIERKKRSLSTNTSDISVTATNDSRLYPGALLVVDETLLENNPTLLAVDRAPMTYSIDLPGLASSDSFLQVEDPSNSSVRGAVNDLLAKWHQDYGQVNNVPARMQYEKITAHSMEQLKVKFGSDFEKTGNSLDIDFNSVHSGEKQIQIVNFKQIYYTVSVDAVKNPGDVFQDTVTVEDLKQRGISAERPLVYISSVAYGRQVYLKLETTSKSDEVEAAFEALIKGVKVAPQTEWKQILDNTEVKAVILGGDPSSGARVVTGKVDMVEDLIQEGSRFTADHPGLPISYTTSFLRDNVVATFQNSTDYVETKVTAYRNGDLLLDHSGAYVAQYYITWNELSYDHQGKEVLTPKAWDRNGQDLTAHFTTSIPLKGNVRNLSVKIRECTGLAWEWWRTVYEKTDLPLVRKRTISIWGTTLYPQVEDKVEND

SEQ ID NO: 4003 - DNA, 408 bp, Streptococcus pneumoniae
ttgattaagagaggagatgttgtagctctttatttgccttttccgactattagtagcgatttggctgtgaagaatcatatgtatatctgtattgacaacagcatgactaaaaacaaagagttggttaaaaatcagaccttcaaaccagctctcttgaccagacgtttggtcaagaactttatgatagaagagccggatctagctcgtaatccttttacaagaccaaccttgattgacttagataaggtatttatgttggataatacggtcattccgacttcttatttagccagacggcgacgcaatgtctcagaagaattgtacgaggaaattttggattacttagtccaaccacggctgatttcgctgaacaagtctgagtttatgcaactcaatccaggaacttat

SEQ ID NO: 4004 - protein, 136 aa, Streptococcus pneumoniae
  hypothetical protein; Cellular location: cytoplasm; Similar to strain R6 sequence 15903782 (2.E-74)
MIKRGDVVALYLPFPTISSDLAVKNHMYICIDNSMTKNKELVKNQTFKPALLTRRLVKNFMIEEPDLARNPFTRPTLIDLDKVFMLDNTVIPTSYLARRRRNVSEELYEEILDYLVQPRLISLNKSEFMQLNPGTY

SEQ ID NO: 4005 - DNA, 606 bp, Streptococcus pneumoniae
atgtctcaatccagctacctgtcgcccttgctctggttaaaaaaagaagccgataaggaaaagatgagcgcgacccagtgccagatatttttcttttactatcaaatgtttgagctcttatttgctagagaaagcgacatgaaagacttatgtctgggaacgaaaggtttttatttctcgcagttagagaaaaatttgctttctggagtttcccgatttctaaaaaacttggaggggaaagtaactctcaaggctaaccaagaagtatcagctcgcaaagccctttttctagccttgacaactagccaatcagattggcaggagttagctcctgtttttgatttttatcagactatcgggaggcttgaaaatccttctctcttgagttctcaggacagacaacatctgatgtggatttaccagtcagctttggagaaggattatattgtcaaggttattggcgacaagcattttgtattgaagagacaagatgctactaaattgacagcgcgccaaactcaaactttggaaattctgagtcaatcagaagacttggtcaatcctgtctatgttacattaggagaaaagggggtgctcttgcttgat

SEQ ID NO: 4006 - protein, 202 aa, Streptococcus pneumoniae
  hypothetical protein; Cellular location: cytoplasm; Similar to strain R6 sequence 15903783 (e-113)
MSQSSYLSPLLWLKKEADKEKMSATQCQIFFFYYQMFELLFARESDMKDLCLGTKGFYFSQLEKNLLSGVSRFLKNLEGKVTLKANQEVSARKALFLALTTSQSDWQELAPVFDFYQTIGRLENPSLLSSQDRQHLMWIYQSALEKDYIVKVIGDKHFVLKRQDATKLTARQTQTLEILSQSEDLVNPVYVTLGEKGVLLLD

SEQ ID NO: 4007 - DNA, 474 bp, Streptococcus pneumoniae
atgaaaggagttacgaatatgacgccagaagaaatgtacctgacagagcgattagacgtacagatagctcattttttaaagaaaagcgttcaacatcgtaggcgctataaggtattaaaaataacagaaatcgtggcaggtttcctcatagctgtcttttgtgctattcctatgccaggtgatcgctaccgtttgatttcggttgccttatccagtctcggcttgctgtgtgaggggattatcaatttgtataatgcaaaggaaaattggatttcttaccaaaaaactgcgcaactcctggagaaagaaaaattcctctatcaatgccaaacggagaaatatgcaggaaagaccaaggcttttgccctatttgtcaagacatgcgaaggtcttatctcagaggagattaaccagtgggaaagtatccagtcaaaagaagtggcagctagtgcagatgctccagttaaaaaagag

SEQ ID NO: 4008 - protein, 158 aa, Streptococcus pneumoniae
  hypothetical protein; Cellular location: membrane; Similar to strain R6 sequence 15903784 (1.E-54)
MKGVTNMTPEEMYLTERLDVQIAHFLKKSVQHRRRYKVLKITEIVAGFLIAVFCAIPMPGDRYRLISVALSSLGLLCEGIINLYNAKENWISYQKTAQLLEKEKFLYQCQTEKYAGKTKAFALFVKTCEGLISEEINQWESIQSKEVAASADAPVKKE

SEQ ID NO: 4009 - DNA, 387 bp, Streptococcus pneumoniae
atgaattatgaagcaagtaaacaactaactgatgcacgatttaagcgtcttgttggtgttcagcgcacgacttttgaagagatattagctgtattaaaaacagcttatcaacttaaacacgcaaaaggtggacgaaaacctaaattaaacctagaagaccttcttatggccactcttcaatatgtgcgagaataccgcacttatgaagaaattgcggctgattttggtattcacgaaagcaacttaatccgtcggagccaatgggttgaagtaactcttgttcaaagtggtgttacgatttcaagaactcctcttagttctgaggacacggtaatgattgatgcgacggaagtaaaaatcaatcgccctaaaaaaagaattagcgaa

SEQ ID NO: 4010 - protein, 129 aa, Streptococcus pneumoniae
  IS1381, transposase OrfA FRAMESHIFT; Cellular location: cytoplasm; Similar to strain R6 sequence 15902886 (4.E-66)
MNYEASKQLTDARFKRLVGVQRTTFEEILAVLKTAYQLKHAKGGRKPKLNLEDLLMATLQYVREYRTYEEIAADFGIHESNLIRRSQWVEVTLVQSGVTISRTPLSSEDTVMIDATEVKINRPKKRISE

SEQ ID NO: 4011 - DNA, 387 bp, Streptococcus pneumoniae
atgaaggctcaagcgattgtcacaagtcaagggagaattgtttctttggatatcactgtgaactattgtcatgatatgaagttgttcaaaatgagttgcagaaatatcggacaagctggtaaaatcttggctgacagtggttatcaagggctcatgaagatatgtcctcaagcacaaactccacgtaaatccagcaaactcaagccgctaacagctgaagataaagcctataaccatgcgctatctaaggagagaagcaaggttgagaacatctttgccaaagtagaaacgtttaaaatgttttcaacaacctatcgaaatcatcgtaaacgctttggattacgaatgaatttgattgctggtattatcaatcatgaactaggattc

SEQ ID NO: 4012 - protein, 129 aa, Streptococcus pneumoniae
  IS1381, transposase OrfB FRAMESHIFT; Cellular location: cytoplasm; Similar to strain R6 sequence 15903038 (6.E-68)
MKAQAIVTSQGRIVSLDITVNYCHDMKLFKMSCRNIGQAGKILADSGYQGLMKICPQAQTPRKSSKLKPLTAEDKAYNHALSKERSKVENIFAKVETFKMFSTTYRNHRKRFGLRMNLIAGIINHELGF

SEQ ID NO: 4013 - DNA, 96 bp, Streptococcus pneumoniae
atgaaacgagaacaggacaaattgatcaggacagtcaaatcgatttctaacaatgttttagaagcagaagtgtactattctagtttcaatctacta

SEQ ID NO: 4014 - protein, 32 aa, Streptococcus pneumoniae
  hypothetical protein; Cellular location: cytoplasm
MKREQDKLIRTVKSISNNVLEAEVYYSSFNLL

SEQ ID NO: 4015 - DNA, 258 bp, Streptococcus pneumoniae
atgagggagcgctctgccacaggtgctcaaggtttaagtaagtccattaaaaagcatttgaatgaccttacccgtttgacagcttccttgctaggagatgaaaagttatcggctataacatcaagtagtgcggtaaaagcagacatgcaccgctttgtgatagaattagagcctgtgaagtcaactattcttcaaaataatgacatttcattggatcaaaatgaaatttttgaaattctgaaaaattttctcgatggt

SEQ ID NO: 4016 - protein, 86 aa, Streptococcus pneumoniae
  hypothetical protein; Cellular location: cytoplasm; Similar to strain R6 sequence 15903788 (9.E-43)
MRERSATGAQGLSKSIKKHLNDLTRLTASLLGDEKLSAITSSSAVKADMHRFVIELEPVKSTILQNNDISLDQNEIFEILKNFLDG

SEQ ID NO: 4017 - DNA, 123 bp, Streptococcus pneumoniae
ttgtggtttatactcttcgaaaatctcttcaaaccacgtcagcttccatctacaacctcaaaacagtgttttgagcagcctgcagctagcttcctagtttgctctttgattttcattgagtat

SEQ ID NO: 4018 - protein, 41 aa, Streptococcus pneumoniae
  hypothetical protein
MWFILFENLFKPRQLPSTTSKQCFEQPAASFLVCSLIFIEY

SEQ ID NO: 4019 - DNA, 552 bp, Streptococcus pneumoniae
atgatgccagctaatacgaaagttatttttcaagaaatgtttgcggattttcagaactattatgttctgattgggggaactgctacctctatcgtattggattcgcaaggatttaaaagtcgcacaacaaaagattatgatatggtcatcattgatgaagtaaaaaataaggaattttatactaccttgaatcattttttagaattgggagagtatcaaggaagtcagaaagatgagaaagcgcagctttttcgatttacaacaactaatcctgagtttccttctatgattgaactatttagtatcttaccagaatatccattaaagaaggacggtcgagaaattcccttacattttgaccaagatgctagtttatcagccttattattggatgaagattattataatatattggtgcatgaaaaagaaaccattcaggggtattcggtattgagtaattgtggtttatactcttcgaaaatctcttcaaaccacgtcagcttccatctacaacctcaaaacagtgttttgagcagcctgcagctagcttcc

SEQ ID NO: 4020 - protein, 184 aa, Streptococcus pneumoniae
  hypothetical protein, fusion; Cellular location: cytoplasm; Similar to strain R6 sequence 15903789 (e-101)
MMPANTKVIFQEMFADFQNYYVLIGGTATSIVLDSQGFKSRTTKDYDMVIIDEVKNKEFYTTLNHFLELGEYQGSQKDEKAQLFRFTTTNPEFPSMIELFSILPEYPLKKDGREIPLHFDQDASLSALLLDEDYYNILVHEKETIQGYSVLSNCGLYSSKISSNHVSFHLQPQNSVLSSLQLAS

SEQ ID NO: 4021 - DNA, 96 bp, Streptococcus pneumoniae
ttgaccttaaaagatgatgatgacccacgtatagaggaagagagtgaagcactagaaaatatgatattacagtatctgggagaagatgatgccagc

SEQ ID NO: 4022 - protein, 32 aa, Streptococcus pneumoniae
  hypothetical protein; Cellular location: cytoplasm; Similar to strain R6 sequence 15903790 (2.E-13)
MTLKDDDDPRIEEESEALENMILQYLGEDDAS

SEQ ID NO: 4023 - DNA, 96 bp, Streptococcus pneumoniae
atggcagagaaaattcaatcagttatccttgccactttctcagcatgttttaaaatgaaagatgctagagatatggaaatatcgtccttttgtatc

SEQ ID NO: 4024 - protein, 32 aa, Streptococcus pneumoniae
  hypothetical protein
MAEKIQSVILATFSACFKMKDARDMEISSFCI

SEQ ID NO: 4025 - DNA, 792 bp, Streptococcus pneumoniae
atgaatgtcaaaaagataatgtcaatttttcaatccttttatgttgatgtcagtattgaggaactgactttgactttaccaatcagttttgtaaaaaggtttgagtatactcaaatgacttttcataaggaatcatttttattgattaaagaaaagagaagggggagtttgagttcatttgttactcaggctcgcactatgggtgaaaaagccaatatggatgttgttttggtgttttcgaagttatcagacagtgaaaaaaagcaattacttcaagctagagttccgtttgtagactttaagggaaacctcttcttccctccattgggactagtactcaatgcgaatgatactgaagtccctaaggaattaacacctagcgaacaattaacgtggattgcctttttattgacaaaaggtcaaaaagtagtagatgttgatttgctttcacaagtcactggacttccaaactcaacaatttataggtgtttgaggacttttaaagctttatattggttaaacaagcaaaataagctttacacatatacggtgtcaaagaaagaattattcttaaaatccgtgtcatgtttatttaatcccatcaaaaaacggattttattgccagatggcgatataaagcagataaaatctgtttctaaccttctatatggtggtgcttatgctttgtcgcattcaacttttttagctgaaacggatgaaaatattagctatgtcatatggcagagaaaattcaatcagttatccttgccactttctcagcatgttttaaaa

SEQ ID NO: 4026 - protein, 264 aa, Streptococcus pneumoniae
  hypothetical protein; Cellular location: cytoplasm; Similar to strain R6 sequence 15903791 (e-149)
MNVKKIMSIFQSFYVDVSIEELTLTLPISFVKRFEYTQMTFHKESFLLIKEKRRGSLSSFVTQARTMGEKANMDVVLVFSKLSDSEKKQLLQARVPFVDFKGNLFFPPLGLVLNANDTEVPKELTPSEQLTWIAFLLTKGQKVVDVDLLSQVTGLPNSTIYRCLRTFKALYWLNKQNKLYTYTVSKKELFLKSVSCLFNPIKKRILLPDGDIKQIKSVSNLLYGGAYALSHSTFLAETDENISYVIWQRKFNQLSLPLSQHVLK

SEQ ID NO: 4027 - DNA, 423 bp, Streptococcus pneumoniae
ttgactagtcgtgtatttattgatgcagattgtatttcagtatttttatgggttggcactgaacatcttttagaaaagctctatttgggtaaaattgttattccacaagaggtgtatgatgaaatcaatatacctacaattccccatttaaaatctaggatagatcagttggtagctaagggttcagctgagattgtgagcatagacattggaactgaagaatacgcattatatagagatttaacaagaaatcatgatagtaacaagattattggtaagggagaaggggcatctatttccttagcgaaaaagcataatgggatattaggaagtaataacctaagagatgttaaatcatatgtagaagaattttctttagaatatatgacaacaggagatatactgattgaagcgtttaaagcg

SEQ ID NO: 4028 - protein, 141 aa, Streptococcus pneumoniae
  hypothetical protein; Cellular location: outside; Similar to strain R6 sequence 15903792 (6.E-75)
MTSRVFIDADCISVFLWVGTEHLLEKLYLGKIVIPQEVYDEINIPTIPHLKSRIDQLVAKGSAEIVSIDIGTEEYALYRDLTRNHDSNKIIGKGEGASISLAKKHNGILGSNNLRDVKSYVEEFSLEYMTTGDILIEAFKA

SEQ ID NO: 4029 - DNA, 357 bp, Streptococcus pneumoniae
gtgaagaagagttcagtcagtcttatcttgattggtgaaggagatgaaactgaaagaaaagcggatcagtttgcttcttattttttaattttcccatcttcactgtataggatggttgaggaaatcagagaaaatgccaatagaactcatcttgaagtagaagatattataaaattgggtcagttttatggtatcagtcataaagctatgttatatagattgaggaatgatggataccttgatgcagaagaaattaaaaatatggatattagtgttatagagacagcttcaagattaggctatgatacaagtttatatcgtcctttgtcagaaagtaaaaaagaaatggcattagga

SEQ ID NO: 4030 - protein, 119 aa, Streptococcus pneumoniae
  hypothetical protein; Cellular location: outside; Similar to strain R6 sequence 15903793 (2.E-62)
MKKSSVSLILIGEGDETERKADQFASYFLIFPSSLYRMVEEIRENANRTHLEVEDIIKLGQFYGISHKAMLYRLRNDGYLDAEEIKNMDISVIETASRLGYDTSLYRPLSESKKEMALG

SEQ ID NO: 4031 - DNA, 159 bp, Streptococcus pneumoniae
atgtatgtgataaatgtatgtgatgttggaaaaagaataaaagaacttagaatatcttcaaatcttactcaagataagattgctgagtatttgtctttgaatcaaagcatgattgccaaaatggaaaaaggtgaaaggaatatcacgaatggatttaag

SEQ ID NO: 4032 - protein, 53 aa, Streptococcus pneumoniae
  type II restriction-modification system regulatory protein, putative; Cellular location: cytoplasm; Similar to strain R6 sequence 15903795 (5.E-24)
MYVINVCDVGKRIKELRISSNLTQDKIAEYLSLNQSMIAKMEKGERNITNGFK

SEQ ID NO: 4033 - DNA, 954 bp, Streptococcus pneumoniae
atggaaattaatgtgagtaaattaagaacagatttgcctcaagtcggcgtgcaaccatataggcaagtacacgcacactcaactgggaatccgcattcaaccgtacagaatgaagcggattatcactggcggaaagacccagaattaggttttttctcgcacattgttgggaacggttgcatcatgcaggtaggacctgttgataatggtgcctgggacgttgggggcggttggaatgctgagacctatgcagcggttgaactgattgaaagccattcaaccaaagaagagttcatgacggactaccgcctttatatcgaactcttacgcaatctagcagatgaagcaggtttgccgaaaacgcttgatacagggagtttagctggaattaaaacgcacgagtattgcacgaataaccaaccaaacaaccactcagaccacgttgacccttatccatatcttgctaaatggggcattagccgtgagcagtttaagcatgatattgagaacggcttgacgattgaaacaggctggcagaagaatgacactggctactggtacgtacattcagacggctcttatccaaaagacaagtttgagaaaatcaatggcacttggtactactttgacagttcaggctatatgcttgcagaccgctggaggaagcacacagacggcaactggtactggttcgacaactcaggcgaaatggctacaggctggaagaaaatcgctgataagtggtactatttcaacgaagaaggtgccatgaagacaggctgggtcaagtacaaggacacttggtactacttagacgctaaagaaggcgccatggtatcaaatgcctttatccagtcagcggacggaacaggctggtactacctcaaaccagacggaacactggcagacaagccagaattcacagtagagccagatggcttgattacagtaaaa

SEQ ID NO: 4034 - protein, 318 aa, Streptococcus pneumoniae
  autolysin (lytA); Cellular location: cytoplasm; Feature of note: WYY motif; Similar to strain R6 sequence 15903796 (0.E+01)
MEINVSKLRTDLPQVGVQPYRQVHAHSTGNPHSTVQNEADYHWRKDPELGFFSHIVGNGCIMQVGPVDNGAWDVGGGWNAETYAAVELIESHSTKEEFMTDYRLYIELLRNLADEAGLPKTLDTGSLAGIKTHEYCTNNQPNNHSDHVDPYPYLAKWGISREQFKHDIENGLTIETGWQKNDTGYWYVHSDGSYPKDKFEKINGTWYYFDSSGYMLADRWRKHTDGNWYWFDNSGEMATGWKKIADKWYYFNEEGAMKTGWVKYKDTWYYLDAKEGAMVSNAFIQSADGTGWYYLKPDGTLADKPEFTVEPDGLITVK

SEQ ID NO: 4035 - DNA, 111 bp, Streptococcus pneumoniae
atgaaaaggacatatagagactgtaaaaatatacttttgaaaatctttttagtctggggtgttattgtagatagaatgcagaccttgtcagtcctatttacagtgtcaaaa

SEQ ID NO: 4036 - protein, 37 aa, Streptococcus pneumoniae
  hypothetical protein
MKRTYRDCKNILLKIFLVWGVIVDRMQTLSVLFTVSK

SEQ ID NO: 4037 - DNA, 1368 bp, Streptococcus pneumoniae
atgaataaaaaacgaacagtggacctgatacatggtccgattcttccctcgctcttaagcttcacctttccaattttgctatcaaatatttttcaacagctctataacactgctgatgtcttgattgttggacgatttcttggtcaagaatccttggctgcagtaggagcgacgacagcgatttttgacctgattgtaggttttacacttggtgttggcaatggcatggggattgtcattgctcgttattatggggctcggaatttcactaaaatcaaggaagcagtagcagccacctggattttaggtgctcttttgagcattctagttatgttgctgggctttcttggcttgtatcctctcttgcaatacttagatactcctgcagaaattcttcctcaatcttatcaatatatttctatgattgtgacctgtgtaggtgtcagctttgcttataatctttttgcaggcttgttgcggtctattggtgacagtctagcagccctgggatttctgattttctctgccttggttaatgtggttctggatctctattttattacgcaattgcatctgggagttcaatccgcaggacttgctaccattatttcgcaaggtttatcagcggttctctgcttttattatattcgtaaaagtgtgccagaactcttgccacagtttaaacatttcaaatgggacaaaagcttgtacgcggatctcttggagcaaggtttggctatgggcttgatgagttcaattgtatctatcggcagtgtgattttacagttttctgttaatacatttggtgcagtgattattagtgcccagacggcagctcgacgcattatgacctttgcccttcttcctatgaccgctatttctgcatcaatgacgacctttgcttctcagaatctaggagctaagcgacctgaccgtattgttcaaggtcttcgaatcggcagtcgtttaagtatatcctgggcagtttttgtttgtattttcctcttttttgccagtccagctttggtttccttcttggctagttcgacagatggttacttgatagaaaatggaagtctctatctgcaaatcagttcaaccttttatcccattttgagcctcttgttgatttatcgcaattgcttgcagggcttggggcaaaagatccttcctctagtttctagctttattgaactaatcggaaaaatcgtttttgtggttttgattattccttgggcaggatataagggtgttatcctttgtgaacctcttatctgggttgccatgacagttcaactgtacttctcattattccgtcatcccttgataaaagaaggcaaggcaatcttggcaaccaaagtgcaatcc

SEQ ID NO: 4038 - protein, 456 aa, Streptococcus pneumoniae
  MATE efflux family protein DinF (dinF); Cellular location: membrane; Similar to strain R6 sequence 15903798 (0.E+01)
MNKKRTVDLIHGPILPSLLSFTFPILLSNIFQQLYNTADVLIVGRFLGQESLAAVGATTAIFDLIVGFTLGVGNGMGIVIARYYGARNFTKIKEAVAATWILGALLSILVMLLGFLGLYPLLQYLDTPAEILPQSYQYISMIVTCVGVSFAYNLFAGLLRSIGDSLAALGFLIFSALVNVVLDLYFITQLHLGVQSAGLATIISQGLSAVLCFYYIRKSVPELLPQFKHFKWDKSLYADLLEQGLAMGLMSSIVSIGSVILQFSVNTFGAVIISAQTAARRIMTFALLPMTAISASMTTFASQNLGAKRPDRIVQGLRIGSRLSISWAVFVCIFLFFASPALVSFLASSTDGYLIENGSLYLQISSTFYPILSLLLIYRNCLQGLGQKILPLVSSFIELIGKIVFVVLIIPWAGYKGVILCEPLIWVAMTVQLYFSLFRHPLIKEGKAILATKVQS

SEQ ID NO: 4039 - DNA, 1164 bp, Streptococcus pneumoniae
atggcgaaaaaaccaaaaaaattagaagaaatttcaaaaaaatttggggcagaacgtgaaaaggccttgaatgacgctcttaaattgattgagaaagactttggtaaaggatcaatcatgcgtttgggtgaacgtgcggagcaaaaggtgcaagtgatgagctcaggttctttagctcttgacattgcccttggctcaggtggttatcctaagggacgtatcatcgaaatctatggcccagagtcatctggtaagacaacggttgcccttcatgcagttgcacaagcgcaaaaagaaggtgggattgctgcctttatcgatgcggaacatgcccttgatccagcttatgctgcggcccttggtgtcaatattgacgaattgctcttgtctcaaccagactcaggagagcaaggtcttgagattgcgggaaaattgattgactcaggtgcagttgatcttgtcgtagtcgactcagttgctgcccttgttcctcgtgcggaaattgatggagatatcggagatagccatgttggtttgcaggctcgtatgatgagccaggccatgcgtaaacttggcgcctctatcaataaaaccaaaacaattgccatttttatcaaccaattgcgtgaaaaagttggagtgatgtttggaaatccagaaacaacaccgggcggacgtgctttgaaattctatgcttcagtccgcttggatgttcgtggtaatacacaaattaagggaactggtgaccaaaaagaaaccaatgtcggtaaagaaactaagattaaggttgtaaaaaataaggtagctccaccgtttaaggaagccgtagttgaaattatgtacggagaaggaatttctaagactggtgagcttttgaagattgcaagcgatttggatattatcaaaaaagcaggggcttggtattcttacaaagatgaaaaaattgggcaaggttctgagaatgctaagaaatacttggcagagcacccagaaatctttgatgaaattgataagcaagtccgttctaaatttggcttgattgatggagaagaagtttcagaacaagatactgaaaacaaaaaagatgagccaaagaaagaagaagcagtgaatgaagaagttccgcttgacttaggcgatgaacttgaaatcgaaattgaagaa

SEQ ID NO: 4040 - protein, 388 aa, Streptococcus pneumoniae
  recA protein (recA); Cellular location: membrane; Similar to strain R6 sequence 15903799 (0.E+01)
MAKKPKKLEEISKKFGAEREKALNDALKLIEKDFGKGSIMRLGERAEQKVQVMSSGSLALDIALGSGGYPKGRIIEIYGPESSGKTTVALHAVAQAQKEGGIAAFIDAEHALDPAYAAALGVNIDELLLSQPDSGEQGLEIAGKLIDSGAVDLVVVDSVAALVPRAEIDGDIGDSHVGLQARMMSQAMRKLGASINKTKTIAIFINQLREKVGVMFGNPETTPGGRALKFYASVRLDVRGNTQIKGTGDQKETNVGKETKIKVVKNKVAPPFKEAVVEIMYGEGISKTGELLKIASDLDIIKKAGAWYSYKDEKIGQGSENAKKYLAEHPEIFDEIDKQVRSKFGLIDGEEVSEQDTENKKDEPKKEEAVNEEVPLDLGDELEIEIEE

SEQ ID NO: 4041 - DNA, 1254 bp, Streptococcus pneumoniae
atgaaagcagaaatcattgctgttggaacagagattttgacagggcagattgtcaacaccaatgcccagtttttgtcggaaaaactagctgagattggggtagatgtatattttcagacggctgtaggagacaatgaagttcgtctcttgtctttgcttgagattgccagtcaacgtagcagtctggtgattttgacaggcggtttggggccaactgaggacgacctaaccaaacaaaccctagctaaatttttagggaaagcattagtctttgatcctcaggctcaggagaagttggatatcttttttaccctgcgaccagactatgcccgaacaccgaataacgaaagacaagctcaaattgtagaaggagcgattccactgccaaacgaaacaggactggctgttggaggaaaattagaagtagacggagtgacctatgtcgtccttccaggtccgccaagtgaattgaaacccatggtcttaaaccaacttctacccaagttgatgacagggagcaagctgtattcccgagttcttcgtttctttgggattggcgagagccagttggttacgattttggctgatttaattgataatcagatcgatcctaccttggccccttatgccaagacaggagaagtcactctacgtctgtcaacaaaggctagcagtcaagaagaggcgaatcaagcgctggatatcttggaaaatcaaatcttggactgccagactttcgaaggaatttctttacgagacttttgctatggttatggggaagaaactagtttagccagcattgtggtagaagaactgaaaaggcaagggaaaaccatcgcggctgcagagagtttgacggcaggtcttttccaagctaccgtggcgaatttttctggagtttcaagtatatttaagggtggttttgtgacctatagcttggaggaaaaatcaaggatgttggatattcctgccaagaatttggaagaacatggtgtggtgtctgaatttacagctcagaagatggctgagcaggcacgaagcaagacccagtctgattttggaattagtttgactggagtggcaggaccagatagcctagaaggacacccagttgggacagtcttcataggcttggcgcaagatcaaggaactgaggttatcaaggttaatattggaggcagaagccgagcagatgtacgtcacattgcggttatgcatgcctttaacctagttcgcaaggctttattaagtgac

SEQ ID NO: 4042 - protein, 418 aa, Streptococcus pneumoniae
  competence/damage-inducible protein CinA; Cellular location: cytoplasm; Similar to strain R6 sequence 15903800 (0.E+01)
MKAEIIAVGTEILTGQIVNTNAQFLSEKLAEIGVDVYFQTAVGDNEVRLLSLLEIASQRSSLVILTGGLGPTEDDLTKQTLAKFLGKALVFDPQAQEKLDIFFTLRPDYARTPNNERQAQIVEGAIPLPNETGLAVGGKLEVDGVTYVVLPGPPSELKPMVLNQLLPKLMTGSKLYSRVLRFFGIGESQLVTILADLIDNQIDPTLAPYAKTGEVTLRLSTKASSQEEANQALDILENQILDCQTFEGISLRDFCYGYGEETSLASIVVEELKRQGKTIAAAESLTAGLFQATVANFSGVSSIFKGGFVTYSLEEKSRMLDIPAKNLEEHGVVSEFTAQKMAEQARSKTQSDFGISLTGVAGPDSLEGHPVGTVFIGLAQDQGTEVIKVNIGGRSRADVRHIAVMHAFNLVRKALLSD

SEQ ID NO: 4043 - DNA, 1014 bp, Streptococcus pneumoniae
atggttaaaaaaattattggaatggtgctagctttactttctgtaactgtagtaggagtaggtgtttttgcttatactatttatcaacaagggacagaaaccttagctaaaacctataaaaaaatcggtgaagaaaccaaggttattgaagcgactgaacctctaaccattctgttaatgggagtggacaccggaaatgttgaacgaactgaaacttgggtcggtagaagtgatagcatgatcttgatgacagtgaatcctaaaacgaaaaaaacaacaatgatgagtttagagcgggatattctgacgcgcattgaatcagggaatggtcaggctcatgaagcgaaactgaactcagcatatgcagatggtggagcagagcttgctatagaaaccattcaaaaaatgatgaatatccatattgatcgctatgtgatggtcaatatgagaggattgcaaaaactagtggatgcagtaggaggtattacagtcaataatatcctaggtttcccaatttctatcagtgaccaagaagaatttaatactatttctatcggtgttggggagcaacatattgggggagaagaagccctagtctatgcacgaatgcgttaccaagatcctgagggggattatggtcgtcaaaaacgtcaacgtgaagttattcaaaaagtcatggaaaaagctctcagtttaaatagcattggtcattatcaagagattctaaaagctttgagtgacaatatgcagaccaatattgatttgtctgcaaaaagtatccctaacttgctaggctataaagattcatttaaaaccattgaaactcagcagttgcagggtgaaggagagatacttcaaggtgtttcttaccagattgtttcgagagcacatatgttggaaatgcaaaatctactccgacgttctttgggacaagaagaagttactcagcttgaaaccaatgcggttttatttgaagatttatttggcagagcacctgttggtgatgaagataat

SEQ ID NO: 4044 - protein, 338 aa, Streptococcus pneumoniae
  transcriptional regulator, putative; Cellular location: outside; Similar to strain R6 sequence 15903801 (0.E+01)
MVKKIIGMVLALLSVTVVGVGVFAYTIYQQGTETLAKTYKKIGEETKVIEATEPLTILLMGVDTGNVERTETWVGRSDSMILMTVNPKTKKTTMMSLERDILTRIESGNGQAHEAKLNSAYADGGAELAIETIQKMMNIHIDRYVMVNMRGLQKLVDAVGGITVNNILGFPISISDQEEFNTISIGVGEQHIGGEEALVYARMRYQDPEGDYGRQKRQREVIQKVMEKALSLNSIGHYQEILKALSDNMQTNIDLSAKSIPNLLGYKDSFKTIETQQLQGEGEILQGVSYQIVSRAHMLEMQNLLRRSLGQEEVTQLETNAVLFEDLFGRAPVGDEDN

SEQ ID NO: 4045 - DNA, 516 bp, Streptococcus pneumoniae
atggagtatgaattgctcattagggaagcagagcccaaagatgcagctgaattagtggcctttttaaatcgtgtgagtttggagacagactttaccagcctagacggagatggtattctcttgactagtgaggagatggaaatattcctcaacaagcaagctagttcggacaatcagataaccttacttgcattcttaaatggcaaaattgctggtattgtaaatattacagctgatcagcgtaagagagtccgtcatattggagatctcttcattgtgattggaaaaagatattggaataatggcttgggaagtttgttgctagaagaagcgatagagtgggcacaagcaagtggcattctgcgtcgtctccaactgactgtccaaactcgtaatcaagcagcagtccatctttatcaaaagcatggctttgtcattgaaggtagccaagagcgtggggcatatatagaagaagggaaatttatcgatgtttacttgatgggtaaactgataggt

SEQ ID NO: 4046 - protein, 172 aa, Streptococcus pneumoniae
  acetyltransferase, GNAT family; Cellular location: membrane; Similar to strain R6 sequence 15903802 (4.E-94)
MEYELLIREAEPKDAAELVAFLNRVSLETDFTSLDGDGILLTSEEMEIFLNKQASSDNQITLLAFLNGKIAGIVNITADQRKRVRHIGDLFIVIGKRYWNNGLGSLLLEEAIEWAQASGILRRLQLTVQTRNQAAVHLYQKHGFVIEGSQERGAYIEEGKFIDVYLMGKLIG

SEQ ID NO: 4047 - DNA, 441 bp, Streptococcus pneumoniae
atgtacacaaaaaatgaagaagagttgcaagccttaggggagcgtttgggccatctattagcaaagaatgatgttttaatcttaactggagaactgggtgcaggtaaaacgacctttactaaaggacttgcaaaaggattacagatttctcaaatgattaaaagtcccacctatactatcgtgagagagtatgaaggtcgacttccactttatcacctagatgtttatcgtattgaaggagatgctgattctatcgacttggatgagtttatctttggtggcggcgtgactgttattgagtggggaaatctcttaggagatgccttgccagatgcttatttagaattggaaattctaaaagaagcagatggacgccgtttaaattttcaggcaaagggtttgcgtgctgagaaattgttagaggagcttcaatatggagta

SEQ ID NO: 4048 - protein, 147 aa, Streptococcus pneumoniae
  conserved hypothetical protein; Cellular location: cytoplasm; Similar to strain R6 sequence 15903803 (4.E-81)
MYTKNEEELQALGERLGHLLAKNDVLILTGELGAGKTTFTKGLAKGLQISQMIKSPTYTIVREYEGRLPLYHLDVYRIEGDADSIDLDEFIFGGGVTVIEWGNLLGDALPDAYLELEILKEADGRRLNFQAKGLRAEKLLEELQYGV

SEQ ID NO: 4049 - DNA, 618 bp, Streptococcus pneumoniae
atgaaatcaatgagaatcttatttttgttagctttaattcaaatcagtttgagtagctgtttcctatggaaggaatgcatcttgtcctttaaacaaagtacagcttttttcatcggaagcatggttttcgtttcaggaatctgtgctggagtaaattatctttatacccgtaagcaagaagtccatagtgtcctagccagtaagaagtcggtgaagcttttttacagtatgttactcttaattaatttgttaggagctgttcttgttttgtcagataacttgttcatcaaaaatacgctgcagcaagaattagttgactttttattgccatccttctttttcctatttgggctagatttgctgatttttttacccttgaaaaaatacgtgcgcgattttcttgctatgctggacagaaaaaagacagtgttggtgactattttagcaacacttcttttcttaagaaatccaatgaccattgtctcacttctgatttatattggactgggcttgttttttgcagcctatcttgtcccaaattcggttaagaaggaagtttccttttatggtcatattttccgagatcttgtattggtcattgttacgctcattttcttt

SEQ ID NO: 4050 - protein, 206 aa, Streptococcus pneumoniae
  hypothetical protein; Cellular location: membrane; Similar to strain R6 sequence 15903804 (e-112)
MKSMRILFLLALIQISLSSCFLWKECILSFKQSTAFFIGSMVFVSGICAGVNYLYTRKQEVHSVLASKKSVKLFYSMLLLINLLGAVLVLSDNLFIKNTLQQELVDFLLPSFFFLFGLDLLIFLPLKKYVRDFLAMLDRKKTVLVTILATLLFLRNPMTIVSLLIYIGLGLFFAAYLVPNSVKKEVSFYGHIFRDLVLVIVTLIFF

SEQ ID NO: 4051 - DNA, 135 bp, Streptococcus pneumoniae
gtgcgagacaaaacaaccacccgtttgacggattttcatgatttcaaatttatattcttcgaaaatctcttcaaatcacgtcagctctatctgcaatctcaaaacactgttttgagcaacctgtggctagctacc

SEQ ID NO: 4052 - protein, 45 aa, Streptococcus pneumoniae
  box element
MRDKTTTRLTDFHDFKFIFFENLFKSRQLYLQSQNTVLSNLWLAT

SEQ ID NO: 4053 - DNA, 861 bp, Streptococcus pneumoniae
atgaatacactcgcagagaaattcagattgaaaagaaaagagttgagactctcccaacaaactcttgcagaaggaatttgtgaacaaagccagattagtaaaattgaaagaggtcattttattccctccgcagacttgttattcaaactctctcaacgacttgaagtccctttggattactttttcaatgaacaaatcgaagttaagtctaacctctctaatttcaaacatctatctgctcgcctattagatgacagaaattatgacgatttagaatatctttataaaatagaagtagaacgaagcacttttctaacattagaagaccgaacttaccttgaatggattaaatctataattgacttctatcaatatgacagtaagtgtgaggcaatttcgtcattggaaaatatattattaaaagtctcttcaaatactctgatttatttaaaggcgttgaatactctatctaatttctattccttagtgggtcgtgaacaagaatatgaggcaaactactctcatttaatagagttgtatcagacaaaaaatttggaccatcaagagtttttatttggctacatcagagttcgttacaactacgctcactacctagtatcaaaggaaaaatataatgaagccatccaagaagctcttgaaacgattgaactctgtaaacaaagacagacaagctaccaattggctcctctacttattcttgtaggaaatgctggagccaaatttctagacagagaacaagtcaaaaattattatatagaagcaagagagttatgtaagatttataacaatcctttaatgttgatgaagatagaaaattatttgaaggaactagatactgtt

SEQ ID NO: 4054 - protein, 287 aa, Streptococcus pneumoniae
  transcriptional regulator PlcR, putative; Cellular location: cytoplasm; Similar to strain R6 sequence 15903805 (e-164)
MNTLAEKFRLKRKELRLSQQTLAEGICEQSQISKIERGHFIPSADLLFKLSQRLEVPLDYFFNEQIEVKSNLSNFKHLSARLLDDRNYDDLEYLYKIEVERSTFLTLEDRTYLEWIKSIIDFYQYDSKCEAISSLENILLKVSSNTLIYLKALNTLSNFYSLVGREQEYEANYSHLIELYQTKNLDHQEFLFGYIRVRYNYAHYLVSKEKYNEAIQEALETIELCKQRQTSYQLAPLLILVGNAGAKFLDREQVKNYYIEARELCKIYNNPLMLMKIENYLKELDTV

SEQ ID NO: 4055 - DNA, 168 bp, Streptococcus pneumoniae
atgagaaaaaaacgtggaattaaaaaattagttacatttgcattgctaggtgtttttatgtttagtaatacaattccttaccaacagtttattcagaagaataaacaattggagattcgagtgcaatcgcaaaagaagtccaatggtcttgatgttgggaaggcggat

SEQ ID NO: 4056 - protein, 56 aa, Streptococcus pneumoniae
  hypothetical protein; Cellular location: outside; Similar to strain R6 sequence 15903806 (2.E-27)
MRKKRGIKKLVTFALLGVFMFSNTIPYQQFIQKNKQLEIRVQSQKKSNGLDVGKAD

SEQ ID NO: 4057 - DNA, 222 bp, Streptococcus pneumoniae
atgaccaactttaattcaaacgaaaaattttgtggaaaaagtttaaaatcattgtctgctgatgaaatgagtttaatttatggtgcatctgatggtgcagagccacgttggacgcctactcctattattttgaaatcagctgcagctagctcgaaagtatgcattagtgcagctgtttctggtattggggggctagttagctacaataatgattgtttgggg

SEQ ID NO: 4058 - protein, 74 aa, Streptococcus pneumoniae
  conserved domain protein; Cellular location: cytoplasm; Similar to strain R6 sequence 15903807 (5.E-39)
MTNFNSNEKFCGKSLKSLSADEMSLIYGASDGAEPRWTPTPIILKSAAASSKVCISAAVSGIGGLVSYNNDCLG

SEQ ID NO: 4059 - DNA, 186 bp, Streptococcus pneumoniae
atgaaaaatgattttgtaatcggaaagagtttgaaagaattatctcttgaagaaatgcaattggtttatggtggcacagatggtgctgaccctagatcaacaattatatgttctgctacattaagttttattgcatcatatttggggtcagctcagactcgttgtggcaaagacaacaagaaaaaa

SEQ ID NO: 4060 - protein, 62 aa, Streptococcus pneumoniae
  hypothetical protein; Cellular location: cytoplasm; Similar to strain R6 sequence 15903808 (1.E-31)
MKNDFVIGKSLKELSLEEMQLVYGGTDGADPRSTIICSATLSFIASYLGSAQTRCGKDNKKK

SEQ ID NO: 4061 - DNA, 102 bp, Streptococcus pneumoniae
atggatagaacaatgaaatatcctatatccccagttaaaccaaatgtggtcttagataaagaaacagatggcggaattgcagataacattttattgtacagt

SEQ ID NO: 4062 - protein, 34 aa, Streptococcus pneumoniae
  hypothetical protein
MDRTMKYPISPVKPNVVLDKETDGGIADNILLYS

SEQ ID NO: 4063 - DNA, 2988 bp, Streptococcus pneumoniae
atgaaatataaaattaaaaatgtgcataaaacattgtttattaaggaaagatatcaaatattatctgaacgaaatgataattccttaaataacttttcattaaataattggcgttctacaatgtcaattatttctgaaaaaacttttgaagaaatgttgaaattaaataattacaataaaaaaatattttctaacactgtgaactatgattataccgaggaacagataagactatattcagaatatgccaaaaattcggaatggtataaatttgcggagggttcatttgaaatatttagaaaacatccccaaagaattaattttaagaaagatttttctagaattttggaaccctttattattaatttgcttaaattaatcaataattatctagagaataaagaatacgagtggattgacaagaatggaaatattttttcctctctagtattttatttagaagatttaatctatccttggattgttaaacctttggttttagagataaattcattgcgtgaaaaaggtttacttgaaggggaatcggagcagcaacggtacaaatattttataacattgtttgacaaggaagagaatatattaaatttttataacaaatatcccgttttactgaggcaaatatcggagtcttgtcttcggttctatacttattttatagaaattttatcaaatttagaaaatgattttagtgtgctagaagaagaattagggctaagggggaaattaaatgatataaaatttggaaagggtgatacacacagccaaggaaaaactgttttgatactcttctttgatgacgcgaaaattgtttacaagcctaaaaatttaataatcaataactcactaaatactattgctgagtatatccgaaaggttgatgaaaaaattaggataagaatacctcgaactattgcttattcggatcacagctatgaagaatttattgattatctacctctagagcaaaagaaaaatttacctgaatattattataattttggtgtgcttttagcatttatatatttatttaatgggagtgatatacattttgaaaatttaatttcctatggagatatgcctgtaataatagactttgaaacaatgttacagcaacctctatttgatgataaaactggtcagagtttgctggataccctgtttcacagggtgactcgaactttgcttcttccaacagagggagtaaaaagggaggatggtcttgatgttgagatgagtgctcttacaggaaattttaagaaggatgcttttaatggtcaagttttaattaatttaaatactgataaggtaaagtttgatattgggaaaattgattttgaaggtgggaaaaacctgcctgttcgggatggtgatatagaatttgataagtatataaaagatttcaaaaaaggttttagggatttttatctgatatttgaagagttaaataaaacagaagaatttaaaatgctattaaaagcaaacttgtatggtttaaagacaagggtactttttagagacacaaatagctatgcttcagtactatcttttttatatcatcctgatttttatgaagaaatgttagatagagaaaaagcattggaaaatctctggagcaataagttttctaatcaaggtattgtagcaagcgaatgtgaacaaatgaggttattagatattccgattttttatacagatacaaatatcaatgaaatctacgatgattttggaaatcattttatttccctacatcaattttctggatatgactattttatgaaatatttacctaataataatttggaaaatttagaaaagcaacttgatatcattgaaatttattttccaagctttgatcagcgaaaaaaaggatataaattaaacttatctaatagaaaaaaactcccaaatgaaagtttagttactattctgcataatgaagtagaaaatattgcagactctttggttattaataatatttatgacgaatatccaatttggagtatacctgttaattttaaaggttctaaatggtgtcttgaacaaacgggtaatgatatgtataggggtagagctggaatattactgtttatgtactatgtaaaattattgaaagataaatcatcatatactcaactgtacaataaaatgttatctgcaattccgccatctgtttctttatctaagaccacatttggtttaactggggatataggatatttcattgttctatccattatagaggattacgatacaaatactctcgcatgcttaaattatataaagagtgttttaactgagcttgaaaagactgattttgcaagtgtttcaaacaagtctgactatattaatggtcttctacctttaattaatacactggtaagatattataggagaggaatagagaaggaacgtgttctaaggctagtattaagtttaggtgatacgctatataatgatgtaagcgagagagataatagtaattttggatatagttttggccatggactatcaggtgtaatttttacattaaaaaatatttataaagtgacaagacttaaaaaatataaagaattaattttacaactagttcctagggagaaaatcaaaattcattctttgaagtggtgtagtggagaatttgggacattagttaatcatccccaaagtgttccagagggaattgtagctagtttagataatgatacattttgccatggaagtatggccataataaatttttacatcgactacatgaaagaaatggatactagtatggaattggagtctttattgtgtagtgttgtaatgaataaatcaaaagaaggagagtatcgtatcgtccaaacaagcaatttcccagatttttctttgtatacaggtgtgactggtattgcttatacttttttaaggtatatcgcactgaatcagaatgacaaaaagatagttatcccctcattacttgaaatc

SEQ ID NO: 4064 - protein, 996 aa, Streptococcus pneumoniae
  bacteriocin formation protein, putative; Cellular location: membrane; Similar to strain R6 sequence 15903809 (0.E+01)
MKYKIKNVHKTLFIKERYQILSERNDNSLNNFSLNNWRSTMSIISEKTFEEMLKLNNYNKKIFSNTVNYDYTEEQIRLYSEYAKNSEWYKFAEGSFEIFRKHPQRINFKKDFSRILEPFIINLLKLINNYLENKEYEWIDKNGNIFSSLVFYLEDLIYPWIVKPLVLEINSLREKGLLEGESEQQRYKYFITLFDKEENILNFYNKYPVLLRQISESCLRFYTYFIEILSNLENDFSVLEEELGLRGKLNDIKFGKGDTHSQGKTVLILFFDDAKIVYKPKNLIINNSLNTIAEYIRKVDEKIRIRIPRTIAYSDHSYEEFIDYLPLEQKKNLPEYYYNFGVLLAFIYLFNGSDIHFENLISYGDMPVIIDFETMLQQPLFDDKTGQSLLDTLFHRVTRTLLLPTEGVKREDGLDVEMSALTGNFKKDAFNGQVLINLNTDKVKFDIGKIDFEGGKNLPVRDGDIEFDKYIKDFKKGFRDFYLIFEELNKTEEFKMLLKANLYGLKTRVLFRDTNSYASVLSFLYHPDFYEEMLDREKALENLWSNKFSNQGIVASECEQMRLLDIPIFYTDTNINEIYDDFGNHFISLHQFSGYDYFMKYLPNNNLENLEKQLDIIEIYFPSFDQRKKGYKLNLSNRKKLPNESLVTILHNEVENIADSLVINNIYDEYPIWSIPVNFKGSKWCLEQTGNDMYRGRAGILLFMYYVKLLKDKSSYTQLYNKMLSAIPPSVSLSKTTFGLTGDIGYFIVLSIIEDYDTNTLACLNYIKSVLTELEKTDFASVSNKSDYINGLLPLINTLVRYYRRGIEKERVLRLVLSLGDTLYNDVSERDNSNFGYSFGHGLSGVIFTLKNIYKVTRLKKYKELILQLVPREKIKIHSLKWCSGEFGTLVNHPQSVPEGIVASLDNDTFCHGSMAIINFYIDYMKEMDTSMELESLLCSVVMNKSKEGEYRIVQTSNFPDFSLYTGVTGIAYTFLRYIALNQNDKKIVIPSLLEI

SEQ ID NO: 4065 - DNA, 702 bp, Streptococcus pneumoniae
atgaataaaatatttatatatgcaggagtgcgaaatcataactctaagactttagagtatactaagagactttcaagtatcatttctagtagaaataatgttgatatatctttcaggacacctttcaattcagagctagaaatatctaattctgattcagaagagttgtttaagaaaggaattgataggcaaagtaatgctgatgatggaggtgttataaaaaaagagttattagagtctgatattataattatctcttctcctgtatatttacaaaacgtatctgtggacacaaaaaactttattgaaaggattggggggtggagccatctttttcgattagctggaaagtttgttgtaacattagatgttgctgagagtaacggctctgataatgtgtcagaatatcttagagatatattttcatatatgggaggacagatattacaccaagtttcaattaccaattcactcaaagatattgcagaggctcagttgatggaggcaacttataaaattgaagatgtacttgaagggaaaattaagtacaaaacaacggattatcaagaaagagcttaccagacattaaaattaattttagaaaattatgattccgaacattttgagaagatgtattgggagaaaaaacgcctttttgaagctaatagtttagaggaatggtattatgttgaaaatattaaa

SEQ ID NO: 4066 - protein, 234 aa, Streptococcus pneumoniae
  conserved hypothetical protein; Cellular location: cytoplasm; Similar to strain R6 sequence 15903810 (e-132)
MNKIFIYAGVRNHNSKTLEYTKRLSSIISSRNNVDISFRTPFNSELEISNSDSEELFKKGIDRQSNADDGGVIKKELLESDIIIISSPVYLQNVSVDTKNFIERIGGWSHLFRLAGKFVVTLDVAESNGSDNVSEYLRDIFSYMGGQILHQVSITNSLKDIAEAQLMEATYKIEDVLEGKIKYKTTDYQERAYQTLKLILENYDSEHFEKMYWEKKRLFEANSLEEWYYVENIK

SEQ ID NO: 4067 - DNA, 927 bp, Streptococcus pneumoniae
atgttgaaaatattaaataactctgtcatatatttatgtttgattccgttattgttcctattattgataatttttccaaatgattcattaatctattattttcgattgattttaatttcgttaatatcaattacattacatgaactaggtcattttttagtgggaagatgtttatcttataaactagagatgcttgctactccctttttcttctatttcagaaaaaaaatatatttcaaatttccagtgttattagcattcggttattgtcaaatgagtaatagaaacattactaatgaaaaaaatagtgataggaatttggtgttctacttctttgggggaggtggagctaacctaattgtcgcaatattagcacttttgggatttgtgccgtacgcatcagaattttttattttgaatataattctttttctagttacggtatgtttaccaattgatggaacagatggcaatgctattagagagatagttttgtattcaaaagattcaaaaacatatcagagattctttgcgaacagtctctataataatccttatataacaatcgacgattttgcaaaattaacctctaaagaaaaatcttttttttcaaaatttgaaaaatgtttgataaacctttactttgaagtgaaaggtgaagggtcagcatttacaattgctaatcatgaagtttttgattcaaatattcaggaaaatattatccatgagtactataaattactacataaatcttctgattggattattccacagaacttatctttagaagaagttgtttttaccttgtcaaactatatttactcgaaaaataataaatatttagaaaagattaagtatctaaagaaattagtagattttagacaagaagaaattatcgactttattttgaacaaggaggaagtattg

SEQ ID NO: 4068 - protein, 309 aa, Streptococcus pneumoniae
  hypothetical protein; Cellular location: membrane; Similar to strain R6 sequence 15903811 (e-178)
MLKILNNSVIYLCLIPLLFLLLIIFPNDSLIYYFRLILISLISITLHELGHFLVGRCLSYKLEMLATPFFFYFRKKIYFKFPVLLAFGYCQMSNRNITNEKNSDRNLVFYFFGGGGANLIVAILALLGFVPYASEFFILNIILFLVTVCLPIDGTDGNAIREIVLYSKDSKTYQRFFANSLYNNPYITIDDFAKLTSKEKSFFSKFEKCLINLYFEVKGEGSAFTIANHEVFDSNIQENIIHEYYKLLHKSSDWIIPQNLSLEEVVFTLSNYIYSKNNKYLEKIKYLKKLVDFRQEEIIDFILNKEEVL

SEQ ID NO: 4069 - DNA, 2106 bp, Streptococcus pneumoniae
gtgaaaattccaatgatatatcaaatggaaaattcagaatgtggattagcatgctgtgccatgatattgaactattttaaatatgagatttctttaaatgaactacgtgaaatctacccatcatccagatctggatattctctcctatctataagtaaagttttaggagattttaatataagttctcatgcttttaaagcttcggtaagagatttaaaaccgctcagtttcccactcatttgcttctgggagagttctcattttattattcttgaaaaaattagtaaaaacaagttttatattttagatcctgcaaaaggcaggcagagaatgtcaataagtgaatttgaaaggcattattcaaatatcattttaacatttaaaaagttagatagctttatgtctcgtaaagataataagaagtcgcctgttttaaagtatttttttaagtataggaataagctagggattttattttttgtaacagcattattgtatgtaatacaatcattagtacctatagctaatagatacataattgacacgaatttcaaggacgattcgtattcgtctagaatgttatttactatattatttatatttactgtttcattctcactaatgtatttattaagacagatatatgttgcatccttaaaatatataatggataaagagattagctatgattttatgaaacatttgatatatttaccttacagtttttatgaaaaacgtactttaggggatatactttttagagctaactctattgtttatataagagaaatactatcaaataattttatagcagctatacttgatttgttaatgattgtggtttatgctgtggttttatttagcttttctaagtacatggtaatctttttaatatcactaagtctagctctatctattgtaatgtatccaatcataaaaatctcaaaaaatttaattgataaaaatataaaagaaaaggttaatgttcaaaatattacttccgaagtaatttctaaaaatagtgatattaagctaactggagaagaggaattttggattaacaaatgggataattttaatacaaaacagctcatcataggtcgaaaacttgatatacatttatcaattgttagtagtataacgaatgttttacaaattattctccctgttttgacccttattgtaggtgtaaatataaaaacattcgaacaattgacgttaggacaaattgtagcaataagtacagtctcaccatactttatttctcctataatttctttaagtgataactatatacaattaatgttattaaagggatattttttaagaatagaggatgtgtttaatactaaatccgaattaattccagaaagagtcagtcaagatataaaatttgataaaaaaatagaattaaaagatatttggtataaatatggattatttgatgattatgttttgaaaggaataaatgttactattaaaaaaggagaaactgttgctattgttggagaatcaggttcaggtaagagtacattagctaaaattttattaggtttattagaacctaatattggttcaatagaagttgatggagtagaaaaagaagaaattggtcaaacattgtatagaaagatttttggagcagtgttacaaaattcaaccctaagttatggtaccttaagagagaatttgacatttggacactttgtttcagatgaagaattaatgacaaatctaaattcaattggtcttagcaatgtagttaaatctttacctcttggattagagacaatcatcgctgaagaaggtaataacttttctggagggcagcagcaaatgatacttttagctcgttgtcttttgtcgaaaccttcggtagttgttttggacgaagcaacaagtagtttagataatttatctcaacaaattacaacttcttacttaagtgaaatcggtaccactaagattttaattgcccatcgactagatactatcaagtctgcagataagatcttagtaatgcataatggtgaaattgtagagattgggacccatagagaacttcttgaactaggaggcatttataagcaattgtattcaaataat

SEQ ID NO: 4070 - protein, 702 aa, Streptococcus pneumoniae
  toxin secretion ABC transporter, ATP-binding/permease protein; Cellular location: membrane; Similar to strain R6 sequence 15903812 (0.E+01)
MKIPMIYQMENSECGLACCAMILNYFKYEISLNELREIYPSSRSGYSLLSISKVLGDFNISSHAFKASVRDLKPLSFPLICFWESSHFIILEKISKNKFYILDPAKGRQRMSISEFERHYSNIILTFKKLDSFMSRKDNKKSPVLKYFFKYRNKLGILFFVTALLYVIQSLVPIANRYIIDTNFKDDSYSSRMLFTILFIFTVSFSLMYLLRQIYVASLKYIMDKEISYDFMKHLIYLPYSFYEKRTLGDILFRANSIVYIREILSNNFIAAILDLLMIVVYAVVLFSFSKYMVIFLISLSLALSIVMYPIIKISKNLIDKNIKEKVNVQNITSEVISKNSDIKLTGEEEFWINKWDNFNTKQLIIGRKLDIHLSIVSSITNVLQIILPVLTLIVGVNIKTFEQLTLGQIVAISTVSPYFISPIISLSDNYIQLMLLKGYFLRIEDVFNTKSELIPERVSQDIKFDKKIELKDIWYKYGLFDDYVLKGINVTIKKGETVAIVGESGSGKSTLAKILLGLLEPNIGSIEVDGVEKEEIGQTLYRKIFGAVLQNSTLSYGTLRENLTFGHFVSDEELMTNLNSIGLSNVVKSLPLGLETIIAEEGNNFSGGQQQMILLARCLLSKPSVVVLDEATSSLDNLSQQITTSYLSEIGTTKILIAHRLDTIKSADKILVMHNGEIVEIGTHRELLELGGIYKQLYSNN

SEQ ID NO: 4071 - DNA, 1401 bp, Streptococcus pneumoniae
atgaaaaaaaaatattggactttagcgatattattcttttgtttgttcaataattctgttactgctcaagaaatacctaaaaatcttgatggcaatataactcacactcagactagcgaaagtttttctgaatctgatgaaaaacaggttgactattctaataaaaatcaagaagaagtagaccaaaataaatttcgtattcaaatcgataagacagaattatttgtaacaacagataaacatttagaaaaaaactgttgtaaattggaacttgaaccacaaataaataacgatattgttaactctgaaagtaataatttactaggcgaagataatttagataataaaattaaggaaaatgtttctcatctagataatagaggaggaaatatagagcatgacaaagataacttagaatcgtcgattgtaagaaaatatgaatgggatatagataaagttactggtggaggcgaaagttataaattatattctaaaagtaattctaaagtttcaattgctattttagattcaggagtcgatttacaaaatactggattactgaaaaatctttcaaatcactcaaaaaactatgtccccaataaaggatatttaggaaaagaggagggagaggaaggaataatatcagatattcaagatagattaggtcatggtacggctgttgtagctcaaattgtaggggatgacaatattaatggagtaaatcctcacgttaatattaacgtctatagaatatttggtaagtcgtcagctagtccagattggattgtaaaagcaatttttgatgctgtagatgatggcaatgatattatcaatcttagtactggacaatatttaatgattgatggagaatatgaggacggaacaaatgattttgaaacatttttgaagtataaaaaggctattgattacgcgaatcaaaaaggagtaattatagtagctgcattagggaatgactccctaaatgtatcaaatcagtcagatttattgaaacttattagttcacgcaaaaaagtaagaaaaccaggattagtagttgatgttccaagttatttctcatctacaatttcggtcggaggcatagatcgcttaggtaatttatcagattttagcaataaaggggattctgatgcaatatatgcgcctgcaggctcaacattatctctttcagaattaggacttaataactttattaatgcagaaaaatataaagaagattggattttttcggcaacactaggaggatatacgtatctttatggaaactcatttgctgctcctaaagtttctggtgcgattgcaatgattattgataaatacaaattaaaagatcagccctataattatatgtttgtaaaaaaattctggaagaaacattaccag

SEQ ID NO: 4072 - protein, 467 aa, Streptococcus pneumoniae
  serine protease, subtilase family, FRAMESHIFT; Cellular location: outside; Similar to strain R6 sequence 15903813 (0.E+01)
MKKKYWTLAILFFCLFNNSVTAQEIPKNLDGNITHTQTSESFSESDEKQVDYSNKNQEEVDQNKFRIQIDKTELFVTTDKHLEKNCCKLELEPQINNDIVNSESNNLLGEDNLDNKIKENVSHLDNRGGNIEHDKDNLESSIVRKYEWDIDKVTGGGESYKLYSKSNSKVSIAILDSGVDLQNTGLLKNLSNHSKNYVPNKGYLGKEEGEEGIISDIQDRLGHGTAVVAQIVGDDNINGVNPHVNINVYRIFGKSSASPDWIVKAIFDAVDDGNDIINLSTGQYLMIDGEYEDGTNDFETFLKYKKAIDYANQKGVIIVAALGNDSLNVSNQSDLLKLISSRKKVRKPGLVVDVPSYFSSTISVGGIDRLGNLSDFSNKGDSDAIYAPAGSTLSLSELGLNNFINAEKYKEDWIFSATLGGYTYLYGNSFAAPKVSGAIAMIIDKYKLKDQPYNYMFVKKFWKKHYQ

SEQ ID NO: 4073 - DNA, 309 bp, Streptococcus pneumoniae
gtgttaaatataccaaacgtattgagatatgatttgaatatgttacaattagaatataaaaatgaacaaagttgggatagtttcatagataatgttaatttaattgagttggaagagagaattcaaactactattggaattaaacaaataaacacacacaatattattactattgcccgagaagggtactctcaaaattatttacctaacacttcagaaaatacatataattcattacaagtcagtttagttggagtattactactttttataagtatggtaaatattttatgggctaaaaaaagtaaa

SEQ ID NO: 4074 - protein, 103 aa, Streptococcus pneumoniae
  hypothetical protein (Subtilisin-like serine protease); Cellular location: Peptidoglycan-bound (LPXTG); Similar to strain R6 sequence 15903813 (9.E-55)
MLNIPNVLRYDLNMLQLEYKNEQSWDSFIDNVNLIELEERIQTTIGIKQINTHNIITIAREGYSQNYLPNTSENTYNSLQVSLVGVLLLFISMVNILWAKKSK

SEQ ID NO: 4075 - DNA, 765 bp, Streptococcus pneumoniae
atgagtcaaaagatgaatcaccttgatgtaggggagtttgtcttattgctgcctgaacacctccgttcagaggaagaacattataaatctgtttttgaagacgacttaaccagtcgcatatctagtcaagatgaacgacagcaaatgactgctacggtaggttatttagaatcaggtcaggatcgttttgtgtataatacgacccctatttcttaccagcagtttttgaaagatccaatcatcattgttataacaccccaatcaactggtccacagtccattttgttttggatagacgcagtacagaactacgttctctttaatcaattgtctgatgcccaggagcttatccagagacaaggcattgaaaattgggtctcagaaatgcaaacaggttaccacaactacatcacattattggataatatccagagggaacgttgggtaatgctagcaggagctgtgcttgggattgcaacttcaatcttgttgtttaacactatgaataggctctactttgaagaatttagacgtgccatttttatcaaacgcattgcaggtctcaggttcttagaaatccatcgcacttatctctttgctcaactgggtgtgtttttactgggatttgttgcgagtgtatttcttcaggtagagataggagttgctttcttagtcttgttactctttactggtctatctcttttacagttacatgtccaaatgcagaaagaaaacaagatgtccatgcttgttttgaagggaggt

SEQ ID NO: 4076 - protein, 255 aa, Streptococcus pneumoniae
  hypothetical protein; Cellular location: membrane; Similar to strain R6 sequence 15903814 (e-143)
MSQKMNHLDVGEFVLLLPEHLRSEEEHYKSVFEDDLTSRISSQDERQQMTATVGYLESGQDRFVYNTTPISYQQFLKDPIIIVITPQSTGPQSILFWIDAVQNYVLFNQLSDAQELIQRQGIENWVSEMQTGYHNYITLLDNIQRERWVMLAGAVLGIATSILLFNTMNRLYFEEFRRAIFIKRIAGLRFLEIHRTYLFAQLGVFLLGFVASVFLQVEIGVAFLVLLLFTGLSLLQLHVQMQKENKMSMLVLKGG

SEQ ID NO: 4077 - DNA, 630 bp, Streptococcus pneumoniae
atgattgaacttaaacaggtgagtaaatcttttggagaacgagagttattttcgaatctttcaatgacatttgaggctggaaaagtctatgccttaattggttcaagtggtagcggaaaaacaaccttgatgaacatgattgggaaattagaaccttatgatgggacgattttttaccgaggtaaagacttggccaattataaatcaagtgattttttccgtcacgaattgggctacctcttccagaactttggcttaattgaaaaccaaagtattgaagaaaaccttaagctaggtctcattggtcaaaagttgagtcggtcggaacagcggttgaggcagaagcaggctttagaacaggtcggcctggtttatcttgacctagataagcgcatctttgagttatcgggcggagaatcgcaacgggttgccttggcaaaaattatcttaaagaatccaccctttattctggcagatgagccaacagcttcaatagacccagcaacctctcagttgattatggagattttgctatctcttcgagatgataataggctaatcattatcgcaacacataatccggcaatttgggagatggctgatgaagtgttcacgatggatcatctgaaa

SEQ ID NO: 4078 - protein, 210 aa, Streptococcus pneumoniae
  ABC transporter, ATP-binding protein; Cellular location: cytoplasm; Similar to strain R6 sequence 15903815 (e-116)
MIELKQVSKSFGERELFSNLSMTFEAGKVYALIGSSGSGKTTLMNMIGKLEPYDGTIFYRGKDLANYKSSDFFRHELGYLFQNFGLIENQSIEENLKLGLIGQKLSRSEQRLRQKQALEQVGLVYLDLDKRIFELSGGESQRVALAKIILKNPPFILADEPTASIDPATSQLIMEILLSLRDDNRLIIIATHNPAIWEMADEVFTMDHLK

SEQ ID NO: 4079 - DNA, 159 bp, Streptococcus pneumoniae
atgaaaaaattcgacaattatattattgagaagccttgcgattctaattcagataaactgcaaaaaatcttaataattgaaagtttggtagatgatattttgcaattttctctcagaatcaataatagtgtaggagagattttcctcctacaaccgttt

SEQ ID NO: 4080 - protein, 53 aa, Streptococcus pneumoniae
  hypothetical protein; Cellular location: cytoplasm; Similar to strain R6 sequence 15903816 (6.E-26)
MKKFDNYIIEKPCDSNSDKLQKILIIESLVDDILQFSLRINNSVGEIFLLQPF

SEQ ID NO: 4081 - DNA, 411 bp, Streptococcus pneumoniae
atggaacaaacattctttatcatcaaaccagatggtgtaaaaagagggctagtgggtgaagtgttaaagcgcatcgaacaacgtggatttacaatcgaaaaattggagtttcgttcacaggtttcagaagagttgattgaccagcactatcaggacttggttggtcagagtttttacccaccgattcgtgaattcatgacttcaggtccagttcttgtgggtgtcatttctggtcccaaagtaatcgaaacttggcggaccatgatgggtgcaactcgtccagaagaagctttaccaggcactattcgaggtgattttgcaaaagctgctggagaaaatgagattatccaaaatgttgtacatggttcagattcagaagagtcagctaagcgagaaattgctctttggttt

SEQ ID NO: 4082 - protein, 137 aa, Streptococcus pneumoniae
  nucleoside diphosphate kinase (ndk); Cellular location: cytoplasm; Similar to strain R6 sequence 15903817 (6.E-76)
MEQTFFIIKPDGVKRGLVGEVLKRIEQRGFTIEKLEFRSQVSEELIDQHYQDLVGQSFYPPIREFMTSGPVLVGVISGPKVIETWRTMMGATRPEEALPGTIRGDFAKAAGENEIIQNVVHGSDSEESAKREIALWF

SEQ ID NO: 4083 - DNA, 3675 bp, Streptococcus pneumoniae
gtggttgatgtaaatcgttttaaaagtatgcaaatcaccctagcttctccaagtaaagtccgttcatggtcttatggagaagtcaaaaaacctgaaacaatcaattatcgtaccttgaaaccagaacgtgaaggactctttgatgaagtgatctttggtcctacaaaagactgggaatgtgcttgtggtaagtacaaacgcattcgttacagaggaattgtttgtgaccgctgtggggttgaagtaacgcgtacgaaagttcgtcgtgagcgtatgggacatatcgaattgaaagctcctgtatctcacatctggtacttcaaggggattccaagccgtatgggcttgacccttgatatgagccctcgtgccctcgaggaagttatctactttgcggcttatgtggtgattgatcctaaggatacaccacttgagcacaagtctatcatgacagagcgcgaataccgagagcgcttgcgtgaatatggttatggttcatttgttgccaagatgggtgcggaagccatccaagaccttttgaagcaagtagatcttgaaaaagaaattgctgaactcaaagaagaattgaaaacagctactggacaaaagcgtgtcaaagccatccgtcgtttggatgttttggatgccttttacaagtctggaaacaaacctgaatggatgattcttaacatccttccggttatcccaccagatcttcgtccaatgttgcagttggatggtggccgttttgcctcatctgacttgaatgacctttaccgccgtgttatcaaccgtaacaaccgtttggctcgtttgcttgagttaaatgcaccaggtatcatcgttcaaaatgagaagcgtatgcttcaagaagcagttgacgctttgattgacaatggtcgtcgtggtcgtccaatcacaggaccaggtagccgtccattgaaatcattgagccacatgcttaaaggtaaacaaggacgcttccgtcaaaacttgctcggtaaacgtgttgacttctcaggacgttcagttatcgccgttggtccaactcttaagatgtaccaatgtggtgtgccgcgtgaaatggcgattgaactctttaaaccatttgtcatgcgtgaaatcgttgcccgtgatatcgtgcaaaacgtcaaagcagctaaacgcttggtggaacgcggagatgagcgtatctgggatatccttgaagaagtgattaaagaacacccagtgcttttgaaccgcgcaccgacccttcaccgtttgggtatccaagccttcgagccagtcttgattgatggtaaggctcttcgcttgcacccacttgtctgtgaagcctacaatgctgactttgacggggaccaaatggccatccacgtaccactttcagaagaagcacaagcagaagctcgtatcctcatgctagctgctgagcacatcttgaacccgaaagatgggaaaccggtagttactccatctcaggacatggttttgggtaactactacttgaccatggaagaagctggtcgcgaaggtgaaggaatggtcttcaaagaccgtgacgaagcggttatggcttaccgcaatggttatgttcacctccactcacgtgttggtatcgcaacagacagcctcaacaagccttggacagaagagcaaagacataaggtcttgcttacaacagttggtaaaattctcttcaacgatatcatgccagaggggctaccatacttgcaagaaccaaacaatgccaacttgacagaaggtgttccagctaaatacttcttgccacttggtggagatatcaaggaagctatcagcaatcttgagctcaaccctccattcaagaagaaaaaccttggaaatatcatcgctgaaatcttcaaacgtttccgtacgacagaaacttctgccctacttgaccgcatgaagaacctcggttaccaccactcaactcttgcaggattgacagtgggtattgccgatatcccagtcgttgatgacaaggctgaaatcattgaagaatcacacaaacgtgtcgaacaaatcaccaaacaattccgtcgtggtatgatcacagacgacgagcgttacaatgctgttacagctgaatggcgtgctgcccgtgaaaaacttgagaaacgcttgattgctaaccaagatcctaagaacccaatcgttatgatgatggactctggagcccgtggtaacatctcaaacttctcacagcttgccggtatgcgtggtctgatggctgctccgaatggacgtatcatggaattgccaatcctttcaaacttccgcgaaggtttgtcggtattggaaatgttcttctcaactcacggtgctcgtaaaggtatgaccgatacggcccttaagacagccgactcaggttacttgactcgtcgtttggtcgacgttgcccaagacgttatcatccgtgaggacgactgtggaactgaccgtggtctcttgatccgttctatcgcagaaggaaaagagatgatcgagtctctcgaagagcgtctcaacggtcgttacactaagaaaactgttaaacatccagaaactggtgcagtgattattggtccaaatgaattgattacagaagacaaggcgcgtgaaattgtcaatgctggtgtggaagaagtgactatccgttctgtatttacatgtaacactcgtcacggtgtctgccgtcactgttacggtatcaacttggcgactggtgatgcggttgaagttggtgaagcagttggtacaatcgctgcccaatctatcggggaacctggtacacagcttacaatgcgtaccttccacacaggtggggttgcctcaaataccgatatcactcagggtcttcctcgtgtccaagaaatctttgaagcccgcaatcctaaaggggaagcggttattacagaggttaaaggacaagttactgctatcgaagaagatgcatcaactcgtaccaagaaagtctttgttaagggtgaaactggcgaaggtgaatatgtcgttccatttacagctcgtatgcgtgtcgaagttgggggccaagtagcgcgtggtgctgctctgacagaaggttctatccaaccaaaacgtctccttgcagttcgtgatgtcttgtcagttgaaacgtaccttctcggtgaagtacaaaaagtttaccgtagccaaggggtagaaatcggtgacaaacacatcgaggtaatggttcgtcaaatgatccgtaaagtccgtgtcatggatccaggtgatacagatcttctcatgggtaccctcatggatatcaatgactttacagatgccaacaaagatgtccttatcgcaggtggagttccagcgacaggtcgcccagtccttatgggaattaccaaagcctcacttgaaacaaacagtttcttgtcagcggcttccttccaggaaacaactcgtgtccttactgacgcagctatccgtggtaagaaagaccatctccttggacttaaagaaaatgttatcatcggtaagatcatcccagctggtactggtatggcccgttaccgtaaccttgaaccacatgctgtcaacgaagaagaataccttaatcctccagtagaggaagaaggaaatgaagaaacaacagaagtagttgtggatactgccgttgaaactgtggaagaaacagtagaa

SEQ ID NO: 4084 - protein, 1225 aa, Streptococcus pneumoniae
  DNA-directed RNA polymerase, beta' subunit (rpoC); Cellular location: cytoplasm; Similar to strain R6 sequence 15903818 (0.E+01)
MVDVNRFKSMQITLASPSKVRSWSYGEVKKPETINYRTLKPEREGLFDEVIFGPTKDWECACGKYKRIRYRGIVCDRCGVEVTRTKVRRERMGHIELKAPVSHIWYFKGIPSRMGLTLDMSPRALEEVIYFAAYVVIDPKDTPLEHKSIMTEREYRERLREYGYGSFVAKMGAEAIQDLLKQVDLEKEIAELKEELKTATGQKRVKAIRRLDVLDAFYKSGNKPEWMILNILPVIPPDLRPMLQLDGGRFASSDLNDLYRRVINRNNRLARLLELNAPGIIVQNEKRMLQEAVDALIDNGRRGRPITGPGSRPLKSLSHMLKGKQGRFRQNLLGKRVDFSGRSVIAVGPTLKMYQCGVPREMAIELFKPFVMREIVARDIVQNVKAAKRLVERGDERIWDILEEVIKEHPVLLNRAPTLHRLGIQAFEPVLIDGKALRLHPLVCEAYNADFDGDQMAIHVPLSEEAQAEARILMLAAEHILNPKDGKPVVTPSQDMVLGNYYLTMEEAGREGEGMVFKDRDEAVMAYRNGYVHLHSRVGIATDSLNKPWTEEQRHKVLLTTVGKILFNDIMPEGLPYLQEPNNANLTEGVPAKYFLPLGGDIKEAISNLELNPPFKKKNLGNIIAEIFKRFRTTETSALLDRMKNLGYHHSTLAGLTVGIADIPVVDDKAEIIEESHKRVEQITKQFRRGMITDDERYNAVTAEWRAAREKLEKRLIANQDPKNPIVMMMDSGARGNISNFSQLAGMRGLMAAPNGRIMELPILSNFREGLSVLEMFFSTHGARKGMTDTALKTADSGYLTRRLVDVAQDVIIREDDCGTDRGLLIRSIAEGKEMIESLEERLNGRYTKKTVKHPETGAVIIGPNELITEDKAREIVNAGVEEVTIRSVFTCNTRHGVCRHCYGINLATGDAVEVGEAVGTIAAQSIGEPGTQLTMRTFHTGGVASNTDITQGLPRVQEIFEARNPKGEAVITEVKGQVTAIEEDASTRTKKVFVKGETGEGEYVVPFTARMRVEVGGQVARGAALTEGSIQPKRLLAVRDVLSVETYLLGEVQKVYRSQGVEIGDKHIEVMVRQMIRKVRVMDPGDTDLLMGTLMDINDFTDANKDVLIAGGVPATGRPVLMGITKASLETNSFLSAASFQETTRVLTDAAIRGKKDHLLGLKENVIIGKIIPAGTGMARYRNLEPHAVNEEEYLNPPVEEEGNEETTEVVVDTAVETVEETVE

SEQ ID NO: 4085 - DNA, 3609 bp, Streptococcus pneumoniae
ttggcaggacatgacgttcaatacgggaaacatcgtacccgtcgtagtttttcaagaatcaaagaagttcttgacttaccaaatttgattgaaattcaaactgactcattcaaagctttcctagaccacggtcttaaggaagtgtttgaagatgtattgccaatttcaaacttcacagacacaatggagttggaatttgttggatatgaaatcaaggaaccaaaatatacgctagaagaagctcgtatccacgatgctagctactcagcaccaatttttgtaaccttccgtttgatcaataaagaaacaagcgaaatcaagacccaagaagttttctttggtgatttcccaatcatgacagaaatgggtactttcatcatcaatggtggtgaacgtattatcgtttctcagttggtccgctcaccaggtgtttactttaacgacaaagtagacaaaaatggtaaggtgggctatggttcaactgttatccctaaccgtggagcttggttggaacttgaaagcgactcaaaagatatcacctacactcgtatcgaccgtactcgtaagattccatttacaaccttggttcgtgctcttggtttctcaggtgatgatgaaatctttgatatctttggtgacagcgaattggttcgcaacactgttgaaaaagatatccacaagaatccaatggactctcgtacagacgaagccttgaaagaaatttacgaacgccttcgtccaggtgagcctaagacggctgaaagctcacgtagcttgcttgtagctcgcttctttgacccacgtcgttatgacttggcagcagttggtcgttacaaaatcaataaaaaactcaatgttaaaacacgtttgctcaaccaaaccattgcagagccattggtagaccctgaaactggagaaatcttggtagaagctggtacgattatgactcgtagcgtgattgaaagcattgaaagccatttggatggcgacttgaacaagattgtctacatcccaaacgatgcagccgttgtgactgagcctgttgttcttcaaaaattcaaggttattgctccaactgatccagatcgcgtcgtaacgatcattggtaatgctaacccagatgacaaggttcgtacggtgactcctgcagatatccttgctgagatgagctacttcctcaacttggctgaaggacttggccgtgtagatgatatcgaccaccttggaaatcgtcgtatccgtgcggttggtgaattgcttgccaaccaagtacgtttgggactttctcgtatggaacgtaatgtccgtgaacgtatgtctgttcaggacaatgaagtcttgacaccacaacaaattatcaatatccgtcctgtaacagctgcagttaaagaattctttggttcatcacagttgtcacagttcatggaccaacacaacccgctttctgagttgtctcacaaacgccgtttgtcagccttaggacctggtggtttgactcgtgaccgtgctggatatgaagtacgtgacgtgcactacactcactatggtcgtatgtgtccaatcgagacacctgaaggacctaacatcggtttgatcaataacttgtcatcttatggacacttgaacaaatatggttttgttcaaacaccataccgtaaggttgaccgtgaaacaggtgttgtcacgaacgaaattgtttggttgacagctgatgaagaagatgaatatactgtagctcaggctaactctcgtctgaatgaagatggaacctttgctgagaagattgtcatgggacgtcaccaaggggtcaaccaagagtatccagctaatattgttgactacatggacgtttcaccaaaacaggtagttgccgttgcgacagcatgtattcctttcttggaaaacgatgactccaaccgtgccctcatgggagccaatatgcaacgtcaggctgtgccattgattaatcctcaggcaccttacgttggtactggtatggaataccaagcagcccacgattctggtgcggctgtgattgctcagtatgatggtaaagttacttacgcagatgctgacaaggtagaagttcgtcgtgaagatggttcattggatgtttaccacatccaaaaattccgtcgttcaaactcaggtactgcttacaaccaacgcactctcgtaaaagttggtgatgtcgttgaaaaaggcgatttcatcgctgacggaccttctatggaaaatggagaaatggcgcttggacaaaacccaatcgttgcctacatgacttgggaaggttacaacttcgaggatgccgttatcatgagcgaacgcttggtgaaggacgatgtctacacatctgttcaccttgaagaatacgaatcagaaacgcgcgatacaaagcttgggcctgaagaaatcactcgcgaaattccaaacgttggtgaagatgccctcaaagaccttgacgaaatggggattatccgtattggtgctgaggttaaagaaggtgatattcttgtaggtaaagtaacacctaagggtgagaaagatctttcagctgaagaacgtctcttgcacgctatctttggagacaagtctcgtgaagtgcgtgatacttctcttcgtgtaccacacggtgccgatggtgtcgttcgtgatgttaagatctttacacgtgtaaatggagatgagttgcaatcaggtgttaacatgttggttcgtgtttacatcgctcaaaaacgtaagattaaggtcggagataaaatggccggacgtcacggaaacaaaggggttgtctctcgtatcgttcctgtagaagacatgccttaccttccagacggaactccagtcgacatcatgttgaacccacttggggtaccatcacgtatgaatatcggtcaggttatggagcttcaccttggtatggcagctcgtactcttggtattcacatcgctacaccagtctttgatggagcaagttctgaagatctttggtcaactgttaaagaagcaggtatggatagcgatgccaaaacgatcctttacgatggacgtactggtgaaccgtttgataaccgtgtttctgtcggagtcatgtacatgatcaaactccaccacatggttgatgataaattgcacgcgcgttcagtcggaccatactcaactgttacccaacaaccactcggaggtaaggctcagtttggtggacaacgtttcggtgagatggaggtttgggctcttgaagcctacggtgcgtcaaatgtccttcaagaaatcttgacttacaagtcggacgatatcaacggacgtttgaaagcctatgaagctattacaaaaggcaaaccaattccaaaaccaggtgttccagaatccttccgagttcttgtcaaagaattgcaatctcttggtcttgacatgcgtgtcctagacgaagatgaccaagaagtggaacttcgcgacttggatgaaggaatggacgaagatgtcatccacgtagatgaccttgaaaaagcccgcgaaaaagcagcccaagaggctaaagcagcctttgaagctgaagaagctgagaaagcaacaaaagcggaagcaacagaagaagctgctgaacaagaa

SEQ ID NO: 4086 - protein, 1203 aa, Streptococcus pneumoniae
  DNA-directed RNA polymerase, beta subunit (rpoB); Cellular location: cytoplasm; Similar to strain R6 sequence 15903819 (0.E+01)
MAGHDVQYGKHRTRRSFSRIKEVLDLPNLIEIQTDSFKAFLDHGLKEVFEDVLPISNFTDTMELEFVGYEIKEPKYTLEEARIHDASYSAPIFVTFRLINKETSEIKTQEVFFGDFPIMTEMGTFIINGGERIIVSQLVRSPGVYFNDKVDKNGKVGYGSTVIPNRGAWLELESDSKDITYTRIDRTRKIPFTTLVRALGFSGDDEIFDIFGDSELVRNTVEKDIHKNPMDSRTDEALKEIYERLRPGEPKTAESSRSLLVARFFDPRRYDLAAVGRYKINKKLNVKTRLLNQTIAEPLVDPETGEILVEAGTIMTRSVIESIESHLDGDLNKIVYIPNDAAVVTEPVVLQKFKVIAPTDPDRVVTIIGNANPDDKVRTVTPADILAEMSYFLNLAEGLGRVDDIDHLGNRRIRAVGELLANQVRLGLSRMERNVRERMSVQDNEVLTPQQIINIRPVTAAVKEFFGSSQLSQFMDQHNPLSELSHKRRLSALGPGGLTRDRAGYEVRDVHYTHYGRMCPIETPEGPNIGLINNLSSYGHLNKYGFVQTPYRKVDRETGVVTNEIVWLTADEEDEYTVAQANSRLNEDGTFAEKIVMGRHQGVNQEYPANIVDYMDVSPKQVVAVATACIPFLENDDSNRALMGANMQRQAVPLINPQAPYVGTGMEYQAAHDSGAAVIAQYDGKVTYADADKVEVRREDGSLDVYHIQKFRRSNSGTAYNQRTLVKVGDVVEKGDFIADGPSMENGEMALGQNPIVAYMTWEGYNFEDAVIMSERLVKDDVYTSVHLEEYESETRDTKLGPEEITREIPNVGEDALKDLDEMGIIRIGAEVKEGDILVGKVTPKGEKDLSAEERLLHAIFGDKSREVRDTSLRVPHGADGVVRDVKIFTRVNGDELQSGVNMLVRVYIAQKRKIKVGDKMAGRHGNKGVVSRIVPVEDMPYLPDGTPVDIMLNPLGVPSRMNIGQVMELHLGMAARTLGIHIATPVFDGASSEDLWSTVKEAGMDSDAKTILYDGRTGEPFDNRVSVGVMYMIKLHHMVDDKLHARSVGPYSTVTQQPLGGKAQFGGQRFGEMEVWALEAYGASNVLQEILTYKSDDINGRLKAYEAITKGKPIPKPGVPESFRVLVKELQSLGLDMRVLDEDDQEVELRDLDEGMDEDVIHVDDLEKAREKAAQEAKAAFEAEEAEKATKAEATEEAAEQE

SEQ ID NO: 4087 - DNA, 105 bp, Streptococcus pneumoniae
ttgatcgtcggttcaaatccgtctaccgccttctataacttgatttatcaggtttcaaatgaacagaaagcccaatttgaagggctttttttattttccctcgaa

SEQ ID NO: 4088 - protein, 35 aa, Streptococcus pneumoniae
  hypothetical protein; Cellular location: cytoplasm
MIVGSNPSTAFYNLIYQVSNEQKAQFEGLFLFSLE

SEQ ID NO: 4089 - DNA, 1329 bp, Streptococcus pneumoniae
atggaagacccaagtagtcagaatttgttgctacaatttgttttattgtttatcttgacggtattaaatgcctttttctcagccacagaaatggccatggtttctcttaatcgtgcccgagttgaacaaaaggcggaagaaggagacagacgctacatccgcctgctgaaggtactagaaaatcctaaccactttttatcaaccatccaggtaggaatcaccctgattacaatcttatcaggggcgagtttaactgatactctaggacgtgtgattgcctcttggcttgggaatggcgaaacagcacaagccgtggcaacttttctatccttggcatttttgacctatatttccatcgtttttggggaattatatcctaagagaatcgctcttaatctaaaggatgccttggcaattcgtacagcgccgattatcattgggatcggaaaactagtcagtccttttgtttggcttttagctgcttcgaccaatttcttgagccatttgactcctatgtcattcgatgatgcggatgaaaagatgacccgtgatgaaattgcctatatgctgacaaatagtgaagaaacattggatgctgatgagattgagatgctacaaggtgtcttttcgctcgatgaactgatggcacgagaggttatggttcctcgaacggatgcctttatggtggatattcaggatgatagtcaagccattatccaaagtattttaaaacaaaattattctcgtatcccggtttatgatggggataaggacaatgtaattggaatcattcacaccaagagtctccttaaggcaggctttgtggacggttttgacaatattgtttggaagagaattttacaagatccactttttgtacctgaaactatttttgtggatgacttgctaaaagaactgcgaaatacccaaagacaaatggcaatcttgctggatgaatacggtggtatggctggtttggtgactttggaagacctcttagaggaaattgttggtgaaattgatgatgaaacggacaaagcagcaatagatgttcatcagattggcgaggatacctacattgttcaaggaactatgaccctcaatgatttcaataattactttgatgttgaactggaaagtgatgacgttgatactatcgctggttattatttgacaggagtgggaactattccaacgactgagaaactcagctatgaattggtcagccaaaacaaacagtttatcttaaccaatgataaagtgaagaatggacgtgttaccaaggtaaaagtccaaatcacagaagtcgaaatagaagaagaaacagaa

SEQ ID NO: 4090 - protein, 443 aa, Streptococcus pneumoniae
  CBS domain protein; Cellular location: membrane; Similar to strain R6 sequence 15903820 (0.E+01)
MEDPSSQNLLLQFVLLFILTVLNAFFSATEMAMVSLNRARVEQKAEEGDRRYIRLLKVLENPNHFLSTIQVGITLITILSGASLTDTLGRVIASWLGNGETAQAVATFLSLAFLTYISIVFGELYPKRIALNLKDALAIRTAPIIIGIGKLVSPFVWLLAASTNFLSHLTPMSFDDADEKMTRDEIAYMLTNSEETLDADEIEMLQGVFSLDELMAREVMVPRTDAFMVDIQDDSQAIIQSILKQNYSRIPVYDGDKDNVIGIIHTKSLLKAGFVDGFDNIVWKRILQDPLFVPETIFVDDLLKELRNTQRQMAILLDEYGGMAGLVTLEDLLEEIVGEIDDETDKAAIDVHQIGEDTYIVQGTMTLNDFNNYFDVELESDDVDTIAGYYLTGVGTIPTTEKLSYELVSQNKQFILTNDKVKNGRVTKVKVQITEVEIEEETE

SEQ ID NO: 4091 - DNA, 822 bp, Streptococcus pneumoniae
atgaacaaaaaaacaagacagacactaatcggactgctagtgttattgcttttgtctacagggagctattatatcaagcagatgccgtcggcacctaatagtcccaaaaccaatcttagtcagaaaaaacaagcgtctgaagctcctagtcaagcattggcagagagtgtcttaacagacgcagtcaagagtcaaataaaggggagtctggagtggaatggctcaggtgcttttatcgtcaatggtaataaaacaaatctagatgccaaggtttcaagtaagccctacgctgacaataaaacaaagacagtgggcaaggaaactgttccaaccgtagctaatgccctcttgtctaaggccactcgtcagtacaagaatcgtaaagaaactgggaatggttcaacttcttggactcctccaggttggcatcaggtcaagaatctaaagggctcttatacccatgcagtcgatagaggtcatttgttaggctatgccttaatcggtggtttggatggttttgatgcctcaacaagcaatcctaaaaacattgctgttcagacagcctgggcaaatcaggcacaagccgagtattcgactggtcaaaactactatgaaagcaaggtgcgtaaagccttggaccaaaacaagcgtgtccgttaccgtgtaaccctttactacgcttcaaacgaggatttagttccctcagcttcacagattgaagccaagtcttcggatggagaattggaattcaatgttctagttcccaatgttcaaaagggacttcaactggattaccgaactggagaagtaactgtaactcag

SEQ ID NO: 4092 - protein, 274 aa, Streptococcus pneumoniae [sequence omitted]

SEQ ID NO: 4093 - DNA, 204 bp, Streptococcus pneumoniae
ttgaggcaagtgatgaagatgaataagaaatcaagctacgtagtcaagcgtttacttttagtcatcatagtactgattttaggtactctggctctaggaatcggtttaatggtaggttatggaatcttgggcaagggtcaagatccatgggctatcctgtctccagcaaaatggcaggaattgattcataaatttacaggaaat

SEQ ID NO: 4094 - protein, 68 aa, Streptococcus pneumoniae
  hypothetical protein; Cellular location: membrane; Similar to strain R6 sequence 15903822 (2.E-34)
MRQVMKMNKKSSYVVKRLLLVIIVLILGTLALGIGLMVGYGILGKGQDPWAILSPAKWQELIHKFTGN

SEQ ID NO: 4095 - DNA, 1308 bp, Streptococcus pneumoniae
atgaaatcaagagtaaaggaaacgagtatggataaaattgtggttcaaggtggcgataatcgtctggtaggaagcgtgacgatcgagggagcaaaaaatgcagtcttacccttgttggcagcgactattctagcaagtgaaggaaagaccgtcttgcagaatgttccgattttgtcggatgtctttattatgaatcaggtagttggtggtttgaatgccaaggttgactttgatgaggaagctcatcttgtcaaggtggatgctactggcgacatcactgaggaagccccttacaagtatgtcagcaagatgcgcgcctccatcgttgtattagggccaatccttgcccgtgtgggtcatgccaaggtatccatgccaggtggttgtacgattggtagccgtcctattgatcttcatttgaaaggtctggaagctatgggggttaagattagtcagacagctggttacatcgaagccaaggcagaacgcttgcatggtgctcatatctatatggactttccaagtgttggtgcaacgcagaacttgatgatggcagcgactctggctgatggggtgacagtgattgagaatgctgcgcgtgagcctgagattgttgacttagccattctccttaatgaaatgggagccaaggtcaaaggtgctggtacagagactataaccattactggtgttgagaaacttcatggtacgactcacaatgtagtccaagaccgtatcgaagcaggaacctttatggtagctgctgccatgactggtggtgatgtcttgattcgagacgctgtctgggagcacaaccgtcccttgattgccaagttacttgaaatgggtgttgaagtaattgaagaagacgaaggaattcgtgttcgttctcaactagaaaatctaaaagctgttcatgtgaaaaccttgccccacccaggatttccaacagatatgcaggctcaatttacagccttgatgacagttgcaaaaggcgaatcaaccatggtggagacagttttcgaaaatcgtttccaacacctagaagagatgcgccgcatgggcttgcattctgagattatccgtgatacagctcgtattgttggtggacagcctttgcagggagcagaagttctttcaactgaccttcgtgccagtgcggccttgattttgacaggtttggtagcacagggagaaactgtggtcggtaaattggttcacttggatagaggttactacggtttccatgagaagttggcgcagctaggtgctaagattcagcggattgaggcaagtgatgaagatgaa

SEQ ID NO: 4096 - protein, 436 aa, Streptococcus pneumoniae
  UDP-N-acetylglucosamine 1-carboxyvinyltransferase (murA); Cellular location: cytoplasm; Similar to strain R6 sequence 15903823 (0.E+01)
MKSRVKETSMDKIVVQGGDNRLVGSVTIEGAKNAVLPLLAATILASEGKTVLQNVPILSDVFIMNQVVGGLNAKVDFDEEAHLVKVDATGDITEEAPYKYVSKMRASIVVLGPILARVGHAKVSMPGGCTIGSRPIDLHLKGLEAMGVKISQTAGYIEAKAERLHGAHIYMDFPSVGATQNLMMAATLADGVTVIENAAREPEIVDLAILLNEMGAKVKGAGTETITITGVEKLHGTTHNVVQDRIEAGTFMVAAAMTGGDVLIRDAVWEHNRPLIAKLLEMGVEVIEEDEGIRVRSQLENLKAVHVKTLPHPGFPTDMQAQFTALMTVAKGESTMVETVFENRFQHLEEMRRMGLHSEIIRDTARIVGGQPLQGAEVLSTDLRASAALILTGLVAQGETVVGKLVHLDRGYYGFHEKLAQLGAKIQRIEASDEDE

SEQ ID NO: 4097 - DNA, 1035 bp, Streptococcus pneumoniae
atgaaaaaaaagattagatggcccttatacgtcattgcggccttgattgtgactttcttggcatttgtagtgcccttgccttattatatagaggttccaggtggttcggaagatattcgccaagtccttaaagtaaatgacacagaagataaggaagctggtgcctatcaattcgttacggttggtgttcaacatgccactttagctcatatgatttatgcttggttgacaccttttacagatattcgtagtgctcaggagactacaggtggttcttccgatgttgaatttatgcgaatcaatcaattctacatgcaaacatcgcaaaatatggccaagtatcaaggactaaaaacagctggtaaggatatcgaactcaagtactttggagtttatgttttgaatgtgacggataattcaacctttaaagggattctcaatatctctgatacagtcacagcagtcaatgatcagacctttgatagttccaaagacttgattgattacgtcagttctcaaaaattaggggattccgtcaaggtcacctatgaagaggatgggcaaaccaagtctgcagaaggaaaaatcatcaccttggaaaatggcaaaaatggaattggaatcggcttgattgaccgtacagaggtaatcagcaatgtcccaattagcttttcaacagctggtattggcggtccaagtgctggtctcatgtttagtctagctatctatactcaaatagctcacccagatcttcgtaatggtcgtattgttgccggtacaggtaccattgaccgcgatggtaatgtgggagacattggaggtattgataagaaggttgtagcttcggctagggcaggtgctgctattttctttgctcctgataaccctgttagcgaagaagaacaaaaggcgcatccggacgcgaaaaacaactaccaaacagccctagaagcggctaaaacaatcaagacggatatgaaaatcgtgcccgttaaaaccctacaagatgcgattgattacttgaaaaacaatccc

SEQ ID NO: 4098 - protein, 345 aa, Streptococcus pneumoniae
  conserved hypothetical protein; Cellular location: outside; Similar to strain R6 sequence 15903824 (0.E+01)
MKKKIRWPLYVIAALIVTFLAFVVPLPYYIEVPGGSEDIRQVLKVNDTEDKEAGAYQFVTVGVQHATLAHMIYAWLTPFTDIRSAQETTGGSSDVEFMRINQFYMQTSQNMAKYQGLKTAGKDIELKYFGVYVLNVTDNSTFKGILNISDTVTAVNDQTFDSSKDLIDYVSSQKLGDSVKVTYEEDGQTKSAEGKIITLENGKNGIGIGLIDRTEVISNVPISFSTAGIGGPSAGLMFSLAIYTQIAHPDLRNGRIVAGTGTIDRDGNVGDIGGIDKKVVASARAGAAIFFAPDNPVSEEEQKAHPDAKNNYQTALEAAKTIKTDMKIVPVKTLQDAIDYLKNNP

SEQ ID NO: 4099 - DNA, 486 bp, Streptococcus pneumoniae
atgtcagataagattggcttattcacaggctcatttgatccgatgacaaatgggcatctggatatcattgaacgggcgagcagactttttgataagctttatgtgggtattttttttaatccccacaaacaaggatttctccctcttgaaaatcgtaaacgggggttagaaaaggctgtgaaacatttgggaaatgttaaagtcgtgtcttctcatgataaattggtggtcgatgtcgcaaaaagactgggggctacttgcctagtgcgaggtttgagaaatgcgtcggatttgcaatatgaagccagttttgattactacaatcatcagctgtcttctgatatagagactatttatttacatagtcgacctgaacatctctatatcagttcatcaggcgttagagagcttttgaagtttggtcaggatattgcctgctatgttcccgagagtattttggaggaaataagaaatgaaaaaaaagat

SEQ ID NO: 4100 - protein, 162 aa, Streptococcus pneumoniae
  phosphopantetheine adenylyltransferase (coaD); Cellular location: cytoplasm; Similar to strain R6 sequence 15903825 (5.E-88)
MSDKIGLFTGSFDPMTNGHLDIIERASRLFDKLYVGIFFNPHKQGFLPLENRKRGLEKAVKHLGNVKVVSSHDKLVVDVAKRLGATCLVRGLRNASDLQYEASFDYYNHQLSSDIETIYLHSRPEHLYISSSGVRELLKFGQDIACYVPESILEEIRNEKKD

SEQ ID NO: 4101 - DNA, 537 bp, Streptococcus pneumoniae
atgaaaatcgtatcaggaatctatgggggacgtcccctcaagacactagaaggcaagacgacaagacctacttcggataaggttaggggagccatttttaacatgattggtccctactttgaagtgggacgagtcttggacctttatgcaggtagtggtggtttatctatcgaagcagtatcgcgtggcatgtccagtgctgttttggtggagcgagaccgtaaggctcagaccatcgtggctgaaaatatccagatgaccaaggaagttggaaaatttcaactcctcaagatggatgcagaaagggcattggaacaggtatctggggaatttgacctcgttttcttagaccctccctatgccaaggaacaaatcgtagcagatattgaaaaaatggctgagagagagcttttttctgaagatgttatggttgtgtgcgagacggataaagccgttgaacttccagaagaaattgcctgtctgggtatctggaaggaaaagatttatggaattagtaaggtgacagtctatgtcaga

SEQ ID NO: 4102 - protein, 179 aa, Streptococcus pneumoniae
  type II DNA modification methyltransferase, putative; Cellular location: cytoplasm; Similar to strain R6 sequence 15903826 (7.E-97)
MKIVSGIYGGRPLKTLEGKTTRPTSDKVRGAIFNMIGPYFEVGRVLDLYAGSGGLSIEAVSRGMSSAVLVERDRKAQTIVAENIQMTKEVGKFQLLKMDAERALEQVSGEFDLVFLDPPYAKEQIVADIEKMAERELFSEDVMVVCETDKAVELPEEIACLGIWKEKIYGISKVTVYVR

SEQ ID NO: 4103 - DNA, 990 bp, Streptococcus pneumoniae
atgaagaaaagttttatccatcaacaagaagaaatttcctttgtcaaaaacacttttacccagtatttgaaagataagctagaagttgtcgaagttcaaggtcctatcttgagtaaggtcggtgacggaatgcaggacaacctgtctggtgtggaaaatccagtatcggtcaaggttctccaaatccctgatgctacttatgaagtggtgcactcacttgctaaatggaaacgccacaccttggctcgttttggctttggtgaaggagagggtctctttgtccacatgaaagcccttcgtccagatgaggattccttggatgcaacccactctgtttatgttgaccagtgggactgggagaaggttatcccaaatggtaagcgtaacatcgtttatctaaaagaaacagttgagaagatttataaggctattcgcctgactgagctagctgttgaagcccgctatgacatcgagtctatcttgccaaaacaaattacctttatccatacagaagaattggtagaacgctacccagacttgacaccgaaagaacgtgaaaatgcgatttgtaaagaatttggagccgtctttttgattggtatcggtggcgagttgccagatggtaaaccgcacgatggacgtgcaccagactatgatgactggacaagcgagtctgagaatggctacaagggtctaaatggtgatattcttgtctggaatgagtctttaggtggagcctttgagttgtcttctatgggaattcgtgtagatgaagaaactcttagacgtcaggtggaaattacaggtgatgaagaccgcttggaattggaatggcacaagtctttgttgaatggtctattcccattgacaatcggtggaggaattggacaatctcgtatggccatgttcctacttcgcaagagacacatcggagaagtgcaaacaagtgtttggcctcaagaagtccgcgatacttacgaaaatattttg

SEQ ID NO: 4104 - protein, 330 aa, Streptococcus pneumoniae
  aspartate--ammonia ligase (asnA); Cellular location: cytoplasm; Similar to strain R6 sequence 15903827 (0.E+01)
MKKSFIHQQEEISFVKNTFTQYLKDKLEVVEVQGPILSKVGDGMQDNLSGVENPVSVKVLQIPDATYEVVHSLAKWKRHTLARFGFGEGEGLFVHMKALRPDEDSLDATHSVYVDQWDWEKVIPNGKRNIVYLKETVEKIYKAIRLTELAVEARYDIESILPKQITFIHTEELVERYPDLTPKERENAICKEFGAVFLIGIGGELPDGKPHDGRAPDYDDWTSESENGYKGLNGDILVWNESLGGAFELSSMGIRVDEETLRRQVEITGDEDRLELEWHKSLLNGLFPLTIGGGIGQSRMAMFLLRKRHIGEVQTSVWPQEVRDTYENIL

SEQ ID NO: 4105 - DNA, 162 bp, Streptococcus pneumoniae
ttgttgatggataaaacttttcttcatagacaactcctcaaaaatttaataaacgtattatacacctatttccaagaaaagaaaagagaaaatttaaaaaaaatcagtgtcactcaaaacactgatttcatagaccttttagtcattgcgaccaaagatacg

SEQ ID NO: 4106 - protein, 54 aa, Streptococcus pneumoniae
  hypothetical protein; Cellular location: cytoplasm; Similar to strain R6 sequence 15903828 (2.E-25)
MLMDKTFLHRQLLKNLINVLYTYFQEKKRENLKKISVTQNTDFIDLLVIATKDT

SEQ ID NO: 4107 - DNA, 705 bp, Streptococcus pneumoniae
atgttcacagaaaaggagaaatggatgaatcacactattatacatgaccgtgcaggtctcaatcaattttacgctaaggtttatgcctttgttggtctgggaatcggactatctgctttggtatcaggccttatgttgacggtctttcagtctcagttggtttacttgttgatgcaggggcgtctctggttgaccattgctacttttgcggagttggctttggttttcgttgccagtagcatggcttcaagaaatagtccagctgctcttccagtatttttactttactccgttttaaacggctttacccttagttttgtggtggctttctatactccgggtacagttttatctgcctttgtatcgagcgcccttctcttctttgtcatggcggcagttggtatctttaccaagaaagacttgagtgggattggtcgagcaatgatggcagctctcattggtttactgattgctatggtagtcaatattttcttggctagtggcttctttgattatatgattagcgtagccatggttttggttttttcagggttgattgcttgggataaccaaaagattcgcctcgcctatgaacaatcacaaggtcgtgtagcgacaggctgggtggtgtcaatggctctcagcatctatcttgattttatcaatcttttcctaagtattctacgtatctttggtcgcaatgac

SEQ ID NO: 4108 - protein, 235 aa, Streptococcus pneumoniae
  membrane protein; Cellular location: membrane; Similar to strain R6 sequence 15903829 (e-127)
MFTEKEKWMNHTIIHDRAGLNQFYAKVYAFVGLGIGLSALVSGLMLTVFQSQLVYLLMQGRLWLTIATFAELALVFVASSMASRNSPAALPVFLLYSVLNGFTLSFVVAFYTPGTVLSAFVSSALLFFVMAAVGIFTKKDLSGIGRAMMAALIGLLIAMVVNIFLASGFFDYMISVAMVLVFSGLIAWDNQKIRLAYEQSQGRVATGWVVSMALSIYLDFINLFLSILRIFGRND

SEQ ID NO: 4109 - DNA, 756 bp, Streptococcus pneumoniae
ttgtgttataatatttctatgactattataacctcaaaagccaattctgtggtaaaaaataccaagaaattacaccaaaaaaaataccgcaagtcagcctatttgattgaaggctggcacttgtttgaagaagctgttcaagctggagtgacgattgagaaaatctttaccctagaaaattatcgagatcagttagcaactttttcgcaaactgtctgggtgtcagaggatattttgctagatttggcggattctcagactccacagggaattgtggccgtggttcaaaaagaagaagtaggacaagctgatttgagtcagggcaagttcttgtttttggaagatgtgcaagatcctggtaatgtaggaactatcattcgaactgcggatgcagcaggttttacaggagtgattgtttcagataagtcggcagacatctacagtctcaaaaccctacgttccatgcaaggtagtcatttccatctgcccatttaccggatgactagtcaagcgcttcttgacgaaactaaaaaggtagctatcccagtgttagcaacaaccctatctaaagattctgttgattacagagaactgccttctatagaaaattttgtactagttatgggaaatgagggtcaaggaattagtccccttatggctgaaagtgcagaccagttggtccatattagcatgaaggggcaggccgagagtttgaatgttgcggttgcagccggtattttaatcttccatttaagc

SEQ ID NO: 4110 - protein, 252 aa, Streptococcus pneumoniae
  SpoU rRNA Methylase family protein; Cellular location: membrane; Similar to strain R6 sequence 15903830 (e-132)
MCYNISMTIITSKANSVVKNTKKLHQKKYRKSAYLIEGWHLFEEAVQAGVTIEKIFTLENYRDQLATFSQTVWVSEDILLDLADSQTPQGIVAVVQKEEVGQADLSQGKFLFLEDVQDPGNVGTIIRTADAAGFTGVIVSDKSADIYSLKTLRSMQGSHFHLPIYRMTSQALLDETKKVAIPVLATTLSKDSVDYRELPSIENFVLVMGNEGQGISPLMAESADQLVHISMKGQAESLNVAVAAGILIFHLS

SEQ ID NO: 4111 - DNA, 276 bp, Streptococcus pneumoniae
atgcaaaaggttagaatgattgcccaaggtagggtgcagggagtcggctttcgttggggtgtttatagcctggcccttgaaatcggtggcatcacaggtcgggtatggaataacgacgatggcacagtggaaatcttagcccaagcagactcatcagctattatggcaaaatttatccaagaaatccgaaaaggaccgacacctttttcaaaagtcagttacttagatgtcaaactgagcaactttcctccctaccctgactttaaaatcgcaaat

SEQ ID NO: 4112 - protein, 92 aa, Streptococcus pneumoniae
  acylphosphatase; Cellular location: cytoplasm; Similar to strain R6 sequence 15903831 (5.E-49)
MQKVRMIAQGRVQGVGFRWGVYSLALEIGGITGRVWNNDDGTVEILAQADSSAIMAKFIQEIRKGPTPFSKVSYLDVKLSNFPPYPDFKIAN

SEQ ID NO: 4113 - DNA, 924 bp, Streptococcus pneumoniae
gtgaaatctattaaacgttttgcactctcggctatgggagtggctatgttgcttgtcttgactggctgtgtcaatgtcgataaaaccacaggtcagccaacaggatttatttggaatacgatcggagcgcctatggctgaagccatcaagtacttcgctactgataaaggtctaggctttggtgtcgctatcattatcgtaaccattatcgtacgcttgattatcttaccacttggtatctaccaatcatggaaggcaacgcttcactctgaaaagatgaacgccctcaagcacgtccttgagccacaccaaacgcgtctcaaagaagcgactactcaagaagaaaaactcgaagcccaacaagctctctttgctgctcaaaaagagcacggtatcagcatgtttggcggtgtaggatgtttccctatcctccttcaaatgcctttcttctctgctatctactttgctgcccaacatactgaaggggttgctcaagcaagctacctaggcattcctctaggttctccaagtatgattttggttgcctgtgctggtgtcctttactatcttcaatcgctcctttcacttcacggagtagaagatgaaatgcaaagagaacaaatcaagaaaatgatttacatgagcccactcatgatcgtcgtcttctccctcttctcaccagctagtgtcacactttactgggttgtcggtggtttcatgatgattctccaacagtttatcgtcaactatatcgttcgtccaaaacttcgcaaaaaagtccgtgaagaactagccaagaacccaccaaaagcaagtgctttctctaaaccaagtggacgaaaagacgttacccctgaacaaccaactgctatcacaagcaagaaaaaacacaaaaatcgcaacgctggaaaacaacgttcgaga

SEQ ID NO: 4114 - protein, 308 aa, Streptococcus pneumoniae
  stage III sporulation protein J (spoIIIJ); Cellular location: membrane; Similar to strain R6 sequence 15903832 (e-173)
MKSIKRFALSAMGVAMLLVLTGCVNVDKTTGQPTGFIWNTIGAPMAEAIKYFATDKGLGFGVAIIIVTIIVRLIILPLGIYQSWKATLHSEKMNALKHVLEPHQTRLKEATTQEEKLEAQQALFAAQKEHGISMFGGVGCFPILLQMPFFSAIYFAAQHTEGVAQASYLGIPLGSPSMILVACAGVLYYLQSLLSLHGVEDEMQREQIKKMIYMSPLMIVVFSLFSPASVTLYWVVGGFMMILQQFIVNYIVRPKLRKKVREELAKNPPKASAFSKPSGRKDVTPEQPTAITSKKKHKNRNAGKQRSR

SEQ ID NO: 4115 - DNA, 792 bp, Streptococcus pneumoniae
atgtctgaagaaacaattgattatggacaagtgacaggaatggtgcattcgacagaaagctttgggtcagtagatgggcctggtattcgctttattgtctttttgcagggctgtcacatgcgttgccagtattgccacaacccagacacttgggctatggagtccaataagtcacgtgaacggacggtagatgatgtcttgacagaggccttgcgctaccgtggtttctggggaaataagggtgggattacagtcagtggaggagaagctctcttgcagattgatttcctgattgctctcttcaccaaggctaaggaacaaggaatccactgtaccttggacacctgtgctcttcctttccgtaataaaccacgttaccttgagaagtttgacaaactcatggctgtcactgacttggttcttttggatatcaaggaaatcaacgaagaacagcacaagattgtcactagccaaaccaataaaaatatcttggcttgtgcccagtatctatcagatattggaaaacctgtctggattcgccacgtgctagttccaggattgacagacagagatgatgacttgattgaacttggtaagttcgtcaagaccctcaaaaatgttgataagtttgaaattctaccttatcacaccatgggtgagttcaagtggcgtgaacttggaattccatattccctcgaaggagtcaaaccaccaacagcagatcgcgtcaagaacgctaaacaactcatggataccgaaagttatcaagattatatgaaacgtgtacatgga

SEQ ID NO: 4116 - protein, 264 aa, Streptococcus pneumoniae
  pyruvate formate-lyase-activating enzyme (pflA); Cellular location: cytoplasm; Similar to strain R6 sequence 15903833 (e-157)
MSEETIDYGQVTGMVHSTESFGSVDGPGIRFIVFLQGCHMRCQYCHNPDTWAMESNKSRERTVDDVLTEALRYRGFWGNKGGITVSGGEALLQIDFLIALFTKAKEQGIHCTLDTCALPFRNKPRYLEKFDKLMAVTDLVLLDIKEINEEQHKIVTSQTNKNILACAQYLSDIGKPVWIRHVLVPGLTDRDDDLIELGKFVKTLKNVDKFEILPYHTMGEFKWRELGIPYSLEGVKPPTADRVKNAKQLMDTESYQDYMKRVHG

SEQ ID NO: 4117 - DNA, 102 bp, Streptococcus pneumoniae
ttgaaggaaaaacaagatttttgcctattttttagaaagcaatctgtttttcaatttcattttcaatctattatcagattattcttcaaaatcgaagccata

SEQ ID NO: 4118 - protein, 34 aa, Streptococcus pneumoniae
  hypothetical protein; Cellular location: cytoplasm
MKEKQDFCLFFRKQSVFQFHFQSIIRLFFKIEAI

SEQ ID NO: 4119 - DNA, 1248 bp, Streptococcus pneumoniae
atgaaaacaccatttatcaatagagaagagttagaagcgattgttgccgagttcccgactccctttcacttgtatgatgagaaggggattcgtgagaaggcaagagccgtcaaccaagctttttcgtggaacaagggctttaaggaatattttgcagttaaggctactccaactccagctattttgaaaattctccaagaagaaggttgtggtgtggactgctctagttatgtagagcttttgatgagccataaactggactttctgggttctgagattatgttctcttccaacaacacgccagacaaggaatacgcctatgcacgtgaattgggtgcgaccattaacttggatgcctttgaagatattgaacatctggagagagtagcaggcattccagaaatcatctcttgtcgttataatcctggaggcgtttttgaactggggacagacattatggacaatcctggggaggctaagtttggcatgaccaaggaccagctctttgaagcctttgctatcttgaaggaaaaaggagccaagacttttgggattcactccttcctagcgtccaataccgtgacccatctctattatccagagttggctcgtcagctctttgaactggctgttgaaatcaaggaaaagttgggcatttcgctagactttatcaatctttctggcggtattggtgttaattatcatccagaccaggagccgaacgatatcgccttgattggtgagggagttcgtaaggtgtatgaagaggttcttacgtcagcaggtcttggtcaggtcaagattttcaccgaattgggtcgttttatgctggcacctcacggtgctctagtcacaagagtcactcataagaaggaaacctaccgtacctatctaggtgtggatgcctcagcagtcaacctcatgcgtccagctatgtacggagcttaccatcatattagcaacgtgacccatccagatggaccagctgaagtggtagatgtggtcggttcactctgtgaaaacaatgataaatttgcagttaatcgcgaactgcctcatacagaaatcggtgatttgctggtcattcatgatacaggtgcccacggattttcaatgggctaccagtataatgccaaattacgttctgcggaaatcctctataccgaagaaggtaaagcccgtcaaatccgccgtgcagagcgccctgaggactattttgcaaccttatatggcttcgattttgaagaa

SEQ ID NO: 4120 - protein, 416 aa, Streptococcus pneumoniae
  diaminopimelate decarboxylase (lysA); Cellular location: cytoplasm; Similar to strain R6 sequence 15903834 (0.E+01)
MKTPFINREELEAIVAEFPTPFHLYDEKGIREKARAVNQAFSWNKGFKEYFAVKATPTPAILKILQEEGCGVDCSSYVELLMSHKLDFLGSEIMFSSNNTPDKEYAYARELGATINLDAFEDIEHLERVAGIPEIISCRYNPGGVFELGTDIMDNPGEAKFGMTKDQLFEAFAILKEKGAKTFGIHSFLASNTVTHLYYPELARQLFELAVEIKEKLGISLDFINLSGGIGVNYHPDQEPNDIALIGEGVRKVYEEVLTSAGLGQVKIFTELGRFMLAPHGALVTRVTHKKETYRTYLGVDASAVNLMRPAMYGAYHHISNVTHPDGPAEVVDVVGSLCENNDKFAVNRELPHTEIGDLLVIHDTGAHGFSMGYQYNAKLRSAEILYTEEGKARQIRRAERPEDYFATLYGFDFEE

SEQ ID NO: 4121 - DNA, 825 bp, Streptococcus pneumoniae
atgaaattaagaagaagtgatcggatggttgtcatttccaactatttgattaataatccttataaactaactagtctcaatacttttgctgaaaagtatgagtctgctaaatcatccatctcagaagatatcgtcattatcaaacgcgcctttgaggaaattgaaatcggtcatatccagacagtgactggggctggcggaggtgtcatcttcacaccgtctatttcgagtcaggatgctaaggaaatggttgaagacttgcgtaccaagttgtcagaaagtgaccgtatcttgccaggtggttatatctatctgtctgatttgcttagcacaccagccatcttgaaaaatattggtcgtattattgccaaaagctttatggaccaaaaaattgacgcggttatgaccgtagcaactaagggtgtgccacttgcaaatgcagttgccaatgtcctcaatgtctcttttgtcattgtgcgccgtgacctgaaaattaccgaaggttcaactgttagcgtcaactatgtttcaggttcaagtggtgaccgtatcgagaaaatgttcctttcaaaacgtagtcttaaggcaggcagccgtgtcttgattgtggatgacttcttgaaaggtggcggaacggtcaatggtatgattagtctcttgcgcgagttcgactcagaactggcaggtgtagcggtctttgcggacaatgcccaagaagaacgtgaaaagcagtttgactacaagtcactcttgaaggtaaccaatattgatgtcaagaaccaagccatcgatgttgaggttggcaatatctttgacgaagataaa

SEQ ID NO: 4122 - protein, 275 aa, Streptococcus pneumoniae
  pur operon repressor (purR); Cellular location: cytoplasm; Similar to strain R6 sequence 15903835 (e-150)
MKLRRSDRMVVISNYLINNPYKLTSLNTFAEKYESAKSSISEDIVIIKRAFEEIEIGHIQTVTGAGGGVIFTPSISSQDAKEMVEDLRTKLSESDRILPGGYIYLSDLLSTPAILKNIGRIIAKSFMDQKIDAVMTVATKGVPLANAVANVLNVSFVIVRRDLKITEGSTVSVNYVSGSSGDRIEKMFLSKRSLKAGSRVLIVDDFLKGGGTVNGMISLLREFDSELAGVAVFADNAQEEREKQFDYKSLLKVTNIDVKNQAIDVEVGNIFDEDK

SEQ ID NO: 4123 - DNA, 939 bp, Streptococcus pneumoniae
atgaagattagtcacatgaaaaaagatgagttatttgaaggcttttacctaatcaaatcagctgacctgaggcaaactcgagctgggaaaaactacctagcctttaccttccaagatgatagtggcgagattgatgggaagctctgggatgcccaacctcataacattgaggcctttaccgcaggtaaggttgtccacatgaaaggacgccgagaagtttataacaatacccctcaagtcaatcaaattactctccgcctgcctcaagctggtgaacccaatgacccagctgatttcaaggtcaagtcaccagttgatgtcaaggaaattcgtgactacatgtcgcaaatgattttcaaaattgaaaatcctgtctggcaacggattgtccgaaatctctacaccaagtatgataaggaattctactcctatccagctgccaagaccaaccaccatgcctttgaaacgggcttggcctatcatacggcgaccatggtgcgtttggcagacgctattagcgaagtttatcctcagctcaataagagcctgctctatgcggggattatgttgcatgacttagctaaggtcatcgagttgacggggccagaccagacagagtacacagtgcgaggtaatcttcttggacatatcgctctcattgatagcgaaattaccaagacagttatggaactcggcatcgatgataccaaggaagaagtcgttttgcttcgtcatgtcatcctcagtcaccacggcttgcttgagtatggaagcccagtccgtccacgcattatggaagcagagattatccatatgattgacaatctggatgcaagcatgatgatgatgtcaacagctcttgctttggtggataaaggagagatgaccaataaaatcttcgctatggataatcgttccttctataaaccagatttagat

SEQ ID NO: 4124 - protein, 313 aa, Streptococcus pneumoniae
  cmp-binding-factor 1 (cbf1); Cellular location: cytoplasm; Similar to strain R6 sequence 15903836 (e-179)
MKISHMKKDELFEGFYLIKSADLRQTRAGKNYLAFTFQDDSGEIDGKLWDAQPHNIEAFTAGKVVHMKGRREVYNNTPQVNQITLRLPQAGEPNDPADFKVKSPVDVKEIRDYMSQMIFKIENPVWQRIVRNLYTKYDKEFYSYPAAKTNHHAFETGLAYHTATMVRLADAISEVYPQLNKSLLYAGIMLHDLAKVIELTGPDQTEYTVRGNLLGHIALIDSEITKTVMELGIDDTKEEVVLLRHVILSHHGLLEYGSPVRPRIMEAEIIHMIDNLDASMMMMSTALALVDKGEMTNKIFAMDNRSFYKPDLD

SEQ ID NO: 4125 - DNA, 1254 bp, Streptococcus pneumoniae
atggaaagtttacttattctattattaattgccaatctagctggtctctttctgatttggcaaaggcaggataggcaggagaaacacttaagtaagagcttggaggatcaggcagatcatttgtcagaccagttggattaccgctttgaccaagccagacaagccagccagttagaccaaaaagatttggaagtggttgtcagcgaccgtttgcaagaagtgcggattgaattgcaccaaggtctgacccaagtccgtcaagaaatgacagataatctcctccaaactagagacaagacagaccaacgtctccaagccttgcaggaatcaaatgagcaacgtttggaacaaatgcgccagacggtcgaggaaaaactagaaaagaccttgcagacacgcttacaggcttcctttgagacagtttctaaacaactggagtctgtcaatcgtggccttggagaaatgcagacagttgcccgtgatgtcggagctcttaacaaggttctctctggaaccaagacgcgagggattctgggagaattgcaactggggcaaattattgaagacatcatgacacctgcccagtacgaacgagaatacgcaacggttgaaaactctagtgaacgagtggagtatgccatcaagttacccggacaaggcgaccaagaatacgtctatctgccaattgactctaagtttccactggcagattattaccgcttggaagaagcctatgagacaggtgacaaggatgagattgaacgctgtcgtaagtcactcctagcaagcgtcaagcgctttgctagggatattaggaacaagtacatagcaccacctcggacgaccaattttggagttttgtttgttccgacagaaggtctctactcagaaatcgtccgcaatccggtcttctttgatgatttgagacgggaagaacagattattgttgcaggaccaagtaccctatcagcccttcttaactccctatcagttggtttcaagacccttaatatccaaaagagtgccgaccatatcagcaagactcttgccagtgtcaagaccgagtttggcaagtttggtggtattctggtcaaggcacaaaaacatctccaacatgcctctggcaatattgatgaattattaaaccgtcgtaccatagctatcgagcggacgctccgtcacattgagttgtcagaaggtgagcctgcgcttgatctactccattttcaagaaaatgaggaagaatatgaagat

SEQ ID NO: 4126 - protein, 418 aa, Streptococcus pneumoniae
  competence-induced protein Ccs50 (ccs50); Cellular location: outside; Similar to strain R6 sequence 15903837 (0.E+01)
MESLLILLLIANLAGLFLIWQRQDRQEKHLSKSLEDQADHLSDQLDYRFDQARQASQLDQKDLEVVVSDRLQEVRIELHQGLTQVRQEMTDNLLQTRDKTDQRLQALQESNEQRLEQMRQTVEEKLEKTLQTRLQASFETVSKQLESVNRGLGEMQTVARDVGALNKVLSGTKTRGILGELQLGQIIEDIMTPAQYEREYATVENSSERVEYAIKLPGQGDQEYVYLPIDSKFPLADYYRLEEAYETGDKDEIERCRKSLLASVKRFARDIRNKYIAPPRTTNFGVLFVPTEGLYSEIVRNPVFFDDLRREEQIIVAGPSTLSALLNSLSVGFKTLNIQKSADHISKTLASVKTEFGKFGGILVKAQKHLQHASGNIDELLNRRTIAIERTLRHIELSEGEPALDLLHFQENEEEYED

SEQ ID NO: 4127 - DNA, 681 bp, Streptococcus pneumoniae
atgtctttaagggagaagtcaatgagcgagtacaaactctcagaaaacaactggactagggttgcagtttttgcaggcggaaaccgcggtcattatcggacagattttgatgcttttgttggggtggatcgaggctcgctctgggtcttggaagaagacttacctcttgctctagcagtcggagattttgattctgtgacggaagaagagcgacaggtgattcaaaaaggtgcccagtattttgtccaagcacgaccagaaaaggatgatacagatctggaattggctctcttaaccatctttgaacaaaatcctcaggctcaggtcactattttcggtgccttgggtggccgtattgaccatatgttggccaatgtctttctgcctagcaatcctaagttggcaccctatatgcatcaaatagaaattgaggatgggcaaaacttgattacttattgtccagaaggaatcagtcagctagaacctcgttcagactacgactatctagcctttatgccagttcgggatagccagctgactattcttggagccaagtatgagttgacagaggaaaattttttctttaaaaaagtgtacgcttctaacgaatatatagatagggaagtgtcggtaacttgcccagatggttatgtggtcgtactgcatagcaaggacaggagg

SEQ ID NO: 4128 - protein, 227 aa, Streptococcus pneumoniae
  conserved hypothetical protein; Cellular location: cytoplasm; Similar to strain R6 sequence 15903838 (e-127)
MSLREKSMSEYKLSENNWTRVAVFAGGNRGHYRTDFDAFVGVDRGSLWVLEEDLPLALAVGDFDSVTEEERQVIQKGAQYFVQARPEKDDTDLELALLTIFEQNPQAQVTIFGALGGRIDHMLANVFLPSNPKLAPYMHQIEIEDGQNLITYCPEGISQLEPRSDYDYLAFMPVRDSQLTILGAKYELTEENFFFKKVYASNEYIDREVSVTCPDGYVVVLHSKDRR

SEQ ID NO: 4129 - DNA, 654 bp, Streptococcus pneumoniae
atgtctcaatacaagattgctccgtcaattctggcagcagattatgccaactttgaacgtgaaatcaaacgtctagaagcaactggggcagaatatgcccatatcgatatcatggacagtcattttgtaccgcaaatcagttttggtgcaggtgtggtcgagagccttcgtcctcatagtaagatggttttcgattgccacttgatggtgtcaaaccctgagcatcatctggaagattttgcgcgtgcaggtgcagacatcatcagtatccatgtagaagcaacgcctcatattcatggcgccctccaaaaaattcgttcactcggagttaagccttcagtcgttatcaatcctggcacatcagttgaagccatcaagcacgtccttcatctagttgaccaagttttagtcatgacggttaatccaggttttggtgggcaagcctttctgccagaaaccatggataaggtccgtgagttggttgctcttcgtgaggaaaaaggtttgaactttgaaatcgaagtggatggtgggattgatgaccaaactattgctcaagccaaagaagccggtgcgactgtttttgtagcaggttcctatgtctttaagggagaagtcaatgagcgagtacaaactctcagaaaacaactggac

SEQ ID NO: 4130 - protein, 218 aa, Streptococcus pneumoniae
  ribulose-phosphate 3-epimerase (rpe); Cellular location: cytoplasm; Similar to strain R6 sequence 15903839 (e-122)
MSQYKIAPSILAADYANFEREIKRLEATGAEYAHIDIMDSHFVPQISFGAGVVESLRPHSKMVFDCHLMVSNPEHHLEDFARAGADIISIHVEATPHIHGALQKIRSLGVKPSVVINPGTSVEAIKHVLHLVDQVLVMTVNPGFGGQAFLPETMDKVRELVALREEKGLNFEIEVDGGIDDQTIAQAKEAGATVFVAGSYVFKGEVNERVQTLRKQLD

SEQ ID NO: 4131 - DNA, 876 bp, Streptococcus pneumoniae
atgcagggacaaatcattaaagccttggcaggtttctactatgtggagagtgatggccaggtttatcaaacacgcgcgcgtgggaatttccgtaaaaaaggccataccccttatgttggggactgggtagatttctctgccgaggaaaattcagaaggctatatcctcaaaattcacgaacggaaaaacagtctggttcgtccgcctattgtcaatatcgatcaagctgtagtaatcatgtccgtcaaggaacctgattttaacagcaatttgctggatcgtttcttggttcttttggagcacaagggcatccatcccattgtctatatttccaaaatggatttgttggaagataggggagaactggatttttaccagcagacctatggtgacatcggctatgactttgtgaccagtaaagaggaactcctgtctttgttaacaggcaaggttacggtctttatggggcagacaggtgttgggaagtcaactcttctcaataaaatcgcaccagacctcaatcttgaaacgggagaaatttcagacagtctaggtcgcggtcgccataccactcgagctgttagtttttacaatctcaacgggggtaaaatcgcagatacaccaggattttcatccttggactatgaagtatcaagggctgaagacctcaatcaggctttcccagagattgctactgttagccgagattgtaagttccgtacttgtacccatacccatgagccgtcttgtgccgtcaaaccagctgttgaagagggtgttattgcaaccttccgttttgacaattacctgcaattccttagtgaaattgaaaatcgtagagaaacctataaaaaagtcagcaaaaaaattccaaaa

SEQ ID NO: 4132 - protein, 292 aa, Streptococcus pneumoniae
  conserved hypothetical protein; Cellular location: cytoplasm; Similar to strain R6 sequence 15903840 (e-170)
MQGQIIKALAGFYYVESDGQVYQTRARGNFRKKGHTPYVGDWVDFSAEENSEGYILKIHERKNSLVRPPIVNIDQAVVIMSVKEPDFNSNLLDRFLVLLEHKGIHPIVYISKMDLLEDRGELDFYQQTYGDIGYDFVTSKEELLSLLTGKVTVFMGQTGVGKSTLLNKIAPDLNLETGEISDSLGRGRHTTRAVSFYNLNGGKIADTPGFSSLDYEVSRAEDLNQAFPEIATVSRDCKFRTCTHTHEPSCAVKPAVEEGVIATFRFDNYLQFLSEIENRRETYKKVSKKIPK

SEQ ID NO: 4133 - DNA, 870 bp, Streptococcus pneumoniae
atgagaattgcagattatagcgtgaccaaggcagtgctggagcgtcacggttttacctttaaaaagtcctttgggcaaaattttttgacggataccaatatccttcaaaaaattgtggatacggctgaaattgatgatcaggtcaatgtcatcgaaatcgggccaggtattggtgccttgacagaatttttggctgagcgtgcagcccaagtcatggcttttgagattgaccaccgtttggtgccaattttggcagataccctgcgtgattttgataatgtgaccgtagttaacgaagatattctcaaggttgatttggcgcaacatatccagaattttaaaaatcctgacctgccaatcaaggtagtggctaatttgccttactacatcacgacgcctattctcatgcacttgattgagagtggcattcctttttgtgagtttgtggtcatgatgcagaaagaagtagcggaccgcatttcagcccagcctaacaccaaggcttacggtagcttgtctatcgccgtgcagtattacatgacagccaaggttgcctttatcgtgcctcgtacggtctttgtgccagcgccaaatgtggattcagccatcttgaaaatggtgcgtcgtccagagccagccgtagcagtagaagatgagaactttttctttaaggtttccaaggctagttttacccatcgccgcaagaccttgtggaataacttgacaggttactttggtaagactgaagaggtcaaggacaagctgaccaaggctttggaccaggcaggcttgtcaccaagtgtgcgtggggaagctctcagcttggcagaatttgccggtctagcagacgcacttaaagggcaaggactc

SEQ ID NO: 4134 - protein, 290 aa, Streptococcus pneumoniae
  dimethyladenosine transferase (ksgA); Cellular location: cytoplasm; Similar to strain R6 sequence 15903841 (e-155)
MRIADYSVTKAVLERHGFTFKKSFGQNFLTDTNILQKIVDTAEIDDQVNVIEIGPGIGALTEFLAERAAQVMAFEIDHRLVPILADTLRDFDNVTVVNEDILKVDLAQHIQNFKNPDLPIKVVANLPYYITTPILMHLIESGIPFCEFVVMMQKEVADRISAQPNTKAYGSLSIAVQYYMTAKVAFIVPRTVFVPAPNVDSAILKMVRRPEPAVAVEDENFFFKVSKASFTHRRKTLWNNLTGYFGKTEEVKDKLTKALDQAGLSPSVRGEALSLAEFAGLADALKGQGL

SEQ ID NO: 4135 - DNA, 312 bp, Streptococcus pneumoniae
ttgctcatgtgtgaaaaaatccgtattcgcagggtatctgattatcctagtgccagaggtggtttagaagatatcctcatcatggaaaatatgaccaatcatctccttttggttcaaatccgagtgcatggctatttgcttgattttgctagtattgaagggcaaaggcaaaagcattatcgtttgaaaaatttacctcagacggttgaactgacagtggatgatgtggaggaggatgtggatttgaccctacctgaaaatcgaagttatcaagaagctgatttttttgaacgcatgtttcgagagaactgc

SEQ ID NO: 4136 - protein, 104 aa, Streptococcus pneumoniae
  hypothetical protein; Cellular location: cytoplasm; Similar to strain R6 sequence 15903842 (4.E-57)
MLMCEKIRIRRVSDYPSARGGLEDILIMENMTNHLLLVQIRVHGYLLDFASIEGQRQKHYRLKNLPQTVELTVDDVEEDVDLTLPENRSYQEADFFERMFRENC

SEQ ID NO: 4137 - DNA, 639 bp, Streptococcus pneumoniae
atgattgatattcaaggattggaaaagaaatttaatgaccgcgcgattttctctggtttgaatctcaagctggagaagggcaaggtttatgccttaatcggaaagagtggaagcggaaagacgacgctgctgaatatcttgggaaagctagaaaagatagatggtggaagggttctctatcaggggaaagatttaaaaaccattcccactcgtgagtattttcgagaccagatgggctatctctttcaaaatttcggcctcttagaaaaccaatcaatcaaagaaaatttggatttgggttttgttggtcagaaaatctcaaaagtagaacgtttggaaaggcaagtgggggctttagaaaaagttaatctagggtatttggatttagaacaaaaaatctatactttatctgggggagaggcccaacgagttgcccttgctaagactattttgaaaaatccacccttgattttggcagatgaaccaacagcagctcttgatcctgaaaattcagaggaggttatgaatctcttggtggatttgaaagatgaaaatcgaattatcatcattgcgacccataatcccctagtctggaataaggctgatgaaatcattgatatgaggaaacttgctcatgtg

SEQ ID NO: 4138 - protein, 213 aa, Streptococcus pneumoniae
  ABC transporter, ATP-binding protein; Cellular location: cytoplasm; Similar to strain R6 sequence 15903843 (e-118)
MIDIQGLEKKFNDRAIFSGLNLKLEKGKVYALIGKSGSGKTTLLNILGKLEKIDGGRVLYQGKDLKTIPTREYFRDQMGYLFQNFGLLENQSIKENLDLGFVGQKISKVERLERQVGALEKVNLGYLDLEQKIYTLSGGEAQRVALAKTILKNPPLILADEPTAALDPENSEEVMNLLVDLKDENRIIIIATHNPLVWNKADEIIDMRKLAHV

SEQ ID NO: 4139 - DNA, 2031 bp, Streptococcus pneumoniae
atgatgaaacgtttatttattttgatttcaatggtattagtatcgctttatatggtgataacttccgttgaccatcgagaagagattttatttggtaactatccttctgttgatgtgacaggaatgatgataaatcaaccagtagctagtcgcgaagaggtgacagaggctttgagtcacttggcggtagagcacaatagtctcattgctcgtcgaatcgttgagccaaatgaagctggagaaacacgctttacctatgccacttatggtgagggaaagcttccagaaggtctgaccatttcctccaaggagagtgcagaaacgagtgatttattagggtcttacttgattgtatcaggaagtttggatggagtgagcttacagaccaccttgaaagagcttggttatcaaggctttgtttcgaatggagaagatccattttcgatagtcttactattgacggccacccctatggtgctactgagtttagctatttttctgctgacctttatgagtctgaccctgatttatcggatcaaatcccttcgtcaggcagggattcgcttaatagctggtgagagcttgtttggagttgctctcagaccagtgttagaagatgtgagacagcttatctgctcagtgctggtatccagtcttttgggattggggattctctggtatcaaggtgccttgtttatggcaacggtgcaactggtcatcattgctcttctactttatggattgaccttggcagggatttctaccttactaagtgtcgtctatctacttggtttacaggaaaatagtctggtggatctattgaaagggaaactccctctcaaacgtatgatgacattgatgatggtggggcaactcttagctgtattggtggtcggatcgagtgcgacagctctcctaccccactaccgtgaaatgcaggaaatggagagagctagcaataaatggagccagtcctcagaccgttaccgtctatcctttggttggtctagtgcatttgccgatgaagaaggaacgcgtaaggataatcgtgagtggcagacatttactgaagaacggttagccaatacagactctttttatattatgagcaatgttgacaatttctcagatggagcagaagtggacctagatggcaatcgtctcagtgactacacaccgtcagggaatgttatctatgtctcaccgcgctatctgatagaagaaaagattaccgtttcttcagagtttatggacaagatgcaaaacttgtctgagggagagtttgggctgatcttgcctgagagcttgcgagagcagtctgtctactaccaaggattgtttacagattacctgcaaaacttttcatctgaaagtgtagaagtgacgagtcagaaacactacctcccacaggtaaggctagcttttacagaaacaggacaggaacgtttcctctataatgatgggtacaagacaacacgccagtacctaaaagatccgattattgtagttctaacgccgcaagcgactggaacaagacctgttgcagggatgttgtggggaactacggctaatagtgccttgaaactagatcgatatggagacagcatcacagctctaaaagagaaaggtctgtatcacaaggtttcttacttggtaaaaagccagctattttttgccaaggtactaaatgacaaacgggtggagttttactctctccttattgggacgattttgaccctgtctacggctatcttgttatttgattccatgaatcttctctattttgagcagttcagacgggaacttatgattaaacgtcttgctggtatgacaatctatgagcttcatggcaagtatttactggcgcaaggaggagttctcttgcttggcctagtcctatctagtattttgacaagagatggtttgattagcgctctagttgtagctttgtttacgcttaacgccctcttgattttagtaaggcaggacaaaaaagaagaagctggtagcatggcagtattgaaaggaaaa

SEQ ID NO: 4140 - protein, 677 aa, Streptococcus pneumoniae
  immunity protein, putative; Cellular location: membrane; Similar to strain R6 sequence 15903844 (0.E+01)
MMKRLFILISMVLVSLYMVITSVDHREEILFGNYPSVDVTGMMINQPVASREEVTEALSHLAVEHNSLIARRIVEPNEAGETRFTYATYGEGKLPEGLTISSKESAETSDLLGSYLIVSGSLDGVSLQTTLKELGYQGFVSNGEDPFSIVLLLTATPMVLLSLAIFLLTFMSLTLIYRIKSLRQAGIRLIAGESLFGVALRPVLEDVRQLICSVLVSSLLGLGILWYQGALFMATVQLVIIALLLYGLTLAGISTLLSVVYLLGLQENSLVDLLKGKLPLKRMMTLMMVGQLLAVLVVGSSATALLPHYREMQEMERASNKWSQSSDRYRLSFGWSSAFADEEGTRKDNREWQTFTEERLANTDSFYIMSNVDNFSDGAEVDLDGNRLSDYTPSGNVIYVSPRYLIEEKITVSSEFMDKMQNLSEGEFGLILPESLREQSVYYQGLFTDYLQNFSSESVEVTSQKHYLPQVRLAFTETGQERFLYNDGYKTTRQYLKDPIIVVLTPQATGTRPVAGMLWGTTANSALKLDRYGDSITALKEKGLYHKVSYLVKSQLFFAKVLNDKRVEFYSLLIGTILTLSTAILLFDSMNLLYFEQFRRELMIKRLAGMTIYELHGKYLLAQGGVLLLGLVLSSILTRDGLISALVVALFTLNALLILVRQDKKEEAGSMAVLKGK

SEQ ID NO: 4141 - DNA, 897 bp, Streptococcus pneumoniae
atgttaattggtcaaaaaattaaagagattcggatagaaaaaggaattagtcgtccagatttttgtggagatgagcaagaactgacagttcgtcaactgtcgcgaattgaaagtggagcttcgcaaccgagtttgcccaagttagactatattgctcgccggctaggagttccagtttatagccttatgccggatttttcagctcttccttctgcttatttagaattgaaataccagattttacgtgaaccaatctatggtaaagaagaggagtacgataagaaggaagcgtgtttggaagagatttataaaacatactttgataatcttcctaaagaagaacaattagcatgtgaagtattgcaggcgtgtttggatacttctagaactagaaggcctgaatatgcagagttaatacttgaggaacatatgcctcagattatagaaaaagaagcttattcaataaatgatatgttgttgattcgtttgtttttttatcaaatgctcattagaaaagatcttgccaaatttataaatcaaatcgaaaagctaatgctctttcttttggaacagaagaaggtaactcaaatagagaattactttataattagagatactcttatttcaggaatgtgttgtcttgaaaaggtaggagtaactgattgttttaatgattatctatcgtgtttacaagaaattatggataaaactcaagattatcaaaagaaacctcttgtatttatgtttttgtggaagcaagcattaagagaagaaagagattttagtttagctgaatcattttatcagtcttctaaaacatttgcgcagctaattggagatgaatttctagtaaagaaattgacagaggaatggcaagaggatgtcaaaaaatattta

SEQ ID NO: 4142 - protein, 299 aa, Streptococcus pneumoniae
  transcriptional regulator PlcR, putative; Cellular location: cytoplasm; Similar to strain R6 sequence 15903845 (e-168)
MLIGQKIKEIRIEKGISRPDFCGDEQELTVRQLSRIESGASQPSLPKLDYIARRLGVPVYSLMPDFSALPSAYLELKYQILREPIYGKEEEYDKKEACLEEIYKTYFDNLPKEEQLACEVLQACLDTSRTRRPEYAELILEEHMPQIIEKEAYSINDMLLIRLFFYQMLIRKDLAKFINQIEKLMLFLLEQKKVTQIENYFIIRDTLISGMCCLEKVGVTDCFNDYLSCLQEIMDKTQDYQKKPLVFMFLWKQALREERDFSLAESFYQSSKTFAQLIGDEFLVKKLTEEWQEDVKKYL

SEQ ID NO: 4143 - DNA, 558 bp, Streptococcus pneumoniae
atgaaagagaaaatttctcaagttatcgtggttgaagggcgtgatgatacggtcaatctcaaacgttatttcgatgtggagacctatgagactcgaggttctgccatcaatgctcaggatatagagcggattcagcgcctgcaccaacgtcatggagtcattgtctttacagacccagattttaatggggaacggattcggcgcatgatcatgatggtcattccaacagttcagcatgcctttctcaagcgagatgaagctgttcccaagtccaagaccaaggggcgttctctgggaattgagcatgccagctatgaagacctgaaaacggctctagctcaagtgacagaacaatttgaacatgagagtcagtttgacattagtcgtagcgatttgattcgccttggttttctagcaggggcagacagccgtaagcgtagagaatatctcggagagactctccgaatcggctattccaacggcaagcaactcctcaaacgcctagagttgtttggggttactttggcagaagtggaagaagctatgaaatcttatgag

SEQ ID NO: 4144 - protein, 186 aa, Streptococcus pneumoniae
  primase-related protein; Cellular location: cytoplasm; Similar to strain R6 sequence 15903846 (e-100)
MKEKISQVIVVEGRDDTVNLKRYFDVETYETRGSAINAQDIERIQRLHQRHGVIVFTDPDFNGERIRRMIMMVIPTVQHAFLKRDEAVPKSKTKGRSLGIEHASYEDLKTALAQVTEQFEHESQFDISRSDLIRLGFLAGADSRKRREYLGETLRIGYSNGKQLLKRLELFGVTLAEVEEAMKSYE

SEQ ID NO: 4145 - DNA, 771 bp, Streptococcus pneumoniae
atgatttttgatacacatacacacttgaatgtagaagaatttgcaggtcgtgaggcagaagaaattgccttggctgctgagatgggtgtgacacagatgaatattgttggttttgataaaccgacgattgagcatgccttggagttggtagatgagtatgagcagctctatgcgactattggttggcatcctacagaagctggtacttatacagaggaagttgaggcttacttgttggataagttaaaacattccaaggttgtggctttaggtgaaattggcttagattaccattggatgacagcgcccaaagaggtgcaggagcaggtttttcgccgtcagattcagctatctaaggacttggatttgccttttgttgtccatacccgtgatgcgctggaagatacctatgagattatcaagagtgagggcgttggtcctcgtggtggtatcatgcattcattttcagggacgcttgagtgggcagagaagtttgtggatcttggtatgaccatttccttctcaggagtggtgacttttaagaaggcaactgacctccaagaagcagctaaagagttacctttggacaagatgttggtggaaacagatgcgccttacttagcacctgtacccaagcgtggtcgtgaaaataaaacagcctatactcgctatgtggtcgactttatcgctgacttgcgtggtatgacgacagaagagctggcggtagcaacgactgcaaatgcagaacgaatttttggactggacagcaag

SEQ ID NO: 4146 - protein, 257 aa, Streptococcus pneumoniae
  hydrolase, putative; Cellular location: cytoplasm; Similar to strain R6 sequence 15903847 (e-147)
MIFDTHTHLNVEEFAGREAEEIALAAEMGVTQMNIVGFDKPTIEHALELVDEYEQLYATIGWHPTEAGTYTEEVEAYLLDKLKHSKVVALGEIGLDYHWMTAPKEVQEQVFRRQIQLSKDLDLPFVVHTRDALEDTYEIIKSEGVGPRGGIMHSFSGTLEWAEKFVDLGMTISFSGVVTFKKATDLQEAAKELPLDKMLVETDAPYLAPVPKRGRENKTAYTRYVVDFIADLRGMTTEELAVATTANAERIFGLDSK

SEQ ID NO: 4147 - DNA, 891 bp, Streptococcus pneumoniae
ttggtagcacaagatccaaaagcacaagatagcactaaactgactgctgaaaaatcaactgttaaagcacctgctcaaagagtagatgtaaaagatataactcatttaacagatgaagaaaaagttaaggttgctattttacaagcaaatggttcagcattagacggagcgacaatcaatgtagctggagatggtacagcaacaatcacattcccagatggttcagtagtgacgattctaggaaaagatacagttcaacaatctgcgaaaggtgaatctgtaactcaagaagctacaccagagtataagctagaaaatacaccaggtggagataagggaggcaatactggaagctcagatgctaatgcgaatgaaggcggtggtagccaggcgggtggatcagctcacacaggttcacaaaactcagctcaatcacaagcttctaagcaattagctactgaaaaagaatcagctaaaaatgccattgaaaaagcagccaaggacaagcaggatgaaatcaaaggcgcaccgctttctgataaagaaaaagcagaacttttagcaagagtggaagcagaaaaacaagcagctctcaaagagattgaaaatgcgaaaactatggaagatgtgaaggaagcagaaacgattggagtgcaagccattgccatggttacagttcctaagagaccagtggctcctaatgctgctcctaagacaacaagtgcaccgcaagcaactgcaggaacaatgcaagatgttacctaccagtcacctgctggcaaacaattacctaacacaggttcagcatcaagtgcagcacttgctagtcttggtctagtggtggcaacaagtggttttgctttgctaggaagaaagactagacgtagaaaa

SEQ ID NO: 4148 - protein, 297 aa, Streptococcus pneumoniae
  cell wall surface anchor family protein; Cellular location: Peptidoglycan-bound (LPXTG); Similar to strain R6 sequence 15903848 (e-119)
MVAQDPKAQDSTKLTAEKSTVKAPAQRVDVKDITHLTDEEKVKVAILQANGSALDGATINVAGDGTATITFPDGSVVTILGKDTVQQSAKGESVTQEATPEYKLENTPGGDKGGNTGSSDANANEGGGSQAGGSAHTGSQNSAQSQASKQLATEKESAKNAIEKAAKDKQDEIKGAPLSDKEKAELLARVEAEKQAALKEIENAKTMEDVKEAETIGVQAIAMVTVPKRPVAPNAAPKTTSAPQATAGTMQDVTYQSPAGKQLPNTGSASSAALASLGLVVATSGFALLGRKTRRRK

SEQ ID NO: 4149 - DNA, 132 bp, Streptococcus pneumoniae
gtgaaacgtacttatcaaccaagtaaacttcgtcgtgcgcgcaaacacggattccgtaaccgtatgtcaactaaaaatggtcgtcgcgtattggcagctcgtcgtcgtaaaggacgcaaagttttggctgca

SEQ ID NO: 4150 - protein, 44 aa, Streptococcus pneumoniae
  ribosomal protein L34 (rpmH); Cellular location: cytoplasm; Similar to strain R6 sequence 15903849 (1.E-20)
MKRTYQPSKLRRARKHGFRNRMSTKNGRRVLAARRRKGRKVLAA

SEQ ID NO: 4151 - DNA, 1212 bp, Streptococcus pneumoniae
atgaaagaatataacaagtctagtaagttagagcatgttgcttatgatatccgtggtcctgtattggaagaagccatgcggatgcgagcgaatggagaaaagattttacgtctgaatacaggaaatccagcagaatttggctttacagcgccagacgaggtcattcatgacttgattatgaatgcgcgtgatagtgaaggctattctgactccaaagggattttctcagcccgtaaggccatcatgcagtattgccagctgaagaaattcccaaacgtagatactgatgatatttaccttggaaatggtgtcagtgagttgattgtcatgtccatgcaggggcttttggacaatggggatgaggtcttagtgccaatgccagactatcctctatggacggcggctgtcagcctagctggaggaaatgccgttcactatatctgtgatgaagctgtggaatggtacccagatattgacgatatcaagtcaaaaatcacttccaataccaaggcaattgtccttatcaatccaaataacccaactggagccctttatcctaaggaactcttgctggagattattgagattgcccgtcaaaacgatttgattatctttgcggatgaaatctatgaccgcatggtaatggacggacatgtgcatacgcctgtggcgagcttggcaccagatgtcttctgtgtcagcatgaatggtctgtcaaaatcccaccgcatagcaggtttccgtgtgggttggatggtcttgtctggccctaagactcatgttaagggctatatcgaagggctcaatatgctgtccaatatgcgcctttgctctaacgttttggcccaacaagtcgtacaaacttccttggggggtcaccaatcagtcgatgaattgcttcttcctggtggacgaatctacgagcaaagaaatttcatctataatgccattcaagatattccaggtttgtctgccgttaaacccaaggcggggctctatatcttcccaaaaatcgaccgcaatatgtaccgtatcgatgatgatgagcagtttgtccttgatttcttgaagcaggaaaaggttctcttggttcatggtcgaggctttaactggcaggaaccagaccacttccgtatcgtttaccttcctcgtgttgatgagttagcccaaatccaagaaaagatgactcgtttcttgaaacagtatcgtaga

SEQ ID NO: 4152 - protein, 404 aa, Streptococcus pneumoniae
  aminotransferase, class I; Cellular location: cytoplasm; Similar to strain R6 sequence 15903850 (0.E+01)
MKEYNKSSKLEHVAYDIRGPVLEEAMRMRANGEKILRLNTGNPAEFGFTAPDEVIHDLIMNARDSEGYSDSKGIFSARKAIMQYCQLKKFPNVDTDDIYLGNGVSELIVMSMQGLLDNGDEVLVPMPDYPLWTAAVSLAGGNAVHYICDEAVEWYPDIDDIKSKITSNTKAIVLINPNNPTGALYPKELLLEIIEIARQNDLIIFADEIYDRMVMDGHVHTPVASLAPDVFCVSMNGLSKSHRIAGFRVGWMVLSGPKTHVKGYIEGLNMLSNMRLCSNVLAQQVVQTSLGGHQSVDELLLPGGRIYEQRNFIYNAIQDIPGLSAVKPKAGLYIFPKIDRNMYRIDDDEQFVLDFLKQEKVLLVHGRGFNWQEPDHFRIVYLPRVDELAQIQEKMTRFLKQYRR

SEQ ID NO: 4153 - DNA, 408 bp, Streptococcus pneumoniae
atgatgaaaaactcttttcaaaaatcaaatttcctttattatggaattatcctagtttcagtcttggtagaagtgatcatgatctgtcaattagagagtctggtaccgcttctttatccaagttttattggatttttagtttttcatgtactctaccatctaatcttatttctagttgcaaaacgaagtgggcgttgggattacttgatgatatgggggcttttcctcatgtttaatcttctttatgactcctttctaggcttgcttttttctaggtttatcttttggtatgtgatgtgtctttgcaaaatacctgctatctctacgttcttaacctcgcctttagcaaggtttttcttctatacgaaactagtaacacatttcagtaaacttgtcgcattctctttc

SEQ ID NO: 4154 - protein, 136 aa, Streptococcus pneumoniae
  conserved hypothetical protein; Cellular location: membrane; Similar to strain R6 sequence 15903851 (3.E-48)
MMKNSFQKSNFLYYGIILVSVLVEVIMICQLESLVPLLYPSFIGFLVFHVLYHLILFLVAKRSGRWDYLMIWGLFLMFNLLYDSFLGLLFSRFIFWYVMCLCKIPAISTFLTSPLARFFFYTKLVTHFSKLVAFSF

SEQ ID NO: 4155 - DNA, 450 bp, Streptococcus pneumoniae
atggcacaacgttaccaaaatatcatggtcgcaatcgatggttctaaggaagcggacttggcttttgtcaagggagttcattctgctctacgaaacgacgctaaactcaccatcgcacatgtcattgacacacgcgctctccaaagcgtatccacctttgatgctgaagtttacgaagaactccaagtcgacgctgaaagtctgatgaaagagtacgaaaaacgtgctaaagatgctggggtagcagatgttcatatcgtcattgaaatgggaaatccaaagaccctgctagcacgtactattccagatgccgaggaagtggacctcatcctcgttggcgcaactggtctcaacgcctttgaacgcctcttggtcggctcttcatctgaatacatactccgccatgctaaggtcgatttgctggttgtgagagaacaagaaaaaacctta

SEQ ID NO: 4156 - protein, 150 aa, Streptococcus pneumoniae
  universal stress protein family; Cellular location: cytoplasm; Similar to strain R6 sequence 15903852 (1.E-78)
MAQRYQNIMVAIDGSKEADLAFVKGVHSALRNDAKLTIAHVIDTRALQSVSTFDAEVYEELQVDAESLMKEYEKRAKDAGVADVHIVIEMGNPKTLLARTIPDAEEVDLILVGATGLNAFERLLVGSSSEYILRHAKVDLLVVREQEKTL

SEQ ID NO: 4157 - DNA, 1416 bp, Streptococcus pneumoniae
ttgtatcacaaaaggggagattgggataggatggaagtcaaagctgttttttttgatatcgatggaaccttggtcaacaatcgcaagagtgttttgaaatccactaaggatgcgattaagattgtcaaagaacaaggggtactagttggcgtagcgacagggcgaggacctttttttgttaaggaattgatggacgatttggatctggattttgcggtaacctataatggccagtatatctttagtaaagacagagtcttgttcacgagccctatttccaagttacatttgcgccatctaattagctatgctaaaaaagagggcacggagattgctctagggaccaaggatgccatgttgggttctaaaatcatgtcctttggtctgggttctttttcccaacgaattagtcgcttcgttccctctgttttaactcggacggtgagtcagtcttttaatcgcatggtcagcaaggttgttccccaaaaggaagaggacctgcttcacctgatgaatcagcctatctaccaagttttgatgctgatgacaccagaagaatctgagaaggcggcagctgattttgaagacttgaaattgacacgtagcaatccttttgcatcggatgtcatcaatcagggaaattctaaattagaaggcattcgccgagttgggaaagaatatggctttgacctcaaccaagtcatggcttttggtgactcagataatgatcttgaaatgctggctggcgttggtatgtcggtcgctatgggaaatggtagtagcagtgtcaaggaagctgccaagcacattaccactagcaatcaacaagatggaatccacaaggccttggaacattttggtgttttgtcttcagaaaaagtctttgtcagccgtgactatcatttcaataaggtcaagaccttccaccacatgatggatgaacgaacccaagaagaacctcgagcttgggatttagagggtgcaacccatagggctggttttaaaatagaagaattggtggagtttgttcgagcagccagtccttctgaagaagattttggtcaagctgtatcgcaacttcatcaggcccttgataaggcagcagataaagtagccaagaagacacctgctcagcaagatttgatagggcaagtggatgccttgattgacacgctttacttcacctacggcagttttgtcttgatgggggtggacccagaacgtatttttgatattgtccatcaggccaatatggggaaaatttttccagatggcaaggctcattttgatccagtgacccataaaatcttaaaaccagataattgggaagaaaaatatgctccagaacctgctattaaaaaggaactgcagcgccagctcaaggcttacgaacgccataaagagagaaataaatcg

SEQ ID NO: 4158 - protein, 472 aa, Streptococcus pneumoniae
  Cof family protein; Cellular location: cytoplasm; Similar to strain R6 sequence 15903853 (0.E+01)
MYHKRGDWDRMEVKAVFFDIDGTLVNNRKSVLKSTKDAIKIVKEQGVLVGVATGRGPFFVKELMDDLDLDFAVTYNGQYIFSKDRVLFTSPISKLHLRHLISYAKKEGTEIALGTKDAMLGSKIMSFGLGSFSQRISRFVPSVLTRTVSQSFNRMVSKVVPQKEEDLLHLMNQPIYQVLMLMTPEESEKAAADFEDLKLTRSNPFASDVINQGNSKLEGIRRVGKEYGFDLNQVMAFGDSDNDLEMLAGVGMSVAMGNGSSSVKEAAKHITTSNQQDGIHKALEHFGVLSSEKVFVSRDYHFNKVKTFHHMMDERTQEEPRAWDLEGATHRAGFKIEELVEFVRAASPSEEDFGQAVSQLHQALDKAADKVAKKTPAQQDLIGQVDALIDTLYFTYGSFVLMGVDPERIFDIVHQANMGKIFPDGKAHFDPVTHKILKPDNWEEKYAPEPAIKKELQRQLKAYERHKERNKS

SEQ ID NO: 4159 - DNA, 960 bp, Streptococcus pneumoniae
atgcctaagaaaatccttgttttacatacgggtggaactatttccatgcaggccgatgcttctggcgctgttgtgacgagttcagataatcccatgaaccatgtgtccaacccacttgaaggaatccaagtccacgccttggacttttttaaccttccaagtccccatatcaaacccaaacatatgctggtcctctaccagaaaattaaagaggaagcagataactacgatggagtggtgatcacacacggaaccgatactttagaggaaacagcctatttccttgataccatggaagttccccatatgcctatcgttctaacaggagccatgcgtagctccaatgagctcggtagtgatggtgtttataattacctaagtgctttacgagtggccagcgatgacagggctgctgacaaaggagttttggtcgttatgaacgatgaaatccacgctgccaagtatgtcaccaaaacacatacgactaatgtcagcaccttccagactccaacacatggcccccttggtctcatcatgaaacaggaaatcctctacttcaaaacagctgaacctcgtgttcgctttgaccttgatcacatacaaggtttagtccctatcatctcggcttatgctggtatgacagatgagctgattgatatgctggatttagaacacttggacggtttgattatccaagccttcggagctggtaatattcccaaagaaacggctcaaaaattagaaagccttctgcaaaaaggaattccagtcgctctggtatcacgatgctttaacggtattgccgagcctgtttatgcataccagggtgggggcgtacagttgcaaaaagcaggcgttttctttgttaaagaactcaacgcccaaaaagctcgcttgaaactcctcatcgccctcaatgccggactaacaggacaggctttgaaagactatatggaaggc

SEQ ID NO: 4160 - protein, 320 aa, Streptococcus pneumoniae
  L-asparaginase, putative; Cellular location: cytoplasm; Similar to strain R6 sequence 15903854 (0.E+01)
MPKKILVLHTGGTISMQADASGAVVTSSDNPMNHVSNPLEGIQVHALDFFNLPSPHIKPKHMLVLYQKIKEEADNYDGVVITHGTDTLEETAYFLDTMEVPHMPIVLTGAMRSSNELGSDGVYNYLSALRVASDDRAADKGVLVVMNDEIHAAKYVTKTHTTNVSTFQTPTHGPLGLIMKQEILYFKTAEPRVRFDLDHIQGLVPIISAYAGMTDELIDMLDLEHLDGLIIQAFGAGNIPKETAQKLESLLQKGIPVALVSRCFNGIAEPVYAYQGGGVQLQKAGVFFVKELNAQKARLKLLIALNAGLTGQALKDYMEG

SEQ ID NO: 4161 - DNA, 561 bp, Streptococcus pneumoniae
atgaataccatagagcggactaggcggctgattaaaggctgcgcaacacactgttttgaggttgtagatagaactgacgaagtcagctcaaagcactgctttgaggttgcagatagaactgacgaagtcagctcaaaacatgtttttgaggttgtagatgaaactaacgaagtcagctcaaaacatgtttttgaggttgtagatgaaactaacgaagtcagctcaaaacatgtttttgaggttgtagatagaactgacgaagtcagctcaaaacatgtttttgaggttgtagatagaactgacgaagtcagctcaaaacatgtttttgaggttgtagatagaactgacgaagtcagctcaaaacatgtttttgaggttgtagatagaactgacgaagtcagctcaaaacatgtttttgaggttgtagatagaactgacgaagtcagctcaaaacatgtttttgaggttgtagatagaactgacgaagtcagctcaaaacatgtttttgaggttgtagatgaaactgacgaagtcagtaaccatacatacggtaaggcgacg

SEQ ID NO: 4162 - protein, 187 aa, Streptococcus pneumoniae
  box element
MNTIERTRRLIKGCATHCFEVVDRTDEVSSKHCFEVADRTDEVSSKHVFEVVDETNEVSSKHVFEVVDETNEVSSKHVFEVVDRTDEVSSKHVFEVVDRTDEVSSKHVFEVVDRTDEVSSKHVFEVVDRTDEVSSKHVFEVVDRTDEVSSKHVFEVVDRTDEVSSKHVFEVVDETDEVSNHTYGKAT

SEQ ID NO: 4163 - DNA, 1038 bp, Streptococcus pneumoniae
atgtgtgagatagaaaggacaggaaaaggaatgaatgcagatgatacagtaaccatttatgatgtcgctcgtgaagcaggtgtttccatggcgacggtcagccgtgtggtcaatggcaataaaaatgtaaaagagaatacccgtaaaaaagtgctagaggtaattgatcgtttggattatcgtccaaatgcagttgcgcgtggtcttgcaagtaaaaagacaaccactgtcggtgtcgtgattccaaatattaccaatggttatttttcgagtttggctaaggggattgatgatattgcagaaatgtacaagtacaatattgtcctagctaatagcgatgaagataacgagaaagaagtttctgttgtcaataccctcttttcaaagcaggtagatggcattatctatatggggtatcacttgacagataaaattcgctcagaattttcgcgttcacgtactccgattgttctcgcaggaactgtcgatgttgagcaccagttgccaagtgtcaatattgactataagcaagcaacaattgatgcagtgagttaccttgctaaagaaaatgagcgtattgctttcgttagcggtccgctagtggatgacatcaatggtaaggttcgtttagttggctacaaggaaaccttgaaaaaagcaggaatcacttatagtgagggtttggtatttgaatctaaatatagctatgatgatggttacgccttagcagagcgtttgatttcatcaaatgcaactgcagcagttgtgacaggtgatgagttggcagcaggagtcttgaacggtttggctgataagggtgtttctgtgccagaagattttgaaattattactagtgatgattcacaaatctcacgctttacccgtccaaacttgacaacgattgcccaacctctttatgaccttggtgccattagtatgcgtatgttgaccaagattatgcataaggaagagttggaagaacgtgaagttctcttacctcatggtttgacagaacgtagctcaacacgaaaacgtaaa

SEQ ID NO: 4164 - protein, 346 aa, Streptococcus pneumoniae
  catabolite control protein A (ccpA); Cellular location: cytoplasm; Similar to strain R6 sequence 15903855 (0.E+01)
MCEIERTGKGMNADDTVTIYDVAREAGVSMATVSRVVNGNKNVKENTRKKVLEVIDRLDYRPNAVARGLASKKTTTVGVVIPNITNGYFSSLAKGIDDIAEMYKYNIVLANSDEDNEKEVSVVNTLFSKQVDGIIYMGYHLTDKIRSEFSRSRTPIVLAGTVDVEHQLPSVNIDYKQATIDAVSYLAKENERIAFVSGPLVDDINGKVRLVGYKETLKKAGITYSEGLVFESKYSYDDGYALAERLISSNATAAVVTGDELAAGVLNGLADKGVSVPEDFEIITSDDSQISRFTRPNLTTIAQPLYDLGAISMRMLTKIMHKEELEEREVLLPHGLTERSSTRKRK

SEQ ID NO: 4165 - DNA, 597 bp, Streptococcus pneumoniae
atgaaagtattagtcgcagaagatcaaagtatgttgcgagatgccatgtgccagttgctcatgcttcaaccggatgtagagtctgtctttcaagccaagaatgggcaagaagcaatccaactattagaaaaggagtctgtagatatcgccatccttgacgtagaaatgcctgttaagacaggtcttgaagtcttggagtggatacgagcagaaaagcttgaaacaaaggtggttgtggtgacgaccttcaagcgtcctgggtattttgaacgtgcggtcaaggctggagtagatgcttatgtattaaaagaaagaaacattgcagacctcatgcaaaccttgcacaccgtcctcgaaggacgcaaggagtattcgcctgaattgatggaagtggtgatgatgcatcccaatccattaacggagcaagaaatcgcagttttaaagggaattgctcagggcttctctaaccaagaaattgcagacaaactttatctatccaacggaacagtccgaaactatgtcaccaatattctttcgaaactagatgcaggtaatcgaacagaggcagctaatatcgcgaaagaatctggttggtta

SEQ ID NO: 4166 - protein, 199 aa, Streptococcus pneumoniae
  DNA-binding response regulator; Cellular location: cytoplasm; Similar to strain R6 sequence 15903856 (e-102)
MKVLVAEDQSMLRDAMCQLLMLQPDVESVFQAKNGQEAIQLLEKESVDIAILDVEMPVKTGLEVLEWIRAEKLETKVVVVTTFKRPGYFERAVKAGVDAYVLKERNIADLMQTLHTVLEGRKEYSPELMEVVMMHPNPLTEQEIAVLKGIAQGFSNQEIADKLYLSNGTVRNYVTNILSKLDAGNRTEAANIAKESGWL

SEQ ID NO: 4167 - DNA, 1095 bp, Streptococcus pneumoniae
atgcttgaaagactgaaaagaatacattatatgttttggatcagtttaatttttatgattttccccatcctgtctgtagtgactgggtggctttctgcctggcatttattgattgatattctatttgtagtggcatatttgggtgttttaacaactaagagccagcgcctatcttggctatattggggcctcatgctgacttatgtagttgggaatactgcctttgttgctgttaattatatctggtttttctttttcctatccaatctcttaagttatcatttcagcgtacgtagtttaaagtctttacatgtctggacttttcttcttgctcaagtccttgttgtggggcaactgttgatttttcagagaatcgaagttgagtttctattctatctacttgtaattcttacttttgtcgatttaatgacttttggattggttcggattcgtattgtcgaggatttgaaagaagctcaggtcaagcaaaatgctcagataaatctattgcttgctgaaaatgaacgtagtcgtatcggtcaggatttgcatgatagtctgggacatacctttgctatgctgagtgtcaagacagatttagccttgcagttatttcagatggaggcttatccacaggtggaaaaggaattaaaagaaattcaccagatcagcaaggattccatgaatgaagtgcgaaccattgtggaaaatcttaagtctagaactttgacatccgaactagagactgtgaaaaagatgttagaaattgctggaattgaggttcaagttgagaatcacttggacaagtctagcttaactcaggaattggagtcaacggcttccatgattttgcttgaattagtgaccaatatcatcaaacatgctaaagcgtctaaagtctacttgaaattagaacggacagagaaagaactcattctaacagtgagagatgatggctgtggctttgcctctataagcggggatgagctccatacagtccgaaatcgtgtttttccattttcaggagaagtaagtgtaatcagtcagaaacatccaactgaagtgcaggttcgactactttataaggagagaaag

SEQ ID NO: 4168 - protein, 365 aa, Streptococcus pneumoniae
  sensor histidine kinase, putative; Cellular location: membrane; Similar to strain R6 sequence 15903857 (0.E+01)
MLERLKRIHYMFWISLIFMIFPILSVVTGWLSAWHLLIDILFVVAYLGVLTTKSQRLSWLYWGLMLTYVVGNTAFVAVNYIWFFFFLSNLLSYHFSVRSLKSLHVWTFLLAQVLVVGQLLIFQRIEVEFLFYLLVILTFVDLMTFGLVRIRIVEDLKEAQVKQNAQINLLLAENERSRIGQDLHDSLGHTFAMLSVKTDLALQLFQMEAYPQVEKELKEIHQISKDSMNEVRTIVENLKSRTLTSELETVKKMLEIAGIEVQVENHLDKSSLTQELESTASMILLELVTNIIKHAKASKVYLKLERTEKELILTVRDDGCGFASISGDELHTVRNRVFPFSGEVSVISQKHPTEVQVRLLYKERK

SEQ ID NO: 4169 - DNA, 735 bp, Streptococcus pneumoniae
atgaaacgatggctagcacttagtaagatagaatttttattgaccaaacgacaattgatctattatctattgtcagtagggatgccgacggctttctatttatttttttctggtatctatcaggacacaccaggtgaactcgcgaattttatgcgtgattatcttatctccatgactgcattttccatgatgtcaacagctatcttctcattcccagttgttttacataccgacaagatcaacaactggcagaaaacattgcgtcatagccctgtaaatatggtagaatattatctatcaaagataacaagtatgctggttgattatttggtttcaatcttggtggttttctcagttgggcattttgtaagaggtgtggacatgtctcttggaaattggattggggctgcacttttgctgatagtaggaagtattgccttcgtagcgcttggtttgaccttgactctcttaccaactagtcagttgatgtctgtcgtgggcaatcttctttatctagggttggctgttttaggtggactctggatgcctatctctttatttccagactggatgcaagtagtaggtaagtgtctcccgacctatcagttgatggagttgctcaagaccttcttaaatgagggtggcatcaatctatcagccacagtttatttacttgttttttcagtagttttgtttggtttgaccatttaccttcaaggtcataaggagaatgct

SEQ ID NO: 4170 - protein, 245 aa, Streptococcus pneumoniae
  conserved hypothetical protein; Cellular location: membrane; Similar to strain R6 sequence 15903858 (e-138)
MKRWLALSKIEFLLTKRQLIYYLLSVGMPTAFYLFFSGIYQDTPGELANFMRDYLISMTAFSMMSTAIFSFPVVLHTDKINNWQKTLRHSPVNMVEYYLSKITSMLVDYLVSILVVFSVGHFVRGVDMSLGNWIGAALLLIVGSIAFVALGLTLTLLPTSQLMSVVGNLLYLGLAVLGGLWMPISLFPDWMQVVGKCLPTYQLMELLKTFLNEGGINLSATVYLLVFSVVLFGLTIYLQGHKENA

SEQ ID NO: 4171 - DNA, 882 bp, Streptococcus pneumoniae
atgaatatgattaaggtagaaagcctaaataaaaacatcaagggcaaggctattttgaagggtatttcctttgaggtagctgaaggtgaatgcgtcgccttgattgggcccaatggtgctgggaagaccacactcttggactgtctgcttggagataaactggtcacaagcggtcaagtatccatccaaggcttgtcagtgacgagttctcagttagactatattagaggttatctgcctcaagaaaatgtcatcgttcagaaattaaaggtcaaagagttgattgctttctttcaacgtatctatccaaattccttgagcgatcaggaaatcgatcaactattgcagtttgaccagcaacaaaaagagcaattcgcagaaaaattgtcaggcgggcaaaagcgtctcttctcttttgtcttgaccttgattgggcgaccaaagcttgtctttttagatgaaccaactgctgccatggatacttcaactcgtcaacgcttttgggaaatcgttcgggacctaaaagcgcaaggagtcacgattctctattcgtctcattatattgaagaggtagagcatacggctgaccggattttggttttaaataagggagagttgattcgtgatacgacgcctctagctatgcgtagtgagggaattgaaaagcattttatccttcctctggcatacaaggaagtcattgagcagtctaacttggttgaaaactggtcacaaaaacaggatgctctacaagtagtcacacgcgaagcagatgctttttgggaactgttagttcaagcaggatgtggcatacaagaaattgaagttaataatcgtagtttgttggatacaatctttgaagaaacgcagaagggagataac

SEQ ID NO: 4172 - protein, 294 aa, Streptococcus pneumoniae
  ABC transporter, ATP-binding protein; Cellular location: membrane; Similar to strain R6 sequence 15903859 (e-146)
MNMIKVESLNKNIKGKAILKGISFEVAEGECVALIGPNGAGKTTLLDCLLGDKLVTSGQVSIQGLSVTSSQLDYIRGYLPQENVIVQKLKVKELIAFFQRIYPNSLSDQEIDQLLQFDQQQKEQFAEKLSGGQKRLFSFVLTLIGRPKLVFLDEPTAAMDTSTRQRFWEIVRDLKAQGVTILYSSHYIEEVEHTADRILVLNKGELIRDTTPLAMRSEGIEKHFILPLAYKEVIEQSNLVENWSQKQDALQVVTREADAFWELLVQAGCGIQEIEVNNRSLLDTIFEETQKGDN

SEQ ID NO: 4173 - DNA, 192 bp, Streptococcus pneumoniae
atgaagagagggatcatctatttctttatcggcctgtcactcttggtatggttagtggaaatgtttacaggttggtttgaccaaaccttgcttcgccaattcattcgtggtgctttggggtttggatttatgattttcgtcgttttccttatgagaatggagtggttgaaaggagaatatcatgaatatgat

SEQ ID NO: 4174 - protein, 64 aa, Streptococcus pneumoniae
  hypothetical protein; Cellular location: outside
MKRGIIYFFIGLSLLVWLVEMFTGWFDQTLLRQFIRGALGFGFMIFVVFLMRMEWLKGEYHEYD

SEQ ID NO: 4175 - DNA, 129 bp, Streptococcus pneumoniae
atgttttcgggattggatgagagtttctatcattttccttgggagctctttgctggctttggaatgatgtcttggcttgttagagaaggtttgaaattagtcggagatgtgaaaaaggagcttgaggaa

SEQ ID NO: 4176 - protein, 43 aa, Streptococcus pneumoniae
  hypothetical protein; Cellular location: cytoplasm; Similar to strain R6 sequence 15903860 (7.E-19)
MFSGLDESFYHFPWELFAGFGMMSWLVREGLKLVGDVKKELEE

SEQ ID NO: 4177 - DNA, 477 bp, Streptococcus pneumoniae
atgattaaagaattgtatgaagaagtccaagggactgtgtataagtgtagaaatgaatattaccttcatttatgggaattgtcggattgggagcaagaaggcatgctctgcttacatgaattgattagtagagaagaaggactggtagacgatattccacgtttaaggaaatatttcaagaccaagtttcgaaatcgaattttagactatatccgtaaacaggaaagtcagaagcgtagatacgataaagaaccctatgaagaagtgggtgagatcagtcatcgtataagtgaggggggtctctggctagatgattattatctctttcatgaaacactaagagattatagaaacaaacaaagtaaagagaaacaagaagaactagaacgcgtcttaagcaatgaacgatttcgagggcgtcaaagagtattaagagacttacgcattgtgtttaaggagtttactatccgtacccac

SEQ ID NO: 4178 - protein, 159 aa, Streptococcus pneumoniae
  transcriptional regulator ComX1 (comX1); Cellular location: cytoplasm; Similar to strain R6 sequence 15903861 (3.E-92)
MIKELYEEVQGTVYKCRNEYYLHLWELSDWEQEGMLCLHELISREEGLVDDIPRLRKYFKTKFRNRILDYIRKQESQKRRYDKEPYEEVGEISHRISEGGLWLDDYYLFHETLRDYRNKQSKEKQEELERVLSNERFRGRQRVLRDLRIVFKEFTIRTH

SEQ ID NO: 4179 - DNA, 534 bp, Streptococcus pneumoniae
atggatagttttgataaagggtggtttgttttacaaacttattctggttatgaaaataaggtgaaagaaaatctattacaacgtgcacaaacctacaatatgttggataatattctacgcgttgaaattccaacacaaacagtgcaagttgaaaaaaatggaaagagaaaagaagtagaagaaaatcgctttccaggttatgttcttgtagaaatggtcatgacagatgaagcttggtttgttgttcgaaacacaccaaatgttacaggatttgtcggatcacacgggaacagatcaaaaccaactccattattggaacaagaaattcgcgacattttggtatctatgggacaaactgttcaagaatttgatttcgatgttgagattggtcaaactgtacgtattattgatggtgcttttgcagactacactggtaagattacagaaattgataataacaaagtgaaaatgattatctctatgtttggtaatgacacagttgcagaagtaaatctaaaccaaatcgcagaatta

SEQ ID NO: 4180 - protein, 178 aa, Streptococcus pneumoniae
  transcription antitermination protein NusG (nusG); Cellular location: cytoplasm; Similar to strain R6 sequence 15903862 (e-100)
MDSFDKGWFVLQTYSGYENKVKENLLQRAQTYNMLDNILRVEIPTQTVQVEKNGKRKEVEENRFPGYVLVEMVMTDEAWFVVRNTPNVTGFVGSHGNRSKPTPLLEQEIRDILVSMGQTVQEFDFDVEIGQTVRIIDGAFADYTGKITEIDNNKVKMIISMFGNDTVAEVNLNQIAEL

SEQ ID NO: 4181 - DNA, 174 bp, Streptococcus pneumoniae
atgcgttttattggagatatttttagacttcttaaagacacaacatggccaactcgcaaggaaagctggagagattttcgttctatcatggaatacacagctttctttgtagtaattatttacatttttgaccagttgattgtttcaggtttgattcgatttattaacattttt

SEQ ID NO: 4182 - protein, 58 aa, Streptococcus pneumoniae
  preprotein translocase, SecE subunit, putative; Cellular location: membrane; Similar to strain R6 sequence 15903863 (6.E-30)
MRFIGDIFRLLKDTTWPTRKESWRDFRSIMEYTAFFVVIIYIFDQLIVSGLIRFINIF

SEQ ID NO: 4183 - DNA, 2193 bp, Streptococcus pneumoniae
atgaaattagataaattatttgagaaatttctttctctttttaaaaaagaaacaagtgaactagaggactctgattctactatcttacgtcgctctcgtagtgatcgaaaaaaattagcccaagtaggtccgattcgaaaattctggcgtcgttatcatctaacaaagattatccttatactaggtttgagtgcaggcttgctagttggaatctatttgtttgctgtagccaagtcgaccaatgtcaatgatttgcaaaatgccttgaaaactcggactcttatttttgaccgtgaagaaaaagaggctggtgccttgtctggtcaaaagggaacctatgttgagctgactgacatcagtaaaaacttgcagaatgctgttattgcgacagaagaccgttctttctataaaaatgacgggattaactatggccgttttttcttggctattgtcactgctggacgttcaggtggtggctctaccattacccaacagctggctaaaaacgcctatttatcgcaggatcaaactgttgagagaaaagcgaaagaatttttccttgccttagaattaagcaaaaaatatagtaaggagcaaattctaaccatgtaccttaacaacgcttattttggaaatggtgtgtggggtgtagaagatgcgagtaagaaatactttggagtttctgcatcagaagtgagtctggatcaagctgcgactctggcagggatgctcaaggggccggaactgtataatcccttgaattccgtagaagattctactaatcggcgcgatactgtcttgcagaatatggttgcagcaggatatattgataaaaaccaagaaaccaaagctgctgaagttgatatgacttcgcaattgcacgataagtatgaaggaaaaatctcagattaccgttacccctcttattttgatgcggtggttaatgaagctgtttccaagtataatctaacagaggaagagattgtcaataatggctaccgcatttacacagagctggaccaaaactaccaagcaaatatgcagattgtttatgaaaacacatcgctatttccgagggcagaggatggaacgtttgctcaatcaggaagtgtagccctcgaaccgaaaacagggggagttcgtggagttgtcggtcaagttgctgacaatgataaaactggattccggaatttcaactatgcaacccaatcaaagcgtagtcctggttctacaattaagcctttagttgtttatacgccagcagttgaagcaagctgggctttgaataagcagttggataaccataccatgcagtatgacagctataaggttgataactatgcagggatcaaaacgagtcgagaagttcctatgtatcaagccttggcagaatcgcttaatctacctgctgttgccactgttaatgatttgggtgtcgacaaggcttttgaggcaggcgaaaaattcggactcaacatggaaaaggtcgaccgtgttcttggtgtcgccttgggaagcggtgttgaaaccaaccctcttcaaatggctcaagcatacgccgcctttgcaaatgaaggtttaatgcctgaagctcattttattagtagaattgaaaatgctagtggacaagttattgcgagtcataaaaattcacaaaaacgggtgattgataagtctgtagctgacaagatgaccagtatgatgttggggactttcaccaacggtaccggtattagttcatcgcctgcagactatgtcatggcagggaaaactggaacaactgaagcagttttcaatccggagtacacaagtgaccagtgggtaattggttatactccggatgtagtgattagccactggcttggctttccgaccactgatgaaaaccactatctagctggctctacttcaaacggtgcagctcatgtctttagaaacattgccaataccattttaccttatacgccaggaagtacctttacggttgaaaatgcttataagcaaaatggaattgcaccagccaatacaaaaagacaagtacaaaccaatgataatagccagacagatgataatttgtctgatattcgagggcgtgcgcaaagtctagtagatgaggctagccgggctatctcagatgcgaagattaaggaaaaggctcaaacaatatgggattcgatagtcaatctatttcgc

SEQ ID NO: 4184 - protein, 731 aa, Streptococcus pneumoniae
  penicillin-binding protein 2A (pbp2A); Cellular location: membrane; Similar to strain R6 sequence 15903865 (0.E+01)
MKLDKLFEKFLSLFKKETSELEDSDSTILRRSRSDRKKLAQVGPIRKFWRRYHLTKIILILGLSAGLLVGIYLFAVAKSTNVNDLQNALKTRTLIFDREEKEAGALSGQKGTYVELTDISKNLQNAVIATEDRSFYKNDGINYGRFFLAIVTAGRSGGGSTITQQLAKNAYLSQDQTVERKAKEFFLALELSKKYSKEQILTMYLNNAYFGNGVWGVEDASKKYFGVSASEVSLDQAATLAGMLKGPELYNPLNSVEDSTNRRDTVLQNMVAAGYIDKNQETKAAEVDMTSQLHDKYEGKISDYRYPSYFDAVVNEAVSKYNLTEEEIVNNGYRIYTELDQNYQANMQIVYENTSLFPRAEDGTFAQSGSVALEPKTGGVRGVVGQVADNDKTGFRNFNYATQSKRSPGSTIKPLVVYTPAVEASWALNKQLDNHTMQYDSYKVDNYAGIKTSREVPMYQALAESLNLPAVATVNDLGVDKAFEAGEKFGLNMEKVDRVLGVALGSGVETNPLQMAQAYAAFANEGLMPEAHFISRIENASGQVIASHKNSQKRVIDKSVADKMTSMMLGTFTNGTGISSSPADYVMAGKTGTTEAVFNPEYTSDQWVIGYTPDVVISHWLGFPTTDENHYLAGSTSNGAAHVFRNIANTILPYTPGSTFTVENAYKQNGIAPANTKRQVQTNDNSQTDDNLSDIRGRAQSLVDEASRAISDAKIKEKAQTIWDSIVNLFR

SEQ ID NO: 4185 - DNA, 873 bp, Streptococcus pneumoniae
atgcaattcacatttacattacccgcctctctacctcaaatgacagtaaagcaattacttgaggaacaactcctcatccctagaaaaatccgtcattttttgagaatcaagaaacatattttgataaatcaagaagaagtccactggaaggaaatcgtaaatcctggagatgtttgccagttgacttttgacgaggaagattattcccaaaagacgatcccttggggcaacccagacttagtgcaggaagtttatcaagatcaacacttgattattgtaaacaaaccagaggggatgaaaacgcatggtaatcaaccaaacgaaattgcccttcttaaccatgtcagtacctatgttggccaaacctgctatgtcgttcatcgtctggacatggaaaccagtggcttagttctctttgccaaaaatccttttatcctgcccattctcaatcgcttattggagaaaaaagagatttctagagaatattgggctctagttgatggaaatatcaacagaaaagaacttgttttcagagacaaaattggacgtgatcgccatgatcgtagaaaaagaatagttgatgcaaaaaatgggcaatatgctgaaacgcatgtaagcagattaaagcaattctcaaacaagacttccttggctcattgcaagctaaagacagggcgaacccatcagattcgtgtgcacctttcgcatcataatcttcctatcctgggagaccctctctataatagtaaatcaaagacaagccggcttatgcttcatgccttccgactttcctttacccacccacttactttagagaagctaactttcactaccctttcaaatacatttgaaaaagaattaaaaaagaatgga

SEQ ID NO: 4186 - protein, 291 aa, Streptococcus pneumoniae
  ribosomal large subunit pseudouridine synthase, RluD subfamily; Cellular location: cytoplasm; Similar to strain R6 sequence 15903866 (e-168)
MQFTFTLPASLPQMTVKQLLEEQLLIPRKIRHFLRIKKHILINQEEVHWKEIVNPGDVCQLTFDEEDYSQKTIPWGNPDLVQEVYQDQHLIIVNKPEGMKTHGNQPNEIALLNHVSTYVGQTCYVVHRLDMETSGLVLFAKNPFILPILNRLLEKKEISREYWALVDGNINRKELVFRDKIGRDRHDRRKRIVDAKNGQYAETHVSRLKQFSNKTSLAHCKLKTGRTHQIRVHLSHHNLPILGDPLYNSKSKTSRLMLHAFRLSFTHPLTLEKLTFTTLSNTFEKELKKNG

SEQ ID NO: 4187 - DNA, 1005 bp, Streptococcus pneumoniae
atggtagttaaagttggtattaacggtttcggacgtatcggtcgtcttgctttccgtcgtatccaaaacgtagaaggtgttgaagttacacgcatcaacgaccttacagatccagttatgcttgcacacttgttgaaatacgacacaactcaaggtcgtttcgacggtactgttgaagttaaagaaggtggatttgaagttaacggtaaattcatcaaagtttctgctgaacgtgatccagaacaaatcgactgggctactgacggtgtagaaatcgttcttgaagctactggtttctttgctaagaaagaagcagctgaaaaacaccttaaaggtggagctaaaaaagttgttatcactgctcctggtggaaacgacgttaaaacagttgtattcaacactaaccacgacgttcttgacggtactgaaacagttatctcaggtgcttcatgtactacaaactgcttggctccaatggctaaagctcttcaagacaactttggtgttgttgaaggattgatgactactatccacgcttacactggtgaccaaatgatccttgacggaccacaccgtggtggtgaccttcgccgtgctcgcgctggtgctgcaaacatcgttcctaactcaactggtgctgcaaaagctatcggtcttgtaatcccagaattgaatggtaaacttgacggatctgcacaacgcgttccaactccaactggatcagttactgaattggtagcagttcttgaaaagaacgttactgttgatgaagtgaacgcagctatgaaagcagcttcaaacgaatcatacggttacacagaagatccaatcgtatcttcagatatcgtaggtatgtcttacggttcattgtttgacgcaactcaaactaaagttcttgacgttgacggtaaacaattggttaaagttgtatcatggtacgacaacgaaatgtcatacactgcacaacttgttcgtactcttgaatacttcgcaaaaattgctaaa

SEQ ID NO: 4188 - protein, 335 aa, Streptococcus pneumoniae
  glyceraldehyde 3-phosphate dehydrogenase (gap); Cellular location: cytoplasm; Feature of note: secreted; Similar to strain R6 sequence 15903867 (0.E+01)
MVVKVGINGFGRIGRLAFRRIQNVEGVEVTRINDLTDPVMLAHLLKYDTTQGRFDGTVEVKEGGFEVNGKFIKVSAERDPEQIDWATDGVEIVLEATGFFAKKEAAEKHLKGGAKKVVITAPGGNDVKTVVFNTNHDVLDGTETVISGASCTTNCLAPMAKALQDNFGVVEGLMTTIHAYTGDQMILDGPHRGGDLRRARAGAANIVPNSTGAAKAIGLVIPELNGKLDGSAQRVPTPTGSVTELVAVLEKNVTVDEVNAAMKAASNESYGYTEDPIVSSDIVGMSYGSLFDATQTKVLDVDGKQLVKVVSWYDNEMSYTAQLVRTLEYFAKIAK

SEQ ID NO: 4189 - DNA, 978 bp, Streptococcus pneumoniae
ttggagagtccttttgggatgaacatgtcaaatattactatagatgggcaagaaatggatctgagtcaaacgatgccttcttatgctcaagtagtgagtctttatgatgatacaagtatctctgttagtaataatgagacggacaaagtgttggctggatccctctatactgatacaaatgaacagggattaacgattccaagcagtttactaaaaaattggaatgaacagacaggaaaaaatttgacagctaatgatcttattggcaaatcagtctcagccagcattgtagaaagtgctgccgaaactagtaagattgctcaatttcaaacgaagattgtacgtgtaatcaatgatgaagatgacatggaggacagcaacagtttcatgctgtctcatcaaatggaaacgattttgaaagaggctggatttacgaaagctgtatcttattttatcttggaactcaaagatccatcacagacaaaagtagtaacagaagaattacagaaaaataagaagtatactgtgctttctcaacagagagttcttgatattgtgattacctttattcgtgttattcagggattattgattgtgctttcatcacaagctattgtggtagcagcggttatgattggtatcattatttacatcaatatcatgcaacgttccaaggaaataggtgtcatgaaagcagttggttatcagaatcgtgatgtcaaaggaatttttatttacgaggctatctggattgtaggcatcgccttgctgctggcatttttggttgcacaaggggtgggaagtttggcgaatgcgattgtaagtcacttttacccatccatcactaaggtttttaaattaaatcttttatctgttttaggaactctagttttcgctctattacttggttatgtctcagcctacttcccggcgcgtaagattagtaaaatggatcctatagaatcgttatgctatgaa

SEQ ID NO: 4190 - protein, 326 aa, Streptococcus pneumoniae
  conserved hypothetical protein; Cellular location: membrane; Similar to strain R6 sequence 15903868 (e-176)
MESPFGMNMSNITIDGQEMDLSQTMPSYAQVVSLYDDTSISVSNNETDKVLAGSLYTDTNEQGLTIPSSLLKNWNEQTGKNLTANDLIGKSVSASIVESAAETSKIAQFQTKIVRVINDEDDMEDSNSFMLSHQMETILKEAGFTKAVSYFILELKDPSQTKVVTEELQKNKKYTVLSQQRVLDIVITFIRVIQGLLIVLSSQAIVVAAVMIGIIIYINIMQRSKEIGVMKAVGYQNRDVKGIFIYEAIWIVGIALLLAFLVAQGVGSLANAIVSHFYPSITKVFKLNLLSVLGTLVFALLLGYVSAYFPARKISKMDPIESLCYE

SEQ ID NO: 4191 - DNA, 126 bp, Streptococcus pneumoniae
atgggctcatatcaaaaagcacctcaaaaaggtattaccaagttgcaataccttttacgaggcttttttatcctgctcttgtttcaattgactatatatcacggatacagttgggaaagaagctat

SEQ ID NO: 4192 - protein, 42 aa, Streptococcus pneumoniae
  hypothetical protein
MGSYQKAPQKGITKLQYLLRGFFILLLFQLTIYHGYSWERSY

SEQ ID NO: 4193 - DNA, 336 bp, Streptococcus pneumoniae
ttggttgcaggtctaacaaatggtgaattaatcgctccaatgacttacgaagagacgatgacgagcgacttttttgaagcttggtttcagaattttctcttaccaacattaaacacaccatcggttattattatggataatgtaagattccatagaatggggaagctagaacttttatgcgaagagtttgggcataaacttttacctcttcctccctactcgcctgagtacaatcctattgagaaaacatgggctcatatcaaaaagcacctcaaaaaggtattaccaagttgcaataccttttacgaggcttttttatcctgctcttgtttcaat

SEQ ID NO: 4194 - protein, 112 aa, Streptococcus pneumoniae
  IS630-Spn1, transposase Orf2; Cellular location: cytoplasm; Similar to strain R6 sequence 15903081 (2.E-63)
MVAGLTNGELIAPMTYEETMTSDFFEAWFQNFLLPTLNTPSVIIMDNVRFHRMGKLELLCEEFGHKLLPLPPYSPEYNPIEKTWAHIKKHLKKVLPSCNTFYEAFLSCSCFN

SEQ ID NO: 4195 - DNA, 414 bp, Streptococcus pneumoniae
atgtggtataatctttttatggcatattcaatagattttcgtaaaaaagttctctcttattgtgagcgaacaggtagtataacagaagcatcacacgttttccaaatctcacgtaataccatttatggctggttaaagctaaaagagaaaacaggagagctaaaccaccaagtaaaaggaataaaaccaagaaaggttgatagagatagacttaaaaactatcttactgacaatccagacgcttatttgactgaaatagcttctgaatttggctgtcatccaactaccatccactatacgctcaaagctatgggctacactcgaaaaaagaaccacacctactatgaacaagacccagaaaaagtagccttatttcttaagaattttaatagtttaaagcacctagcacctgtt

SEQ ID NO: 4196 - protein, 138 aa, Streptococcus pneumoniae
  IS630-Spn1, transposase Orf1 FRAMESHIFT; Cellular location: cytoplasm; Similar to strain R6 sequence 15903870 (5.E-62)
MWYNLFMAYSIDFRKKVLSYCERTGSITEASHVFQISRNTIYGWLKLKEKTGELNHQVKGIKPRKVDRDRLKNYLTDNPDAYLTEIASEFGCHPTTIHYTLKAMGYTRKKNHTYYEQDPEKVALFLKNFNSLKHLAPV

SEQ ID NO: 4197 - DNA, 873 bp, Streptococcus pneumoniae
gtgatgtcaatcatttcaactgatttaaccccttttcaaatagatgatacattgaaagcagccttgcgagaagatgttcattccgaagattacagtaccaatgccatttttgatcatcatggccaagccaaggtgtcgctttttgccaaggaagctggtgttttagcggggctaaccgtttttcaaagggtttttaccctatttgatgccgaggtgaccttccagaatcctcatcaatttaaggatggggatcgtttgactagtggcgatttggttttagaaatcataggctcggtgagaagtctcttaacatgtgaacgcgttgccttgaattttttacaacatttatcagggattgcttcgatgacagctgcttatgtagaagccttaggcgatgattgcattaaggtatttgatactcgaaaaactactcctaatttacgtctttttgagaaatatgccgtgagagttggcggtggctataatcatcgctttaatttatcagatgctatcctgctaaaagacaatcacattgcggcagtaggtagtgttcaaaaggcaattgctcaagcgcgtgcctatgccccttttgtgaaaatggtcgaggtggaagtggaaagccttgctgctgccgaagaagctgcggcggcgggtgctgatattatcatgttggataatatgtcattggaacagattgaacaggccattaccctaattgcaggacgttctcggattgaatgttctggaaatattgatatgaccactattagccgttttcgtggtttagcgattgattacgtctccagtggtagtttaacccatagtgctaagagtcttgatttttccatgaaggggttaacctaccttgatgtc

SEQ ID NO: 4198 - protein, 291 aa, Streptococcus pneumoniae
  nicotinate-nucleotide pyrophosphorylase (nadC); Cellular location: cytoplasm; Similar to strain R6 sequence 15903871 (e-161)
MMSIISTDLTPFQIDDTLKAALREDVHSEDYSTNAIFDHHGQAKVSLFAKEAGVLAGLTVFQRVFTLFDAEVTFQNPHQFKDGDRLTSGDLVLEIIGSVRSLLTCERVALNFLQHLSGIASMTAAYVEALGDDCIKVFDTRKTTPNLRLFEKYAVRVGGGYNHRFNLSDAILLKDNHIAAVGSVQKAIAQARAYAPFVKMVEVEVESLAAAEEAAAAGADIIMLDNMSLEQIEQAITLIAGRSRIECSGNIDMTTISRFRGLAIDYVSSGSLTHSAKSLDFSMKGLTYLDV

SEQ ID NO: 4199 - DNA, 1308 bp, Streptococcus pneumoniae
atgattcatttaataatgattagcgccattgctctagccattggaattggttaccgcaccaaaatcaatattggcctgctggctattgctttttcttacctcatcgcaaccactctcatgggattaagccccaaagaacttcttcatttttggccaacctcactcttttttaccatttttagcgtctctctcttttataacgttgcaacaactaacggtactcttgatgttttggctcaacacattctctaccgcacacgcacccaccctaacgccctctacatgattttatacctgatggcaacccttttgtctgctttaggtgctggatttttcactactatggccgtttgctgtcctctagcgattaccctctgtcaaaaagcggacaaacaccctttgattggagctcaagccgtcaattggggagcttcaggaggggctaatttgataaccagtagctcaggcattgtctttcaaggcctgtttaagcaaatgggatgggaagagcaagctttttcacttggcaatcatatctttatcgtcagcattatctacccactcatcgtcttgcttttattatcctgttacagtcactatagtaagggaagaacaaactcatccttgactattgaccaaccaccactcctcagcaaggttcaaagacaaaccaccttgctcatgatcagcagcatggttttggtttggctttttcccttgttgcatctcattttcccaaacatcgcctggatagctacttatcaaaaaacatttgatattggctttgtctcaatactcatggtctgcctcgccttaaggctcaaattagggaagcaagaagccattttagctaaggttccctgggctacaattatcatgctctgcggcatgagcttactaatgtctctagcggtcaagtcaggtttagtcacactgatagggcacctcatgacaacaaccattcctcatttctggttacctctgttcttttgtgtgatagccggagtgatgtcactctttagttccaccctatccgttgtagctccagccctctttcccatcattgctatcatcagtgctcaaaatcctcagattgatattcacttactcacaacagccaccgttattggcgctctatctactaatatctcacccttttcatcagctggttctctcattcaactctcacttcccaatatagaggaacgtggccttgccttcaaaaagcaaattattctgggtgtccccatcagcttaagtttgggactcttgaccacctggattctcatccttctagcttccttaagt

SEQ ID NO: 4200 - protein, 436 aa, Streptococcus pneumoniae
  membrane protein; Cellular location: membrane; Similar to strain R6 sequence 15903872 (0.E+01)
MIHLIMISAIALAIGIGYRTKINIGLLAIAFSYLIATTLMGLSPKELLHFWPTSLFFTIFSVSLFYNVATTNGTLDVLAQHILYRTRTHPNALYMILYLMATLLSALGAGFFTTMAVCCPLAITLCQKADKHPLIGAQAVNWGASGGANLITSSSGIVFQGLFKQMGWEEQAFSLGNHIFIVSIIYPLIVLLLLSCYSHYSKGRTNSSLTIDQPPLLSKVQRQTTLLMISSMVLVWLFPLLHLIFPNIAWIATYQKTFDIGFVSILMVCLALRLKLGKQEAILAKVPWATIIMLCGMSLLMSLAVKSGLVTLIGHLMTTTIPHFWLPLFFCVIAGVMSLFSSTLSVVAPALFPIIAIISAQNPQIDIHLLTTATVIGALSTNISPFSSAGSLIQLSLPNIEERGLAFKKQIILGVPISLSLGLLTTWILILLASLS

SEQ ID NO: 4201 - DNA, 126 bp, Streptococcus pneumoniae
atgattagttcaactttaaaaattcatcccaatagtctttatcgatggattcaagaatatgaaaaatatgaagaaagtgcgttcccaggacatgggagcgcacttcgtcatactcaatttgagata

SEQ ID NO: 4202 - protein, 42 aa, Streptococcus pneumoniae
  transposase, IS3 family, truncation FRAMESHIFT
MISSTLKIHPNSLYRWIQEYEKYEESAFPGHGSALRHTQFEI

SEQ ID NO: 4203 - DNA, 192 bp, Streptococcus pneumoniae
atgaaggggaaagagtatgaaaacagaactgtttcttttgctattagttcaaaaggagaaaaaatgaaagtagaaaatatttcgtatagggtggatcatcgtaaattgtttgataatatttcttttgatacttcgagttcagacgtgacattaattactggtaaaaatggtacaggaaagtcaactttacta

SEQ ID NO: 4204 - protein, 64 aa, Streptococcus pneumoniae
  ABC transporter, ATP-binding protein, truncation; Cellular location: cytoplasm; Similar to strain R6 sequence 15903873 (2.E-30)
MKGKEYENRTVSFAISSKGEKMKVENISYRVDHRKLFDNISFDTSSSDVTLITGKNGTGKSTLL

SEQ ID NO: 4205 - DNA, 117 bp, Streptococcus pneumoniae
ttgagtactcgattagtcgtcatcgctatgatttatttgaatttaattcttttgcattacgacattcctcctaggagaaaatgtgaaaatgaagccaatcttttacagactctagtt

SEQ ID NO: 4206 - protein, 39 aa, Streptococcus pneumoniae
  hypothetical protein
MSTRLVVIAMIYLNLILLHYDIPPRRKCENEANLLQTLV

SEQ ID NO: 4207 - DNA, 726 bp, Streptococcus pneumoniae
atgagtacaaaatatttatttatttacaatgagattcgtgaaaagattctttgtaataaatataccatgaacgaacaattgcctgatgaaatgacattagctaaacagtttgcctgtagtcgaatgacgatcaaaaaagctttagacttgttagtttctgagggcttaatttttagaaaacgtgggcagggaacctttgttctctctcgtggcagctcaaaaagaaaattaatcgttccagaaagagatatccggggactgacaaaaatatctgaagatgctcattctacaattgactcgaggattattcacttcaaattagaatttgcaaatgaatttttagcagaaaaactacaggtcgctttgcagagtccagtttataatatttaccgcctgcgtattattgacggtaaaccttatgttctggaacaaacttatatgagtaccgatgttattccaggtattactgaagatattttacaaaaatcgatttacaattacattgaaggaaagttaggattgcatattgccagtgctacaaaaatcttacgagcttcttctagttcagaaaatgagcaacattacttgcagctccttccaacggaaccggtatttgaagtagaacaagtggcttatttggataacggaactccgtttgagtactcgattagtcgtcatcgctatgatttatttgaatttaattcttttgcattacgacattcctcc

SEQ ID NO: 4208 - protein, 242 aa, Streptococcus pneumoniae
  transcriptional regulator, GntR family; Cellular location: cytoplasm; Similar to strain R6 sequence 15903874 (e-136)
MSTKYLFIYNEIREKILCNKYTMNEQLPDEMTLAKQFACSRMTIKKALDLLVSEGLIFRKRGQGTFVLSRGSSKRKLIVPERDIRGLTKISEDAHSTIDSRIIHFKLEFANEFLAEKLQVALQSPVYNIYRLRIIDGKPYVLEQTYMSTDVIPGITEDILQKSIYNYIEGKLGLHIASATKILRASSSSENEQHYLQLLPTEPVFEVEQVAYLDNGTPFEYSISRHRYDLFEFNSFALRHSS

SEQ ID NO: 4209 - DNA, 132 bp, Streptococcus pneumoniae
atgcattattccaagaccagcaatcaaatgcggtccaagcgtggtatccaaaacagtgacttccctcttcaatggctttatgtagccatcttaaatgttcttcataaaattcaatacgatacacgtcatcga

SEQ ID NO: 4210 - protein, 44 aa, Streptococcus pneumoniae
  hypothetical protein
MHYSKTSNQMRSKRGIQNSDFPLQWLYVAILNVLHKIQYDTRHR

SEQ ID NO: 4211 - DNA, 1449 bp, Streptococcus pneumoniae
atgctatactttatgtatagaataatagaaaggaggttgagcatgaaaaaaaagttagtatttcctaatctgttttggtggggagctgcttctagcggacctcagacagaaggtcaatatggaaaagtacatgaaaatgtgatggactactggttcaaaacgcatccagaagattttttcgataatgtcggacctcttgtagccagtaacttttttcatacttacaccgaagatttccacttgatgaaggaaattggagttaattctttccgcacttccatccaatggagtcgactcatcaagaatttagagacaggtgagcctgatccaaaaggtattgctttctacaatgccatcattgaagaagctaaaaagaaccagatggatcttgtgatgaatttacatcattttgatttaccagtggaacttcttcaaaaatacggtggttgggaaagcaaacatgtagtggagttattcgtgaagtttgccaagactgctttcacatgctttggagataaggttcattactggacaactttcaatgagccaatggtcattccagaagcaggatacttatatgctttccattatccaaatctaaaaggaaagggaaaagaggccgtacaagtcatctataatctaaaccttgctagtgcaaaagtgattcaactatatcgctcattagaacttgatggaaagattgggattattttaaacttgacacctgcttatccaagaagtaattctccagaagacttagaagcaagtcgatttacagatgacttctttaacaaagtcttcttgaatccagctgttaaaggaactttcccagaaagattggtaaaacagctagagagagatggcgtgttatggagtcataccgaaaaagagcttcaactgatgaaatcaaatacggttgattttcttggagtaaactactaccatccaaaacgtgttcaagcacaagcaaatcctgaggaatatcagacgccctggatgccagaccaatacttcaaagagtatgaatggctggagcgtcgcatgaatccatatcgtggttgggaaatttttccgaaagccatttatgatattgctatgattgtgaaggaagaatatggtaatatcccatggtttatcagtgaaaacggaatgggtgttgaaaacgaagcacggtttatcgatgaaaatggagttatcgatgacgtgtatcgtattgaattttatgaagaacatttaagatggctacataaagccattgaagagggaagtcactgttttggataccacgcttggaccgcatttgattgctggtcttggaataatgcatataagaatcgttacggatttatctccgttgatttagaaacgcaaaagagaaccatcaagagctcaggaagatggtatcgcaaagtaagtgacaataacggttttgaagtagaaattgaggag

SEQ ID NO: 4212 - protein, 483 aa, Streptococcus pneumoniae
  glycosyl hydrolase, family 1; Cellular location: outside; Similar to strain R6 sequence 15903875 (0.E+01)
MLYFMYRIIERRLSMKKKLVFPNLFWWGAASSGPQTEGQYGKVHENVMDYWFKTHPEDFFDNVGPLVASNFFHTYTEDFHLMKEIGVNSFRTSIQWSRLIKNLETGEPDPKGIAFYNAIIEEAKKNQMDLVMNLHHFDLPVELLQKYGGWESKHVVELFVKFAKTAFTCFGDKVHYWTTFNEPMVIPEAGYLYAFHYPNLKGKGKEAVQVIYNLNLASAKVIQLYRSLELDGKIGIILNLTPAYPRSNSPEDLEASRFTDDFFNKVFLNPAVKGTFPERLVKQLERDGVLWSHTEKELQLMKSNTVDFLGVNYYHPKRVQAQANPEEYQTPWMPDQYFKEYEWLERRMNPYRGWEIFPKAIYDIAMIVKEEYGNIPWFISENGMGVENEARFIDENGVIDDVYRIEFYEEHLRWLHKAIEEGSHCFGYHAWTAFDCWSWNNAYKNRYGFISVDLETQKRTIKSSGRWYRKVSDNNGFEVEIEE

SEQ ID NO: 4213 - DNA, 1293 bp, Streptococcus pneumoniae
atgaaaaactcaaaatttatagaccaatttgccacctttgctggtaaactagggaaccaaattcatttaaaaaccctaagagatgcattcgtaacagtaatgccattatatattttggcaggtttaatcgttcttttgaacaacacggtatttaagtggattttccaaggggatacattaacaagattccaatattggggaataacaattgcaaacggtactttaagtatttcaggtatgattattgctgtaatggttggttatttcttagctaaaaacagagatttcgaaaacccgttagcagcatcaatgctatcattagtttctttaattgtgatgatgccaaatacagtttctgtagttcctgacggagcaaaagatgcggtaaacatttcaggtgttctttcattcaacaacacaggtacaggcgcaatgttcgccggggttatcgtagcgattattgcaacagaattattcattgaattatcaaacgttaaagctttacaaatgaaccttggtgaaaatattccaccagctgttagtagatcatttagcgtattacttccagtcatgaccgtcatctccttatttggggttgtttcagcattattattcaatataactggaatgaacttaatctcaatcattacaatctttattcaagaaccaattcgtcatattggtacaagcttaatcggggtcattattatttactctttaggaaatatgttatggctatttggtattcaccaagcagttatttacagtgccatcctagaaccattactattaattaacattactgaaaacatcactgcagcaaataatggacaagccattccacacatcatcaacctatcacaaatacaaacattcgctttaatgggtggtagtggatctacattatgtttattaatagcaacattcttagtgagtcgcaatgctgtctctaaaaacgtggctaaattatcttttggacctggtatcttcaatatcaatgaaccagtattattcggttacccaatcgtttataacatttcattagctattccatttatcacagttccagtccttggtattttaatcagctacttagcaacagttacagaattcatgagtcctgcatttatacaagttccttggactacaccagtattcttaaatgcatggttagcaacagcaggggacgtgagagcagttctagttcaattcatcatctttgcacttggagttcttctatacattccatttatcaaagttaatgacaaagttgttgaacaagaaatggaaggt

SEQ ID NO: 4214 - protein, 431 aa, Streptococcus pneumoniae
  PTS system, IIC component; Cellular location: membrane; Similar to strain R6 sequence 15903876 (0.E+01)
MKNSKFIDQFATFAGKLGNQIHLKTLRDAFVTVMPLYILAGLIVLLNNTVFKWIFQGDTLTRFQYWGITIANGTLSISGMIIAVMVGYFLAKNRDFENPLAASMLSLVSLIVMMPNTVSVVPDGAKDAVNISGVLSFNNTGTGAMFAGVIVAIIATELFIELSNVKALQMNLGENIPPAVSRSFSVLLPVMTVISLFGVVSALLFNITGMNLISIITIFIQEPIRHIGTSLIGVIIIYSLGNMLWLFGIHQAVIYSAILEPLLLINITENITAANNGQAIPHIINLSQIQTFALMGGSGSTLCLLIATFLVSRNAVSKNVAKLSFGPGIFNINEPVLFGYPIVYNISLAIPFITVPVLGILISYLATVTEFMSPAFIQVPWTTPVFLNAWLATAGDVRAVLVQFIIFALGVLLYIPFIKVNDKVVEQEMEG

SEQ ID NO: 4215 - DNA, 306 bp, Streptococcus pneumoniae
atgaaacaaattttattagtatgtaatgcgggaatgtcgacaagtatgcttgttaaaaaaatgcaacaaagtgcgactgaacgtgggattgaaatctctatccaagcaaaatcaatgacagaagctaaaaagaatatccatgaagcagatgtcattctaattgggccacaaattcgttatgagttacttgctgtgaaagaaattgcaggaaatatccctgtagataccattgatatgcgggattacggaatgatgaatggagcaaaagttctggaacaagcacttgcatggataggagaaataaga

SEQ ID NO: 4216 - protein, 102 aa, Streptococcus pneumoniae
  PTS system, IIB component; Cellular location: cytoplasm; Similar to strain R6 sequence 15903877 (2.E-52)
MKQILLVCNAGMSTSMLVKKMQQSATERGIEISIQAKSMTEAKKNIHEADVILIGPQIRYELLAVKEIAGNIPVDTIDMRDYGMMNGAKVLEQALAWIGEIR

SEQ ID NO: 4217 - DNA, 324 bp, Streptococcus pneumoniae
atggataggagaaataagatgacagaagaaatggaatatatctgttttcagctcattgccaatagtggagcagccaaatcatcctttattgaagccatccaactagctaaggcaggaaatttaaaagaagcgaaaattaaagttgaagaagcggaagactccttagtagaagcgcacaagattcactctaatctcatacaaaaagaagctactggagaaaaaataggattctccttgctatttatgcatgcagaagaccaaatggcttcaacagagattattcagttgctatctaaagaattcatcgatctctatcaaaataaa

SEQ ID NO: 4218 - protein, 108 aa, Streptococcus pneumoniae
  PTS system, IIA component; Cellular location: cytoplasm; Similar to strain R6 sequence 15903878 (3.E-56)
MDRRNKMTEEMEYICFQLIANSGAAKSSFIEAIQLAKAGNLKEAKIKVEEAEDSLVEAHKIHSNLIQKEATGEKIGFSLLFMHAEDQMASTEIIQLLSKEFIDLYQNK

SEQ ID NO: 4219 - DNA, 93 bp, Streptococcus pneumoniae
atgagggggctagtcttatctgcaatctcaaatcagtgttttgagctgaatggcactcgttttctagtttgctctttgattttaattgggcct

SEQ ID NO: 4220 - protein, 31 aa, Streptococcus pneumoniae
  hypothetical protein
MRGLVLSAISNQCFELNGTRFLVCSLILIGP

SEQ ID NO: 4221 - DNA, 2649 bp, Streptococcus pneumoniae
atggctgataaaaaaactgtgacaccagaggaaaagaaactcgttgctgaaaaacacgtagatgagttggttcaaaaagctctagttgcccttgaagaaatgcgtaaattggatcaagaacaagttgactacatcgttgccaaagcatcagtagcagctttggatgcccacggagaattggctttacatgcctttgaagaaacaggacgtggtgtatttgaagacaaagcaactaagaacttgtttgcctgtgaacacgtagtaaacaacatgcgccacactaagacagttggcgttatcgaagaagacgatgtaacaggattgactcttattgctgaaccagttggtgttgtttgtggtattactccaacaacaaacccaacatcaacagcaatcttcaaatcattgatttcattgaagacacgtaacccaatcgtctttgccttccatccatcagcacaagaatcatctgctcatgcagctcgtatcgtccgcgatgcagctatcgcagctggtgctcctgaaaactgtgtgcaatggattactcaaccatctatggaagcaacaagtgcccttatgaaccacgaaggtgttgcgacaatccttgcaacaggtggtaatgccatggttaaggcggcttattcatgtggtaaaccagctcttggggtaggtgccggaaacgttccagcttatgttgaaaaatcagcaaacattcgtcaagcagcacacgatatcgtcatgtctaaatcatttgataacggtatggtctgtgcatctgaacaagcagttatcattgataaagaaatttacgatgaatttgtagcagagttcaaatcttaccacacttactttgtaaacaaaaaagaaaaagctcttcttgaagagttctgcttcggcgtcaaagcaaacagcaaaaactgtgctggtgcaaaattgaacgctgacatcgttggtaaaccagcaacttggattgcagaacaagcaggatttacagttccagaaggaacaaacattcttgctgcagaatgtaaagaagttggcgaaaatgagccattgactcgtgaaaaattgtcaccagttattgcagttttgaaatctgaaagccgtgaagatggtattactaaggctcgtcaaatggttgaatttaacggtcttggacactcagcagctatccacacagctgacgaagaattgactaaagaatttggtaaagctgttaaagctattcgtgttatctgtaactcaccttctacttttggtggtatcggggacgtttacaatgccttcttgccatcattgacacttggatgtggttcttacggacgcaactcagttggggataacgttagtgccattaacctcttgaatatcaaaaaagtcggaagacggagaaataacatgcaatggatgaaacttccttcaaaaacatactttgaacgtgattcaattcaataccttcaaaaatgtcgtgacgttgaacgtgtcatgatcgttactgaccatgccatggtagagcttggtttccttgatcgtatcatcgaacaactggaccttcgtcgcaataaggttgtttaccaaatctttgcggatgtagaaccggatccagatatcacaactgtaaaccgtggtactgagattatgcgtgccttcaaaccagataccatcatcgcactcggtggtgggtctccaatggatgctgccaaagtaatgtggctcttctacgagcaaccagaagtggacttccgtgaccttgtccaaaaattcatggatatccgtaaacgtgccttcaagttcccattgcttggtaagaagactaaattcatcgcgattccaactacatctggtacaggatctgaagtaacaccatttgccgttatctctgataaagcaaacaaccgtaaatacccaatcgctgactactcattgacaccaactgtggcaatcgtagatcctgctttggtattgacagttccaggatttgttgctgctgatactggtatggacgtattgactcacgcgacagaagcatacgtatcacaaatggctagtgactacactgatggtttagcacttcaagccattaaattggtctttgaaaatctcgaaagctcagttaagaatgcagacttccactcacgtgagaaaatgcataacgcttcaacaatcgctggtatggcctttgccaatgccttcctaggtatttctcactcaatggcccataagattggtgcgcaattccacacaatccacggtcgtacaaatgctatcttgcttccatacgttatccgttacaacggtacacgtccagctaagacagcaacatggcctaagtacaactactaccgtgcagatgaaaaataccaagatatcgcacgcatgcttggacttccagcttctactccagaagaaggggttgaatcttacgcaaaagctgtctacgaactcggtgaacgtattgggatccaaatgaattttagagaccaaggaattgacgaaaaagaatggaaagaacattctcgtaaattagccttcctggcttatgaagaccaatgttcaccagctaacccacgtcttccaatggtagaccatatgcaagaaatcatcgaagatgcatactatggctacaaagaaagaccaggacgccgtaaa

SEQ ID NO: 4222 - protein, 883 aa, Streptococcus pneumoniae
  alcohol dehydrogenase, iron-containing; Cellular location: membrane; Similar to strain R6 sequence 15903879 (0.E+01)
MADKKTVTPEEKKLVAEKHVDELVQKALVALEEMRKLDQEQVDYIVAKASVAALDAHGELALHAFEETGRGVFEDKATKNLFACEHVVNNMRHTKTVGVIEEDDVTGLTLIAEPVGVVCGITPTTNPTSTAIFKSLISLKTRNPIVFAFHPSAQESSAHAARIVRDAAIAAGAPENCVQWITQPSMEATSALMNHEGVATILATGGNAMVKAAYSCGKPALGVGAGNVPAYVEKSANIRQAAHDIVMSKSFDNGMVCASEQAVIIDKEIYDEFVAEFKSYHTYFVNKKEKALLEEFCFGVKANSKNCAGAKLNADIVGKPATWIAEQAGFTVPEGTNILAAECKEVGENEPLTREKLSPVIAVLKSESREDGITKARQMVEFNGLGHSAAIHTADEELTKEFGKAVKAIRVICNSPSTFGGIGDVYNAFLPSLTLGCGSYGRNSVGDNVSAINLLNIKKVGRRRNNMQWMKLPSKTYFERDSIQYLQKCRDVERVMIVTDHAMVELGFLDRIIEQLDLRRNKVVYQIFADVEPDPDITTVNRGTEIMRAFKPDTIIALGGGSPMDAAKVMWLFYEQPEVDFRDLVQKFMDIRKRAFKFPLLGKKTKFIAIPTTSGTGSEVTPFAVISDKANNRKYPIADYSLTPTVAIVDPALVLTVPGFVAADTGMDVLTHATEAYVSQMASDYTDGLALQAIKLVFENLESSVKNADFHSREKMHNASTIAGMAFANAFLGISHSMAHKIGAQFHTIHGRTNAILLPYVIRYNGTRPAKTATWPKYNYYRADEKYQDIARMLGLPASTPEEGVESYAKAVYELGERIGIQMNFRDQGIDEKEWKEHSRKLAFLAYEDQCSPANPRLPMVDHMQEIIEDAYYGYKERPGRRK

SEQ ID NO: 4223 - DNA, 408 bp, Streptococcus pneumoniae
gtggaaaatcttacgaatttttacgaaaagtatcgtgtctatctgactcgtccacgtttagagcttttggcagtagttaccattgttttctgtgctgtactcgtcttttttctaaatattccaggaaaaggtgtcttaaaactcgataatggaacgattgtttatgatggcagtcttgtccgcggtaaaatgaatggccaaggtaccattaccttccaaaatggagaccaatatacaggtggcttcaacaatggagccttcaacggaaaaggtacctttcaatctaaagaaggctggacctacgaaggtgattttgtaaatggtcaggctgaaggaaaagggaaactaacaacagaacaagaagtcgtttatgaaggaacttttaaacaaggcgtttttcaacaaaaa

SEQ ID NO: 4224 - protein, 136 aa, Streptococcus pneumoniae
  conserved hypothetical protein; Cellular location: membrane; Similar to strain R6 sequence 15903880 (9.E-78)
MENLTNFYEKYRVYLTRPRLELLAVVTIVFCAVLVFFLNIPGKGVLKLDNGTIVYDGSLVRGKMNGQGTITFQNGDQYTGGFNNGAFNGKGTFQSKEGWTYEGDFVNGQAEGKGKLTTEQEVVYEGTFKQGVFQQK

SEQ ID NO: 4225 - DNA, 426 bp, Streptococcus pneumoniae
atgaaaaaattagtctttgtctgtctgggaaatatttgccgtagccctatggccgagtttgttatgaaatcaatgacagataactacgaaatccaaagtcgagcaacttcctcttgggaacatggcaatccgattcataaggggactcagggaatttttcaagagtatgagattccttatgacaagaacaagacatcgcttcagattagtaaggaagattttgaagcctttgattatattatcggaatggacgcttcaaatatttctgacttacgtcagatgtgtccagtagactgtcaagataagatttactcattttcatctgaaagtgttccagacccttggtatacaggagattttgaagaaacctatcgacgtgttcaagagggctgtcaagcttggttagaacgtttagaaaaggagagt

SEQ ID NO: 4226 - protein, 142 aa, Streptococcus pneumoniae
  phosphotyrosine protein phosphatase; Similar to strain R6 sequence 15903881 (4.E-83)
MKKLVFVCLGNICRSPMAEFVMKSMTDNYEIQSRATSSWEHGNPIHKGTQGIFQEYEIPYDKNKTSLQISKEDFEAFDYIIGMDASNISDLRQMCPVDCQDKIYSFSSESVPDPWYTGDFEETYRRVQEGCQAWLERLEKES

SEQ ID NO: 4227 - DNA, 297 bp, Streptococcus pneumoniae
atgaatccaaatattacttttttaatcatgcttgtaggtatgatggccttgatgttctttatgcaacgttctcaaaagaaacaagctcaaaagcgtatggaaagcttaaataaactacaaaaaggctatgaagtgattacaatcggtggactttatggaacagtcgatgaagtagatacggagaagggaacaatagttcttgacgtagatggagtttacttgacttttgaactagctgctatcaagacagtattaccgctgaaagaaacagcttcactagaaggcgcaattgaaaaa

SEQ ID NO: 4228 - protein, 99 aa, Streptococcus pneumoniae
  preprotein translocase, YajC subunit (yajC); Cellular location: outside; Similar to strain R6 sequence 15903882 (3.E-51)
MNPNITFLIMLVGMMALMFFMQRSQKKQAQKRMESLNKLQKGYEVITIGGLYGTVDEVDTEKGTIVLDVDGVYLTFELAAIKTVLPLKETASLEGAIEK

SEQ ID NO: 4229 - DNA, 1974 bp, Streptococcus pneumoniae
atgtcaaatctatctgttaatgcaattcgttttctaggtattgacgccattaataaagccaactcaggtcatccaggtgtggttatgggagcggctccgatggcttacagcctctttacaaaacaacttcatatcaatccagctcaaccaaactggattaaccgcgaccgctttattctttcagcaggtcatggttcaatgctcctttatgctcttcttcacctttctggttttgaagatgtcagcatggatgagattaagagtttccgtcaatggggttcaaaaacaccaggtcacccagaatttggtcatacggcagggattgatgctacgacaggtcctctagggcaagggatttcaactgctactggttttgcccaagcagaacgtttcttggcagccaaatataaccgtgaaggttacaatatctttgaccactatacttacgttatctgtggagacggagacttgatggaaggtgtctcaagcgaggcagcttcatacgcaggcttgcaaaaacttgataagttggttgttctttatgattcaaatgatatcaacttggatggtgagacaaaggattcctttacagaaagtgttcgtgaccgttacaatgcctacggttggcatactgccttggttgaaaatggaacagacttggaagccatccatgctgctatcgaaacagcaaaagcttcaggcaagccatctttgattgaagtgaagacggttattggatacggttctccaaacaaacaaggaactaatgctgtacacggcgcccctcttggagcagatgaaactgcatcaactcgtcaagccctcggttgggactacgaaccatttgaaattccagaacaagtatatgctgatttcaaagaacatgttgcagaccgtggcgcatcagcttatcaagcttggactaaattagttgcagattataaagaagctcatccagaactggctgcagaagtagaagccatcatcgacggacgtgatccagtcgaagtgactccagcagacttcccagctttagaaaatggtttttctcaagcaactcgtaattcaagtcaagatgccttgaatgttgtggcagctaaattaccaacctttctaggtggatcagctgaccttgctcactcaaacatgacttatatcaagacggatggacttcaagacgatgccaatcgcttgaatcgtaacattcagtttggtgttcgtgaatttgcaatgggaacaatcttgaacgggatggcccttcatggtggacttcgtgtatacggtggaactttcttcgtcttctctgactatgtgaaggcagctgtccgcttgtcagccttacaaggacttcctgtgacttatgtctttacccatgattcaatcgcagttggggaagatggtccgactcatgaaccagttgagcatttagcaggtcttcgtgctatgccaaatctaaatgttttccgtccagcagatgcgcgtgaaacgcaagcagcttggtaccttgcagtgacaagtgagaaaacaccaactgcccttgtcttgacacgtcaaaatttgactgttgaagatggaacagacttcgacaaggttgctaaaggtgcttatgttgtatatgaaaatgcagccgactttgataccatcttgattgcgacaggttcagaggttaatcttgctgtctcagctgctaaagaattggctagtcaaggcgaaaaaatccgcgtagtcagcatgccatctacagatgtctttgataaacaagatgcagcttacaaggaagaaattcttccaaatgcagtccgccgtcgtgttgcagtcgaaatgggtgcaagtcaaaactggtacaaatatgttggtctcgatggtgccgttctaggtattgataccttcggagcctctgccccagcaccaaaagtattggcagaatatggctttactgtagaaaatcttgtaaaagttgttcgaaacttgaaa

SEQ ID NO: 4230 - protein, 658 aa, Streptococcus pneumoniae
  transketolase, FRAMESHIFT (recP); Cellular location: cytoplasm; Similar to strain R6 sequence 15903883 (0.E+01)
MSNLSVNAIRFLGIDAINKANSGHPGVVMGAAPMAYSLFTKQLHINPAQPNWINRDRFILSAGHGSMLLYALLHLSGFEDVSMDEIKSFRQWGSKTPGHPEFGHTAGIDATTGPLGQGISTATGFAQAERFLAAKYNREGYNIFDHYTYVICGDGDLMEGVSSEAASYAGLQKLDKLVVLYDSNDINLDGETKDSFTESVRDRYNAYGWHTALVENGTDLEAIHAAIETAKASGKPSLIEVKTVIGYGSPNKQGTNAVHGAPLGADETASTRQALGWDYEPFEIPEQVYADFKEHVADRGASAYQAWTKLVADYKEAHPELAAEVEAIIDGRDPVEVTPADFPALENGFSQATRNSSQDALNVVAAKLPTFLGGSADLAHSNMTYIKTDGLQDDANRLNRNIQFGVREFAMGTILNGMALHGGLRVYGGTFFVFSDYVKAAVRLSALQGLPVTYVFTHDSIAVGEDGPTHEPVEHLAGLRAMPNLNVFRPADARETQAAWYLAVTSEKTPTALVLTRQNLTVEDGTDFDKVAKGAYVVYENAADFDTILIATGSEVNLAVSAAKELASQGEKIRVVSMPSTDVFDKQDAAYKEEILPNAVRRRVAVEMGASQNWYKYVGLDGAVLGIDTFGASAPAPKVLAEYGFTVENLVKVVRNLK

SEQ ID NO: 4231 - DNA, 1089 bp, Streptococcus pneumoniae
atgccaaacgtcaaagaaattacaagagagtcatggattttagccactttcccagagtggggaacatggttgaacgaagaaatcgaagaagaagtcgtacctgaaggcaactttgccatgtggtggctaggcaactgtggtacttggattaagacaccagctggtgctaacgttgtcatggacctttggtcaaaccgtggaaaatcaaccaaaaaagtgaaagatatggttcgtgggcaccaaatggcaaatatggcaggtgttcgtaagctgcaaccaaacttgcgtgttcagccaatggttatcgatccatttgctatcaacgaactagactattacttagtttcacacttccacagtgatcatatcgacccatacacagctgcagcaattctcaataatcctaagttagagcatgttaagtttatcggtccttaccactgtggacgaatctgggaaggatggggtgttccaaaagaacgtatcatcgttgttaaaccaggtgacactatcgaattaaaagatatgaagattcatgcagtagaatcatttgaccgtacttgcttggtaactctcccagtgaacggtgctgatgagacaggcggtgaacttgctggcttggctgttacagatgaagaaatggctcaaaaggctgttaactatatctttgaaacaccaggtggaaccatctatcatggtgcagattctcacttctcaaactattttgcaaaacatggtaaagactttaaaattgatgttgctttgaataactatggtgaaaatccggtaggtatccaagacaaaatgacatctatcgaccttcttcgtatggcagaaaatctgcgtaccaaagtcattatcccagttcactatgatatctggtctaacttcatggcttctactaatgagattctagaactttggaaaatgcgaaaagatcgcttgcaatacgatttccatccatttatctgggaagttggcggtaagtacacttatcctcaagatcaacacttagtagaataccatcatccacgtggttttgatgattgttttgaacaagactctaacattcaatttaaagctttgcta

SEQ ID NO: 4232 - protein, 363 aa, Streptococcus pneumoniae
  conserved hypothetical protein; Cellular location: cytoplasm; Similar to strain R6 sequence 15903884 (0.E+01)
MPNVKEITRESWILATFPEWGTWLNEEIEEEVVPEGNFAMWWLGNCGTWIKTPAGANVVMDLWSNRGKSTKKVKDMVRGHQMANMAGVRKLQPNLRVQPMVIDPFAINELDYYLVSHFHSDHIDPYTAAAILNNPKLEHVKFIGPYHCGRIWEGWGVPKERIIVVKPGDTIELKDMKIHAVESFDRTCLVTLPVNGADETGGELAGLAVTDEEMAQKAVNYIFETPGGTIYHGADSHFSNYFAKHGKDFKIDVALNNYGENPVGIQDKMTSIDLLRMAENLRTKVIIPVHYDIWSNFMASTNEILELWKMRKDRLQYDFHPFIWEVGGKYTYPQDQHLVEYHHPRGFDDCFEQDSNIQFKALL

SEQ ID NO: 4233 - DNA, 1671 bp, Streptococcus pneumoniae
atggtactggataaggcaagttgtgatttgcttcaatatttgatggatcaagaaacgtccaaaacgattatggcgatttcgaaagatttgaaagagtcaagaaggaaaatttattatcacattgacaaaatcaatgctgctctgggtgacgaggcgcttcacatcattagtattccacgaattggtattcacttaacggaagagcagagagatgcttgttgtaaactattatcggaagtagattcgtacgattatatcatgagtgcgcatgaacgtatgatgataatgttactatggataggtatttctaaagaacgtattacgattgaaaaattgatagagttaacagaggtatctaggaatactgttctcaatgatttgaatagtattcgttatcaactaactttggaacaatatcaggtgatcttgcaagtgagcaagtcacagggatacaaccttcatgcccaccctcttaataaaattcagtatcttcaatcgcttctatatcatatttttatggaagaaaatgccacttttgtatctattttagaagataagatgaaagagaggttagatgatgagtgtttgctttctgttgaaatgaaccaattttttaaggaacaggttcctttagttgaacaagatttagggaagaaaataaaccatcatgaaataacttttatgttgcaggttctaccttatttgctgttaagctgtcataatgttgaacagtatcaagaaagacatcaggatatagagaaagaattttctttgataagaaaaagaatagagtatcaggtgtctaagaaattaggagaacggttgtttcaaaagtttgaaatttctttgtcaggacttgaagtttctcttgtagctgttctcctcctctcctatcgtaaagatttggatattcatgcagaaagtgatgattttcggcaattaaaacttgctttagaagaatttatctggtattttgaatcacaaatccgaatggagattgagaacaaggatgatttgttacgaaatttgatgatccactgtaaagccttgttatttagaaagacttacggtattttttctaaaaatcctctaacaaaacaaattcgatccaagtatggagaattatttttagtcactagaaaatctgcggaaattttagaaggagcatggtttattcggctaacagacgatgatattgcctatttgacgattcatattggaggatttttaaaatatacaccatcatctcaaaaaaatatgaaaaaagtttatctcgtttgtgatgaaggtgttgcggtttcgagacttttgctgaaacaatgcaaactttattttccaaatgagcaaattgacactgtatttacaacagaacaatttaagagtgtggaagatattgcacaagttgatgtagtgattactactaatgatgatttggatagcagatttccgattttaagggttaatcctatccttgaagcagaagatattttgaaaatgctagactatcttaaacacaatatatttcgtaataagagcaaaagtttcagtgaaaatctttctagtcttatttcgtcttatattgtagacagcaagttggctagtaagttccaagaagaggttcaaacacttataaatcaagaaatagtagttcaagcttttttggaagatatt

SEQ ID NO: 4234 - protein, 557 aa, Streptococcus pneumoniae
  transcriptional regulator, BglG family; Cellular location: membrane; Similar to strain R6 sequence 15903885 (0.E+01)
MVLDKASCDLLQYLMDQETSKTIMAISKDLKESRRKIYYHIDKINAALGDEALHIISIPRIGIHLTEEQRDACCKLLSEVDSYDYIMSAHERMMIMLLWIGISKERITIEKLIELTEVSRNTVLNDLNSIRYQLTLEQYQVILQVSKSQGYNLHAHPLNKIQYLQSLLYHIFMEENATFVSILEDKMKERLDDECLLSVEMNQFFKEQVPLVEQDLGKKINHHEITFMLQVLPYLLLSCHNVEQYQERHQDIEKEFSLIRKRIEYQVSKKLGERLFQKFEISLSGLEVSLVAVLLLSYRKDLDIHAESDDFRQLKLALEEFIWYFESQIRMEIENKDDLLRNLMIHCKALLFRKTYGIFSKNPLTKQIRSKYGELFLVTRKSAEILEGAWFIRLTDDDIAYLTIHIGGFLKYTPSSQKNMKKVYLVCDEGVAVSRLLLKQCKLYFPNEQIDTVFTTEQFKSVEDIAQVDVVITTNDDLDSRFPILRVNPILEAEDILKMLDYLKHNIFRNKSKSFSENLSSLISSYIVDSKLASKFQEEVQTLINQEIVVQAFLEDI

SEQ ID NO: 4235 - DNA, 681 bp, Streptococcus pneumoniae
atgcgtaaacgagtctgtgatgccaatcaatcattgccaaaacatggacttgtcaaatttacctgggggaatgtatctgaagttaatcgcgaactcggtgtcattgttatcaaaccatcaggcgtggattatgacgaattgacacctgaaaacatggtagtgactgatctagatggtaagatcctagaaggggatttaagaccatcttccgacctcccaactcatgtgcaattatataagacttggtcagaaattggtagtgtggttcacacccattcgacagaagctgttggttgggctcaggcaggtcgtgatattcctttctacggaacaacccatgcagattatttctacggttcaatcccttgcgcccgtagtttgaccaaggacgaagtagaagtggcctatgaaaaagatactggcctggttatcgtagaagagtttgaacatcgcggacttaacccggttgaagtaccaggaattgttgtacgcaatcacggtccattcacctggggcaaaaatccagagaatgctgtttatcactctgtcgtactagaggaagtatcaaagatgaatcgctttacagaacaaatcaatccaagagttggacctgctccccagtacatactagaaaaacactaccaacgtaaacatggaccaaatgcttattatggtcaaaag

SEQ ID NO: 4236 - protein, 227 aa, Streptococcus pneumoniae
  L-ribulose 5-phosphate 4-epimerase AraD, putative; Cellular location: cytoplasm; Similar to strain R6 sequence 15903886 (e-135)
MRKRVCDANQSLPKHGLVKFTWGNVSEVNRELGVIVIKPSGVDYDELTPENMVVTDLDGKILEGDLRPSSDLPTHVQLYKTWSEIGSVVHTHSTEAVGWAQAGRDIPFYGTTHADYFYGSIPCARSLTKDEVEVAYEKDTGLVIVEEFEHRGLNPVEVPGIVVRNHGPFTWGKNPENAVYHSVVLEEVSKMNRFTEQINPRVGPAPQYILEKHYQRKHGPNAYYGQK

SEQ ID NO: 4237 - DNA, 861 bp, Streptococcus pneumoniae
atggtacgtccaattggaatttatgaaaaggcaaccccaacacactgtacttggctagaacgtttaaattttgccaaggagttaggctttgattttgtcgagatgtctattgacgaacgtgacgagcgtttagcaagacttgactggagtaaggaagaacgcttggaagttgtcaaagcaatctatgaaactggtgttcgtattccttctatctgtttttcaggccatcgtcgctacccattgggttcaaaagatccagttctagaggaaaaatctctagaactcatgaaaaaatgtatcgaattagctcaagacttgggagttcgtacgattcaattagctggttacgatgtttactatgaggaaaagtcaccccagacacgccaacgttttatcaaaaatttgagaaaagcctgtgactgggctgaagaagctcaggtggtacttgctattgaaattatggatgatcctttcatcagtagcatcgaaaaatatttggctatagaaaaagagattgactctcccttcctctttgtatatccagatattggtaatgtgtctgcatggcataatgatatctatagtgagttttatcttggtcatcatgccatcgcagctctccatctcaaggatacttatgcagtgacagaaagttcaaagggccagttccgagatgtacctttcgggcaaggttgtgtcaaatgggaagaagctttcgatattttaaaggaaaccaattataatggacctttcctaatcgaaatgtggtctgaaaattgtgaaacagtagaagaaacacgcgcagccattcaagaggcgcaagcttttctctatccactcattaagaaagcaggtttgatg

SEQ ID NO: 4238 - protein, 287 aa, Streptococcus pneumoniae
  hexulose-6-phosphate isomerase, putative; Cellular location: cytoplasm; Similar to strain R6 sequence 15903887 (e-168)
MVRPIGIYEKATPTHCTWLERLNFAKELGFDFVEMSIDERDERLARLDWSKEERLEVVKAIYETGVRIPSICFSGHRRYPLGSKDPVLEEKSLELMKKCIELAQDLGVRTIQLAGYDVYYEEKSPQTRQRFIKNLRKACDWAEEAQVVLAIEIMDDPFISSIEKYLAIEKEIDSPFLFVYPDIGNVSAWHNDIYSEFYLGHHAIAALHLKDTYAVTESSKGQFRDVPFGQGCVKWEEAFDILKETNYNGPFLIEMWSENCETVEETRAAIQEAQAFLYPLIKKAGLM

SEQ ID NO: 4239 - DNA, 663 bp, Streptococcus pneumoniae
atgacaaaaagaatacctaatttacaagttgcattagaccattcagacttgcaaggagcgattaaagcagctgtttctgttggtcaggaagtagatattatcgaagctggaactgtttgcttgcttcaagttggaagtgaactggctgaagtcttgcgtagccttttcccagataagattattgtggcagacacaaaatgtgctgatgctggtggaacagttgctaaaaataatgcggttcgtggagcagactggatgacttgtatctgttgtgcaaccatccctactatggaagcagctctaaaggctatcaagactgaacgaggagaacgaggcgaaatccagatcgagctttatggcgattggacttttgaacaagctcagctttggctagatgcaggtatctcacaagctatttatcaccaatctcgtgatgctcttcttgctggtgaaacttggggtgaaaaagaccttaataaggttaaaaaactcattgacatgggcttccgtgtatctgtaacaggtggtctagatgtagatactctcaaactctttgaaggtattgatgtctttacctttatcgcaggtcgtggaattacagaggctgtggatccagcaggagcagcgcgtgccttcaaggatgaaatcaaacgaatttggggg

SEQ ID NO: 4240 - protein, 221 aa, Streptococcus pneumoniae
  hexulose-6-phosphate synthase, putative; Cellular location: cytoplasm; Similar to strain R6 sequence 15903888 (e-125)
MTKRIPNLQVALDHSDLQGAIKAAVSVGQEVDIIEAGTVCLLQVGSELAEVLRSLFPDKIIVADTKCADAGGTVAKNNAVRGADWMTCICCATIPTMEAALKAIKTERGERGEIQIELYGDWTFEQAQLWLDAGISQAIYHQSRDALLAGETWGEKDLNKVKKLIDMGFRVSVTGGLDVDTLKLFEGIDVFTFIAGRGITEAVDPAGAARAFKDEIKRIWG

SEQ ID NO: 4241 - DNA, 483 bp, Streptococcus pneumoniae
atgaatttaaaacaagctttaattgacaatgactcgatccgactaggtttagaggctaacaattggaaagaagcagtcaaggtagcagtagatcccttaattgaaagtggggcaattttgccagagtattacgatgctatcattgaatcgactgaagagtatgggccttactatatcttgatgccaggtatggctatgccccacgctagacctgaagcaggtgtgcaaagtgatgccttttcattgattaccttacaaaatcctgttgtattttcagatgggaaagaggtatctgttttgttggcactagcagcaacaagttcaaaaattcacacaagtgtagccattccacaaattattgccctatttgaattagaagattctattgcacgtttacaggcttgccagactaaagaagatgtcttggctatgattgaagaatctaaggatagcccttatctcgaaggattggatttggaaagt

SEQ ID NO: 4242 - protein, 161 aa, Streptococcus pneumoniae
  PTS system, IIA component; Cellular location: cytoplasm; Similar to strain R6 sequence 15903889 (3.E-87)
MNLKQALIDNDSIRLGLEANNWKEAVKVAVDPLIESGAILPEYYDAIIESTEEYGPYYILMPGMAMPHARPEAGVQSDAFSLITLQNPVVFSDGKEVSVLLALAATSSKIHTSVAIPQIIALFELEDSIARLQACQTKEDVLAMIEESKDSPYLEGLDLES

SEQ ID NO: 4243 - DNA, 279 bp, Streptococcus pneumoniae
atggttaaagtattagcagcgtgcggaaatggaatgggttcatcaatggttatcaagatgaaggttgaaaatgctctccgtaagcttaatcaaacagattttacagtcaattcatgcagtgtcggtgaagctaaaggtttagcagtaggatatgacatcgtaatcgcttctcttcatttgattcaagaattggaagggcgaactaatgggaagttaattgggcttgataacttgatggatgataaagaaatcaccgaaaaactcagtcaagcactacag

SEQ ID NO: 4244 - protein, 93 aa, Streptococcus pneumoniae
  PTS system, IIB component; Cellular location: cytoplasm; Similar to strain R6 sequence 15903890 (5.E-48)
MVKVLAACGNGMGSSMVIKMKVENALRKLNQTDFTVNSCSVGEAKGLAVGYDIVIASLHLIQELEGRTNGKLIGLDNLMDDKEITEKLSQALQ

SEQ ID NO: 4245 - DNA, 1524 bp, Streptococcus pneumoniae
ttggtctttttgtttgcgctttcgcattatataataaacttacaaaaacaattcaaaaggagaacaattatggaagtcgtttcaagtgttctaaattggttttctagcaatattttgcagaatcccgcatttttcgtaggtttattggtgttgataggatatgcacttttgaaaaaacctgcccatgacgttttttcagggtttgttaaagcaacagtagggtatatgttgcttaacgtgggtgctggtggtttggttacaacctttcgtccaatcttagcagctcttaactacaaattccaaattggtgcagcggttatcgacccttactttggacttgctgcagcaaacaacaaaattgtagcagagtttccagattttgttggaactgcaactacagctctattgattggttttggaataaatatcttgctcgtagctcttcgaaagattacgaaggtaagaaccctctttattactggtcacatcatggtacaacaagctgcaacagtatctcttatggttctattcttagtaccacaattgcgcaatgcttacggtacagcagcgattggtatcatctgtggactttactgggcagttagttcaaatatgactgttgaggcaactcaacgcttgactggtggtggcggatttgcgattggtcaccaacagcaatttgcaatctggtttgtagataaagtagcaggacgctttggtaagaaagaagaaagtttagacaatcttaaattacctaagttcctctcaatcttccacgatacagttgttgcatctgctaccttgatgctcgtattcttcggagccattcttttaatcttgggtccagacattatgtctaataaagaagtcatcacttcaggaactctattcaatcctgctaaacaagatttctttatgtacattatccaaacagcctttaccttctcagtttacttgttcgttttgatgcaaggtgtccgaatgttcgtatctgagttgacaaacgccttccaaggtatttcaaacaaattgttgccaggttcattcccagcggttgacgttgcagcttcttatggatttggttctccaaatgctgtcttgtcaggatttacctttggtttgattggtcaattgattacaattgttttgctcatcgtctttaaaaatccgattcttattattacaggatttgtaccagtgttctttgacaatgcagccattgcggtctacgctgataaacgcggcggatggaaagcggctgttatcctttcctttatatcaggtgtccttcaagttgctctaggagctctttgtgtggcccttctcgatttggcatcttatggtggctaccatggaaatatcgactttgaattcccatggcttggatttggatatatcttcaaataccttggtattgttggttatgtacttgtgtgtctcttcttgcttgttattcctcaacttcaatttgccaaagcaaaagataaagagaaatattacaacggtgaagttcaagaagaagct

SEQ ID NO: 4246 - protein, 508 aa, Streptococcus pneumoniae
  PTS system, membrane component, putative; Cellular location: membrane; Similar to strain R6 sequence 15903891 (0.E+01)
MVFLFALSHYIINLQKQFKRRTIMEVVSSVLNWFSSNILQNPAFFVGLLVLIGYALLKKPAHDVFSGFVKATVGYMLLNVGAGGLVTTFRPILAALNYKFQIGAAVIDPYFGLAAANNKIVAEFPDFVGTATTALLIGFGINILLVALRKITKVRTLFITGHIMVQQAATVSLMVLFLVPQLRNAYGTAAIGIICGLYWAVSSNMTVEATQRLTGGGGFAIGHQQQFAIWFVDKVAGRFGKKEESLDNLKLPKFLSIFHDTVVASATLMLVFFGAILLILGPDIMSNKEVITSGTLFNPAKQDFFMYIIQTAFTFSVYLFVLMQGVRMFVSELTNAFQGISNKLLPGSFPAVDVAASYGFGSPNAVLSGFTFGLIGQLITIVLLIVFKNPILIITGFVPVFFDNAAIAVYADKRGGWKAAVILSFISGVLQVALGALCVALLDLASYGGYHGNIDFEFPWLGFGYIFKYLGIVGYVLVCLFLLVIPQLQFAKAKDKEKYYNGEVQEEA

SEQ ID NO: 4247 - DNA, 621 bp, Streptococcus pneumoniae
atgttgaataagataagagactatttagactttgctggtttgcagtaccgtaatcctgataaagcgggagcagagcgagagaagatgctggcattccgccacaaaggacaagaggcccgaaaggtttttacagaactggccaaagcctttcaagcaagccatccagaatggcaactccaacagactagccagtggatgaatcaggcccagcgtttgagaccacatttttgggtttatctacagagagacggacaagtgacagaacctatgatggccttacgtttgtatgggacatctactgactttggaatttctttggaagtcagtttcatcgaacgtaagaaggatgagcaaacactgggcaagcaggccaaagttttagacattccaaccgttaaagggatttattatctaacctactctaatggtcaaagtcaacggtgggaggcgaatgaagaaaagcgtcgtactttacgcgagaaggtgagaagtcaagaagttcgaaaagttttagtgaaggtagatgttcctatgacagaaaattcgtctgaagaagaaatcgtagaaggcttattgaagtcttattctaaaattcttccctattatctagctacgagaaaa

SEQ ID NO: 4248 - protein, 207 aa, Streptococcus pneumoniae
  conserved hypothetical protein; Cellular location: cytoplasm; Similar to strain R6 sequence 15903892 (e-118)
MLNKIRDYLDFAGLQYRNPDKAGAEREKMLAFRHKGQEARKVFTELAKAFQASHPEWQLQQTSQWMNQAQRLRPHFWVYLQRDGQVTEPMMALRLYGTSTDFGISLEVSFIERKKDEQTLGKQAKVLDIPTVKGIYYLTYSNGQSQRWEANEEKRRTLREKVRSQEVRKVLVKVDVPMTENSSEEEIVEGLLKSYSKILPYYLATRK

SEQ ID NO: 4249 - DNA, 984 bp, Streptococcus pneumoniae
gtggtagtatttacaggttcaactgttgaagaagcaatccagaaaggattgaaagaattagatattccaagaatgaaggctcatatcaaagtcatttctagggagaaaaaaggctttcttggtctatttggtaaaaaaccagcccaagtggatattgaagcgattagtgaaacgactgttgtcaaagcaaatcaacaggtagtaaaaggcgttccgaaaaaaatcaatgatttgaacgagcctgtgaagacggttagtgaagaaaccgttgaccttggtcatgtggttgatgctattaaaaaaatagaggaagaaggtcaaggtatttctgatgaagtcaaggctgaaatcttaaaacatgaaagacatgccagcactatcttagaagaaactggtcacattgagattttaaatgaacttcaaatcgaggaagcgatgagggaagaagcaggcgctgatgaccttgaaactgagcaagaccaagctgaaagtcaagaactagaagacttgggcttgaaagttgaaacgaactttgatattgaacaagtagctacggaagtaatggcttatgttcaaacgattattgatgacatggatgttgaggctacactttcaaatgattataaccgtcgtagcatcaatctacaaattgacaccaacgaaccaggtcgtattatcggctaccatggtaaagtcttgaaggccttgcaactgttggctcaaaattatctttacaaccgctattccagaaccttctacgttacaatcaatgtcaatgattatgtcgaacaccgtgcagaagtcttgcagacctatgcgcaaaaattggcgactcgtgttttggaagaagggcgcagtcataaaacagatccaatgtcaaatagcgaacgcaagattatccatcgtattatttcacgtatggatggcgtgactagttactctgaaggtgatgagccaaatcgctatgttgttgtagatacagaa

SEQ ID NO: 4250 - protein, 328 aa, Streptococcus pneumoniae
  jag protein, putative; Cellular location: cytoplasm; Similar to strain R6 sequence 15903893 (0.E+01)
MVVFTGSTVEEAIQKGLKELDIPRMKAHIKVISREKKGFLGLFGKKPAQVDIEAISETTVVKANQQVVKGVPKKINDLNEPVKTVSEETVDLGHVVDAIKKIEEEGQGISDEVKAEILKHERHASTILEETGHIEILNELQIEEAMREEAGADDLETEQDQAESQELEDLGLKVETNFDIEQVATEVMAYVQTIIDDMDVEATLSNDYNRRSINLQIDTNEPGRIIGYHGKVLKALQLLAQNYLYNRYSRTFYVTINVNDYVEHRAEVLQTYAQKLATRVLEEGRSHKTDPMSNSERKIIHRIISRMDGVTSYSEGDEPNRYVVVDTE

SEQ ID NO: 4251 - DNA, 828 bp, Streptococcus pneumoniae
atgggagtgaaaaagaaactaaagttgactagtttgctaggactgtctctgttaatcatgacagcctgtgcgactaatggggtaactagcgatattacagccgaatcggctgatttttggagtaaattggtttacttctttgcggaaatcattcgctttttatcgtttgatattagtatcggagtggggattattctctttacggtcttgattcgtacagtcctcttgccagtctttcaggtgcaaatggtggcttctaggaaaatgcaggaagctcagccacgcattaaggcgcttcgagaacaatatccaggtcgagatatggaaagcagaaccaaactagagcaggaaatgcgtaaagtatttaaagaaatgggtgtcagacagtcagactctctttggccgattttgattcagatgccggttattttggccctgttccaagccctatcaagagttgactttttaaagacaggtcatttcttatggattaaccttggtagtgtggatacaacccttgttcttccgattttagcagcagtattcacctttttaagtacttggttgtccaacaaagctttgtctgagcgaaatggcgctacgactgcgatgatgtatgggattccagtcttgatttttatctttgcagtttatgcgccaggtggagtcgccctatactggacagtgtctaatgcttatcaagtcttgcaaacctatttcttgaataatccattcaagattatcgcagagcgcgaggccgtagtacaggcacaaaaagatttggaaaatagaaaaagaaaagccaagaaaaaggctcagaaaacgaaa

SEQ ID NO: 4252 - protein, 276 aa, Streptococcus pneumoniae
  inner membrane protein, 60 kDa; Cellular location: membrane; Similar to strain R6 sequence 15903894 (e-152)
MGVKKKLKLTSLLGLSLLIMTACATNGVTSDITAESADFWSKLVYFFAEIIRFLSFDISIGVGIILFTVLIRTVLLPVFQVQMVASRKMQEAQPRIKALREQYPGRDMESRTKLEQEMRKVFKEMGVRQSDSLWPILIQMPVILALFQALSRVDFLKTGHFLWINLGSVDTTLVLPILAAVFTFLSTWLSNKALSERNGATTAMMYGIPVLIFIFAVYAPGGVALYWTVSNAYQVLQTYFLNNPFKIIAEREAVVQAQKDLENRKRKAKKKAQKTK

SEQ ID NO: 4253 - DNA, 369 bp, Streptococcus pneumoniae
ttgaagaaaaactttcgtgtaaaaagagagaaagattttaaggcgattttcaaggaggggacaagttttgctaatcgcaaatttgtggtctaccaattagaaaaccagaaaaaccgttttcgagtaggtctatcagttagcaaaaaactggggaatgccgtcactagaaatcaaattaagcgacggattcggcatattatccagaatgcaaaagggagtctggtagaagatgtcgactttgttgtcattgctcgaaaaggagtcgaaaccttgggatacgcagagatggagaaaaatctactccatgtattaaaattatcaaagatttaccgggaaggaaatgggagtgaaaaagaaactaaagttgac

SEQ ID NO: 4254 - protein, 123 aa, Streptococcus pneumoniae
  ribonuclease P protein component (rnpA); Cellular location: cytoplasm; Similar to strain R6 sequence 15903895 (4.E-65)
MKKNFRVKREKDFKAIFKEGTSFANRKFVVYQLENQKNRFRVGLSVSKKLGNAVTRNQIKRRIRHIIQNAKGSLVEDVDFVVIARKGVETLGYAEMEKNLLHVLKLSKIYREGNGSEKETKVD

SEQ ID NO: 4255 - DNA, 129 bp, Streptococcus pneumoniae
gtgaaactaaaaaaatattcaatacaaggagttgggaaagttatttttccagcttctttttctgatgaaattgtccaaaaccttgctatgattggcttttttgaaaaatatggtataatagtagtaatt

SEQ ID NO: 4256 - protein, 43 aa, Streptococcus pneumoniae
  hypothetical protein; Cellular location: cytoplasm
MKLKKYSIQGVGKVIFPASFSDEIVQNLAMIGFFEKYGIIVVI

SEQ ID NO: 4257 - DNA, 1188 bp, Streptococcus pneumoniae
atgacaaaaacaattgcaatcaatgcaggaagttcaagtttgaaatggcaattatacttaatgccagaagaaaaagtattggcgaaaggtttgattgaacgtatcggtttgaaagattcaatttcaactgtaaaatttgacggccgttctgaacaacaaattttggatattgaaaatcatatacaagccgttaaaattttattggatgacttgattcgtttcgatattatcaaggcttatgacgagattacaggtgttggacatcgtgttgttgctggtggagaatatttcaaagaatcaacagttgttgagggagatgttttagaaaaagttgaagagttgagtttgttggctcctctacacaacccggccaatgcagcaggtgttcgtgccttcaaggaattgttgccagacattaccagtgtagttgtttttgatacttccttccacacaagtatgccagagaaagcttatcgctaccctctaccaacaaaatattacacagaaaacaaggttcgtaaatacggtgctcatggtacaagtcaccagtttgtagcaggagaagctgcaaaactcttgggacgtccattagaagacttgaagttaattacctgtcatattggtaacggaggctcaattacagctgtgaaagccggcaaatctgtagacacttctatggggttcactcctcttggtggtattatgatgggaacgcgtacaggggatattgatccagctatcattccttatttaatgcaatatacagaggattttaacacaccagaagatatcagtcgtgttcttaaccgtgaatcaggtcttttgggagtttctgctaattctagcgatatgcgcgatatagaagcagctgtagcagaagggaatcacgaggctagcttggcttatgaaatgtatgttgaccgtatccaaaaacatatcggtcagtaccttgcagtgctaaatggagcagatgccattgttttcacagcaggtgtcggtgaaaatgcagagagtttccgtcgtgatgtaatctcagggatttcgtggtttggttgtgatgttgatgatgaaaagaatgtctttggcgttacaggagacatctcaacagaggcagctaaaatccgtgtcttggttattccaacagatgaagaattagtcattgcccgtgacgttgaacgcttgaaaaaa

SEQ ID NO: 4258 - protein, 396 aa, Streptococcus pneumoniae
  acetate kinase (ackA); Cellular location: cytoplasm; Similar to strain R6 sequence 15903896 (0.E+01)
MTKTIAINAGSSSLKWQLYLMPEEKVLAKGLIERIGLKDSISTVKFDGRSEQQILDIENHIQAVKILLDDLIRFDIIKAYDEITGVGHRVVAGGEYFKESTVVEGDVLEKVEELSLLAPLHNPANAAGVRAFKELLPDITSVVVFDTSFHTSMPEKAYRYPLPTKYYTENKVRKYGAHGTSHQFVAGEAAKLLGRPLEDLKLITCHIGNGGSITAVKAGKSVDTSMGFTPLGGIMMGTRTGDIDPAIIPYLMQYTEDFNTPEDISRVLNRESGLLGVSANSSDMRDIEAAVAEGNHEASLAYEMYVDRIQKHIGQYLAVLNGADAIVFTAGVGENAESFRRDVISGISWFGCDVDDEKNVFGVTGDISTEAAKIRVLVIPTDEELVIARDVERLKK

SEQ ID NO: 4259 - DNA, 951 bp, Streptococcus pneumoniae
atggattttgaaaaaattgaacaagcttatacctatttactagagaatgtccaagtcatccaaagtgatttggcgaccaacttttatgacgccttggtggagcaaaatagcatctatctggatggtgaaactgagctaaaccaggtcaaggagaacaatcaaacccttaagcgtttagcactacgcaaagaagaatggctcaagacctaccagtttctcttgatgaaggctgggcaaacagaacccttgcaggccaatcaccagtttacaccggatgctattgctttgcttttggtgtttattgtggaagagttgtttaaagaggaggaaattactatcctcgaaatgggttctgggatgggaattctaggcgctattttcttgacctcgcttactaaaaaggtggattacttgggaatggaagtggatgatttgctgattgatctggcagctagcatggcagatgtaattggtttgcaggctggctttgtccaaggagatgccgttcgcccacaaatgctcaaagaaagcgatgtggtcatcagtgacttgcctgtcggctattatcctgatgatgccgttgcgtcgcgccatcaagttgcttctagccaagaacatacttacgcccatcacttgctcatggaacaagggcttaagtacctcaagtcagacggatacgctatttttctagctccgagtgatttgttgaccagtcctcaaagtgatttgttaaaagaatggctgaaagaagaggcgagtctggttgctatgattagtctgcctgaaaatctctttgctaatgccaaacaatctaagactatttttatcttacagaagaaaaatgaaatagcagtagagccttttgtttatccacttgctagcttgcaagatgcaagtgttttaatgaaatttaaagaaaattttcaaaaatggactcaaggtactgaaata

SEQ ID NO: 4260 - protein, 317 aa, Streptococcus pneumoniae
  conserved hypothetical protein; Cellular location: membrane; Similar to strain R6 sequence 15903897 (e-178)
MDFEKIEQAYTYLLENVQVIQSDLATNFYDALVEQNSIYLDGETELNQVKENNQTLKRLALRKEEWLKTYQFLLMKAGQTEPLQANHQFTPDAIALLLVFIVEELFKEEEITILEMGSGMGILGAIFLTSLTKKVDYLGMEVDDLLIDLAASMADVIGLQAGFVQGDAVRPQMLKESDVVISDLPVGYYPDDAVASRHQVASSQEHTYAHHLLMEQGLKYLKSDGYAIFLAPSDLLTSPQSDLLKEWLKEEASLVAMISLPENLFANAKQSKTIFILQKKNEIAVEPFVYPLASLQDASVLMKFKENFQKWTQGTEI

SEQ ID NO: 4261 - DNA, 378 bp, Streptococcus pneumoniae
atgttggagcaagctcgtttgaaagtggagcagcaagcaatcaagaatatccagtttttggagcaagatttaccgaaaaatcccttggagaaagagtttgattgccttgctgttagtcgggttcttcatcatatgcctgatttggatgcggctctctcactgtttcatcaacatttgaaggaagatgggaaactcatcattgctgattttaccaagacagaagctaatcatcatggatttgatttagctgaactggaaaacaagctaattgagcatggtttttcatctgtgcatagtcagattctctatagtgctgaagacctgtttcaaggaaatcactcagaattctttttaatagtagcccaaaaatcactcgcc

SEQ ID NO: 4262 - protein, 126 aa, Streptococcus pneumoniae
  ubiquinone/menaquinone biosynthesis methlytransferase, putative, FRAMES
MLEQARLKVEQQAIKNIQFLEQDLPKNPLEKEFDCLAVSRVLHHMPDLDAALSLFHQHLKEDGKLIIADFTKTEANHHGFDLAELENKLIEHGFSSVHSQILYSAEDLFQGNHSEFFLIVAQKSLA

SEQ ID NO: 4263 - DNA, 180 bp, Streptococcus pneumoniae
atgaaacatgattttaaccacaaagcagaaactttcgattcccctaaaaatatcttcctcgcaaacttggtatgtcaagcagccgagaaacagattgatcttctatcagacaaagaaattttagatttcggtggtggcacgggtctattagccttgcccctaacccctagccaagcaggc

SEQ ID NO: 4264 - protein, 60 aa, Streptococcus pneumoniae
  hypothetical protein
MKHDFNHKAETFDSPKNIFLANLVCQAAEKQIDLLSDKEILDFGGGTGLLALPLTPSQAG

SEQ ID NO: 4265 - DNA, 411 bp, Streptococcus pneumoniae
gtgtggaaaaagaaaaaagttaaggcaggtgttctcctctacgcagtcaccatagcagccatctttagtcttttgttgcaattttatttgaaccgacaagtcgcccactatcaagactatgctttgaataaagaaaaattggttgcttttgctatggctaaacgaaccaaagataaggttgagcaagaaagtggggaacagttttttaatctaggtcaggtaagctatcaaaacaagaaaactggcttagtgacgagggttcgtacggataagagccaatatgagtttctgtttccttcagtcaaaatcaaagaagagaaaagagataaaaaggaagaggtagcgaccgattcaagcgaaaaagtggagaagaaaaaatcagaagagaagcctgaaaagaaagagaattca

SEQ ID NO: 4266 - protein, 137 aa, Streptococcus pneumoniae
  conserved domain protein; Cellular location: outside; Similar to strain R6 sequence 15903900 (5.E-74)
MWKKKKVKAGVLLYAVTIAAIFSLLLQFYLNRQVAHYQDYALNKEKLVAFAMAKRTKDKVEQESGEQFFNLGQVSYQNKKTGLVTRVRTDKSQYEFLFPSVKIKEEKRDKKEEVATDSSEKVEKKKSEEKPEKKENS

SEQ ID NO: 4267 - DNA, 345 bp, Streptococcus pneumoniae
atgagtcagctcctcatttcagaagttcgctaccagcaacaaagcgagcaaaaggagtggctcttgtttgtggaccaacttgaggtagaattagaccgttcgcagttcgaaaaagtagaaggcaatcgcctatacatgaagcaagatggcaaggacatcgccatcggtaagtcaaagtcagatgatttccgtaaaacgaatgctcgtggtcgaggttatcagcctatggtttatggactcaaatctgtacggattacagaggacaatcaactggttcgctttcatttccagttccaaaaaggcttagaaagggagttcatctatcgtgtggaaaaagaaaaaagt

SEQ ID NO: 4268 - protein, 115 aa, Streptococcus pneumoniae
  conserved hypothetical protein; Cellular location: membrane; Similar to strain R6 sequence 15903901 (4.E-84)
MSQLLISEVRYQQQSEQKEWLLFVDQLEVELDRSQFEKVEGNRLYMKQDGKDIAIGKSKSDDFRKTNARGRGYQPMVYGLKSVRITEDNQLVRFHFQFQKGLEREFIYRVEKEKS

SEQ ID NO: 4269 - DNA, 258 bp, Streptococcus pneumoniae
gtgattttactggaagcagtagtcgctctagctatctttgccagcattgcgaccctccttttgggacaaattcaaaaaaataggcaagaggaagcaaaaatcttgcaaaaggaagaagtcttgagggtagctaagatggccctgcagacggggcaaaatcaggtaagcatcaacggagttgagattcaggtattttctagtgaaaaaggattggaggtctaccatggttcagaacagttgttggcaatcaaagagcca

SEQ ID NO: 4270 - protein, 86 aa, Streptococcus pneumoniae
  conserved hypothetical protein; Cellular location: outside
MILLEAVVALAIFASIATLLLGQIQKNRQEEAKILQKEEVLRVAKMALQTGQNQVSINGVEIQVFSSEKGLEVYHGSEQLLAIKEP

SEQ ID NO: 4271 - DNA, 426 bp, Streptococcus pneumoniae
atggaggagcaaatcgtaaagtcaatgattaaggcctttaccatgctggaaagtctcttggttttgggacttgtgagtatccttgccttgggcttgtccggctctgtccagtccactttttcagcggtagaggaacagattttctttatggagtttgaagaactctatcgggaaacccaaaaacgcagtgtagccagtcagcaaaagactagtctgaacttagatgggcagacgcttagcaatggcagtcaaaagttgccagtccctaaaggaattcaggccccatcaggccaaagtattacatttgaccgagctgggggcaattcgtccctggctaaggttgaatttcagaccagtaaaggagcgattcgctatcaattatatctaggaaatggaaaaattaaacgcattaaggaaacaaaaaat

SEQ ID NO: 4272 - protein, 142 aa, Streptococcus pneumoniae
  competence protein CglD (cglD); Cellular location: outside; Similar to strain R6 sequence 15903902 (3.E-68)
MEEQIVKSMIKAFTMLESLLVLGLVSILALGLSGSVQSTFSAVEEQIFFMEFEELYRETQKRSVASQQKTSLNLDGQTLSNGSQKLPVPKGIQAPSGQSITFDRAGGNSSLAKVEFQTSKGAIRYQLYLGNGKIKRIKETKN

SEQ ID NO: 4273 - DNA, 324 bp, Streptococcus pneumoniae
atgaaaaaaatgatgacattcttgaaaaaagctaaggttaaagcttttacattggtggagatgttggtggtcttgctgattatcagcgtgcttttcttgctctttgtacctaatctgaccaagcaaaaagaagcagtcaatgacaaaggaaaagcagctgttgttaaggtggtggaaagccaggcagaactttatagcttagaaaagaatgaagatgctagcctaagaaagttacaagcagatggacgcatcacggaagaacaggctaaagcttataaagaatacaatgataaaaatggaggagcaaatcgtaaagtcaatgat

SEQ ID NO: 4274 - protein, 108 aa, Streptococcus pneumoniae
  competence protein CglC (cglC); Cellular location: outside; Similar to strain R6 sequence 15903903 (6.E-55)
MKKMMTFLKKAKVKAFTLVEMLVVLLIISVLFLLFVPNLTKQKEAVNDKGKAAVVKVVESQAELYSLEKNEDASLRKLQADGRITEEQAKAYKEYNDKNGGANRKVND

SEQ ID NO: 4275 - DNA, 1041 bp, Streptococcus pneumoniae
atgagcaaattgaccagcttcttaaagatggacatatcacaagtcttcaggctgagacggaaaaaattagctacagctaagcaaaaaaatatcatcaccctatttaacaatctcttttctagcggttttcatctggtggagactatctcctttttagataggagtgctttgttggacaagcagtgtgtgacccagatgcgtgtgggcttgtctcaggggaaatcattctcagaaatgatggaaagtttgggatgttcaagtgctattgtcactcagttatccctagctgaagttcatggcaatctccacctgagtttgggaaagatagaagaatatctggacaatctggctaaggtcaagaaaaaattgattgaagtagcgacctatcccttgattttgctgggttttcttctcttaattatgctggggctacggaattacctgctcccacaactggatagtagcaatattgccacccaaattatcggtaatctgccccaaatttttctaggcatggtagggcttgtttccgtgcttgcccttttagcactcactttttataaaagaagttctaagatgagtgtcttttctatcttagcacgccttccctttattggaatctttgtgcagacctacttgacagcctattatgcacgtgaatgggggaatatgatttcacagggaatggagttgacgcagatttttcaaatgatgcaggaacaaggttcccagctctttaaagaagtcggtcaagatctggctcaaaccctgaaaaatggccgtgaattttctcagacgataggaacctatcctttctttaggaaggaattgagtctcatcatagagtatggggaagttaagtccaagctgggtagtgagttggaaatctatgctgaaaaaacttgggaagccttttttacccgagtcaaccgcaccatgaatttggtgcagccactggtttttatctttgtggcactgattatcgttttactttatgcggcaatgctcatgcccatgtatcaaaatatggaggtaaatttt

SEQ ID NO: 4276 - protein, 347 aa, Streptococcus pneumoniae
  competence protein CglB (cglB); Cellular location: membrane; Similar to strain R6 sequence 15903904 (e-161)
MSKLTSFLKMDISQVFRLRRKKLATAKQKNIITLFNNLFSSGFHLVETISFLDRSALLDKQCVTQMRVGLSQGKSFSEMMESLGCSSAIVTQLSLAEVHGNLHLSLGKIEEYLDNLAKVKKKLIEVATYPLILLGFLLLIMLGLRNYLLPQLDSSNIATQIIGNLPQIFLGMVGLVSVLALLALTFYKRSSKMSVFSILARLPFIGIFVQTYLTAYYAREWGNMISQGMELTQIFQMMQEQGSQLFKEVGQDLAQTLKNGREFSQTIGTYPFFRKELSLIIEYGEVKSKLGSELEIYAEKTWEAFFTRVNRTMNLVQPLVFIFVALIIVLLYAAMLMPMYQNMEVNF

SEQ ID NO: 4277 - DNA, 939 bp, Streptococcus pneumoniae
atggttcaagaaattgcacaagaaatcattcgttcagctcggaaaaaagggacgcaggatatctattttgtccctaagttagacgcctatgagcttcatatgagggtaggagacgagcgctgtaaaattggtagctatgattttgaaaagtttgcagccgttatcagtcactttaagtttgtggcgggtatgaatgtgggagaaaaaagacgtagtcaactgggttcctgtgattatgcctatgaccataagatagcgtctctacgtttatctactgtaggcgattatcgggggcatgagagtttggttatccgtttgttgcacgatgaggagcaggacctgcatttttggtttcaggatattgaagaattaggcaagcagtacaggcaacggggactctatctttttgctggtccggttgggagtggtaagacgaccttgatgcatgaattgtccaagtcactctttaaaggacagcaagttatgtccatcgaagatcctgtcgaaatcaagcaggacgacatgcttcagttgcagttgaacgaagcaatcggcctaacctatgaaaatctaatcaaactttccttgcgtcatcgaccagatctcttgattatcggagaaattcgtgacagcgagacggcgcgtgcagtggtcagagctagtttgacaggtgcgacagtcttttcaaccattcacgccaagagtatccgaggtgtttatgagcgtctgctggagttgggtgtgagtgaagaagaattggcagttgttctgcaaggagtctgctaccagagattaatcgggggaggaggaatcgttgactttgcaagcagagattatcaagaacaccaagcagccaagtggaatgagcaaattgaccagcttcttaaagatggacatatcacaagtcttcaggctgagacggaaaaaattagctacagc

SEQ ID NO: 4278 - protein, 313 aa, Streptococcus pneumoniae
  competence protein CglA FRAMESHIFT (cglA); Cellular location: cytoplasm; Feature of note: similar to CT secretion; Similar to strain R6 sequence 15903905 (e-179)
MVQEIAQEIIRSARKKGTQDIYFVPKLDAYELHMRVGDERCKIGSYDFEKFAAVISHFKFVAGMNVGEKRRSQLGSCDYAYDHKIASLRLSTVGDYRGHESLVIRLLHDEEQDLHFWFQDIEELGKQYRQRGLYLFAGPVGSGKTTLMHELSKSLFKGQQVMSIEDPVEIKQDDMLQLQLNEAIGLTYENLIKLSLRHRPDLLIIGEIRDSETARAVVRASLTGATVFSTIHAKSIRGVYERLLELGVSEEELAVVLQGVCYQRLIGGGGIVDFASRDYQEHQAAKWNEQIDQLLKDGHITSLQAETEKISYS

SEQ ID NO: 4279 - DNA, 90 bp, Streptococcus pneumoniae
ttgaccagtattatgatgctctcaaatactacaaaacttgctggtttagattggaacaagaatcgcctctttataaaagtagaagcgact

SEQ ID NO: 4280 - protein, 30 aa, Streptococcus pneumoniae
  hypothetical protein
MTSIMMLSNTTKLAGLDWNKNRLFIKVEAT

SEQ ID NO: 4281 - DNA, 369 bp, Streptococcus pneumoniae
atgaatatgtatcgtgttatagaaatgtacggagattttgaaccgtggtggttcttagaaggttgggaagaagatattgtagcaagtagaaaatttgaccagtattatgatgctctcaaatactacaaaacttgctggtttagattggaacaagaatcgcctctttataaaagtagaagcgacttgatgaccattttttgggacccggaagaccaacgctggtgtgatgaatgtgatgagtatttacaacaataccattctttggctcttttgcaggatgagcaggttatcccagacgaaaaactacgctcaggctatgaaaaacaaaccagtcaggaaaggaatcgttcttgccgtatgaaattaaaa

SEQ ID NO: 4282 - protein, 123 aa, Streptococcus pneumoniae
  conserved hypothetical protein; Cellular location: cytoplasm; Similar to strain R6 sequence 15903906 (2.E-74)
MNMYRVIEMYGDFEPWWFLEGWEEDIVASRKFDQYYDALKYYKTCWFRLEQESPLYKSRSDLMTIFWDPEDQRWCDECDEYLQQYHSLALLQDEQVIPDEKLRSGYEKQTSQERNRSCRMKLK

SEQ ID NO: 4283 - DNA, 1056 bp, Streptococcus pneumoniae
atgaaagcctatacttatgttaaaccaggacttgcttcttttgttgatgtagacaaaccagttattcgcaagccaacagacgctattgtgcgtattgtaaaaaccactatttgtggaacagacctccatattatcaaaggggatgttcctacttgccaaagtggtaccattcttggccacgaagggattgggattgttgaagaagttggggaaggagtttccaacttcaaaaaaggtgacaaggtcttgatttcttgcgtctgtgcctgtggtaaatgctactactgtaaaaaaggaatttatgctcactgtgaagacgaagggggctggattttcggtcacttgattgatggtatgcaggctgaatatctacgtgtccctcatgcagataatactctttaccatactccagaagacttgtcagatgaagctttggttatgctgtcagacattctgcctactggatatgaaattggtgtcttaaaagggaaagtagaacctggttgcagcgtagccattattggttcaggtccagttggattggctgctcttttaacagcccaattctattcaccagctaaattgattatggtagacctagacgataaccgcttggaaactgccctatcattcggtgcgactcataaggttaattcttcagaccctgaaaaagccattaaagaaatttatgatttgacagatggtcgtggtgtggatgtcgctatcgaagctgttggtattcctgcaacatttgatttctgtcaaaagattatcggtgtagacggaacggttgccaactgtggtgtgcatggtaaaccagttgaattcgatttagataaactttggattcgcaacatcaatgtaacaactggtttggtatctacaaatacgactccacaattgttgaaagcacttgaaagtcataagattgaaccggaaaaattggtaactcactatttcaaactcagtgaaattgaaaaagcctacgaagtcttcagtaaggcagcagaccaccatgccattaaggtcattatcgaaaacgatatctcagaagcc

SEQ ID NO: 4284 - protein, 352 aa, Streptococcus pneumoniae
  alcohol dehydrogenase, zinc-containing; Cellular location: membrane; Similar to strain R6 sequence 15903907 (0.E+01)
MKAYTYVKPGLASFVDVDKPVIRKPTDAIVRIVKTTICGTDLHIIKGDVPTCQSGTILGHEGIGIVEEVGEGVSNFKKGDKVLISCVCACGKCYYCKKGIYAHCEDEGGWIFGHLIDGMQAEYLRVPHADNTLYHTPEDLSDEALVMLSDILPTGYEIGVLKGKVEPGCSVAIIGSGPVGLAALLTAQFYSPAKLIMVDLDDNRLETALSFGATHKVNSSDPEKAIKEIYDLTDGRGVDVAIEAVGIPATFDFCQKIIGVDGTVANCGVHGKPVEFDLDKLWIRNINVTTGLVSTNTTPQLLKALESHKIEPEKLVTHYFKLSEIEKAYEVFSKAADHHAIKVIIENDISEA

SEQ ID NO: 4285 - DNA, 1149 bp, Streptococcus pneumoniae
atgcctaactatattaaagcggatcagtttttctacccacacggagttcgtcgaggtggttacttggaacttgtggacggcaagtttgggaaacatgtagagcagattcctgaaggggctgaggtgattgactatacaggttatagcattgccccaggtcttgtggatactcatattcatggatatgcaggtgtagatgtgatggacaacaacattgaaggtacattgcatactatgagtgaaggacttcttagtaccggtgttaccagtttcttacccacaactttaacagccacttatgagcaattgcttgcagtcactgaaaatcttggaaaccattataaagaagcaacaggtgctaagattcgtgggatttattatgaaggtccatatttcacagaaacttttaagggggcacaaaatccaacttatatgagagacccgggtgttgaggagtttcattcttggcaaaaagcggcaaatggcttgcttaataaaattgcccttgcaccagaacgtgatggggtggaagactttgttcgtacagttacgggcgaaggtgtgacggttgctcttggacattcaaacgcgacttttgatgaagccaaaaaagcaatcgatgctggagcgagtgtttgggtgcatgcctacaatggaatgcgtgggttgactcaccgtgaattggggatggttggagccatgtaccaattgccacatacctatgcagagttgatctgtgatggtcaccacgtagatccaaaggcttgcgaaattcttatcaaacaaaaaggaacagaaaacatcgctcttatcacagactgtatgacagctgggggattggaagacggagattatatgttgggagaattcccagttgtcgttgcaaatggaactgcacgcctcaaatcgacaggtaacttggcaggttctatcctcaaactcaaagatggtttgaagaatgtggtcgaatggggaattgcgaatccgcatgaagcagtcatgatggccagcttcaacccagctaaatccgttcacatcgatgacgtctgtggccaaatccgtgaaggctacgacgctgacttcatcgtattagataaagatttggaattggtagcaacctacctagatggcgtaaaacgttatcaagca

SEQ ID NO: 4286 - protein, 383 aa, Streptococcus pneumoniae
  N-acetylglucosamine-6-phosphate deacetylase (nagA); Cellular location: cytoplasm; Similar to strain R6 sequence 15903908 (0.E+01)
MPNYIKADQFFYPHGVRRGGYLELVDGKFGKHVEQIPEGAEVIDYTGYSIAPGLVDTHIHGYAGVDVMDNNIEGTLHTMSEGLLSTGVTSFLPTTLTATYEQLLAVTENLGNHYKEATGAKIRGIYYEGPYFTETFKGAQNPTYMRDPGVEEFHSWQKAANGLLNKIALAPERDGVEDFVRTVTGEGVTVALGHSNATFDEAKKAIDAGASVWVHAYNGMRGLTHRELGMVGAMYQLPHTYAELICDGHHVDPKACEILIKQKGTENIALITDCMTAGGLEDGDYMLGEFPVVVANGTARLKSTGNLAGSILKLKDGLKNVVEWGIANPHEAVMMASFNPAKSVHIDDVCGQIREGYDADFIVLDKDLELVATYLDGVKRYQA

SEQ ID NO: 4287 - DNA, 1815 bp, Streptococcus pneumoniae
atgcgcattaaatggttttccttgattaggattataggtttacttttggtactcttgtatcacttctttcagacgatctttcctggaggatttttcggggtagatgtctttttcacattttcaggtttcctgattacagctctactcattgaagaattttctaagaacaatgagattgatttgataggattttttagaagacgcttttatcggattgtgccacctgtggttttgatggtcttggtgaccatgccttttactttcttggttcgccaagactatgttgctggaattggtggccagattgcgggcgtcttaggctttatgaccaacttctatgaactcctaacaggtgggagttatgaatctcagttcattcctcatttgtttgttcataattggagtttggcagttgaggttcactactatattctttggggattggcagtttggttcttatccaaacaagctaaatcaaatggtcagttgaaggggatggtctttctcttatctgctgttgccttcttgatcagtttcttctccatgtttattggtagttttctagtgacctcttattcctctgtttatttctccagtttaactcatgtctatccattctttttaggaagtatgttagcaactattgtaggcgttcgtcagacgacttccctcgtcaagcagttggataaaatctgggatttacgaaagactttggtagtttttggaggaggctttggtttcctagttcttttgactttctttgtcaaattcacttatctttttgcctatcttatcggcttcttacttgccagtcttgcagctcttgccatgattctggcggcgcgtgtcttacatgaaaagacacatcatatacaggagtcgaagattatcagctttttagcggatactagctatgcggtttatcttttccattggcctttctatatcattttctcacagttgacatcaaatcttcttgctgtattactgactctgatttgttcttatggctttgccagtctgtcattttatgtattggaaccttggattgcaggcaagaacacacctattgtccaaacccttcgtcccctgccttatattcacgcaattcttgcagcaggtacaggaatcttgaccatcattgtctgcacggtgaccttgttggcaccacaagtgggagcgtttgagacagacttgactgtcaatggcttgaagcaagctgcaacaaatattggccagaccaaggtgatggcagaacgggcagatgcaaacagtttgggaattgctgatggcactatgttaattggtgactcagtggctttaagggcaaatacagcactacagacagctcttcctggagcacagattaacgcgcaggtcagcgtaacaaccaagaccgcaaatgaaatcatgctaaataatagccagaataaatttttacctaagacggtggtcattgcgactggggtaaataatcctgagaattacaaggatgactgggacagtatcgtgaaaaatcttcctaagggacaccatatgattttggtgactccttatgagggagataagacaaaagagacctatgccatcgttgagaaggctgctgcctatatgagagaattggcagagaagacaccttacattacgatagcagattggaatcaagttgcgaaagagcatccagaaatttgggctggaacagaccaggttcatttcgggagtgagagtagcactatcgaagcaggagcaaaattgtatgcagatacgattgccacagctttgcagacagctcaagacaagccggttaaatcaaaa

SEQ ID NO: 4288 - protein, 605 aa, Streptococcus pneumoniae
  conserved hypothetical protein; Cellular location: membrane; Similar to strain R6 sequence 15903909 (0.E+01)
MRIKWFSLIRIIGLLLVLLYHFFQTIFPGGFFGVDVFFTFSGFLITALLIEEFSKNNEIDLIGFFRRRFYRIVPPVVLMVLVTMPFTFLVRQDYVAGIGGQIAGVLGFMTNFYELLTGGSYESQFIPHLFVHNWSLAVEVHYYILWGLAVWFLSKQAKSNGQLKGMVFLLSAVAFLISFFSMFIGSFLVTSYSSVYFSSLTHVYPFFLGSMLATIVGVRQTTSLVKQLDKIWDLRKTLVVFGGGFGFLVLLTFFVKFTYLFAYLIGFLLASLAALAMILAARVLHEKTHHIQESKIISFLADTSYAVYLFHWPFYIIFSQLTSNLLAVLLTLICSYGFASLSFYVLEPWIAGKNTPIVQTLRPLPYIHAILAAGTGILTIIVCTVTLLAPQVGAFETDLTVNGLKQAATNIGQTKVMAERADANSLGIADGTMLIGDSVALRANTALQTALPGAQINAQVSVTTKTANEIMLNNSQNKFLPKTVVIATGVNNPENYKDDWDSIVKNLPKGHHMILVTPYEGDKTKETYAIVEKAAAYMRELAEKTPYITIADWNQVAKEHPEIWAGTDQVHFGSESSTIEAGAKLYADTIATALQTAQDKPVKSK

SEQ ID NO: 4289 - DNA, 1140 bp, Streptococcus pneumoniae
atgtcagattcaccaatcaaatatcgtttgattaagaaagaaaaacacacaggagctcgtctgggagaaatcatcactccccacggtacctttccgacacctatgtttatgccagttgggacacaagccactgtcaaaactcagtcacctgaagaattgaaggagatgggttcgggaattatcctatcaaacacctatcatctctggcttcgccctggagatgaactcattgcacgcgctggtggtctccacaagttcatgaattgggaccagcctatcttgacagatagtggtggttttcaggtttattctttagcagatagccgtaatatcacagaagaaggagtaacctttaaaaatcatctaaatggttctaagatgttcctatccccagaaaaagccatctctattcagaataatctgggttcagacatcatgatgtcctttgatgaatgtcctcagttttatcaaccttatgactacgttaagaaatcgatcgagcgtaccagccgttgggctgagcgtggtttgaaggctcaccgtcgtccacatgaccaaggtttgtttggaattgtgcaaggtgcaggatttgaagaccttcgccgccaatcagctcatgatcttgtcagcatggatttctcaggctactctatcggtggtttggcagtgggagaaacccatgaagagatgaatgcggtcttggactttacaactcaactgctgcctgaaaataaacctcgttatctgatgggtgtgggagcgccagatagcttgatcgatggggtcattcgtggggtggatatgtttgactgtgtcttaccgactcgaattgctcgtaacgggacttgtatgaccagtcaaggacgtttggttgtgaaaaatgcccagtttgctgaggactttacgccactggatcctgagtgtgattgctacacatgtaataactatacacgcgcttaccttcgtcacctgctcaaggctgatgaaacctttggtatccgcttgactagctaccacaatctttacttcttgcttaacctgatgaagcaagtgcgacaagccatcatggatgacaatctcttggaattccgtgagtattttgtggaaaaatatggctataataagtcaggacgtaatttc

SEQ ID NO: 4290 - protein, 380 aa, Streptococcus pneumoniae
  tRNA-guanine transglycosylase (tgt); Cellular location: cytoplasm; Similar to strain R6 sequence 15903910 (0.E+01)
MSDSPIKYRLIKKEKHTGARLGEIITPHGTFPTPMFMPVGTQATVKTQSPEELKEMGSGIILSNTYHLWLRPGDELIARAGGLHKFMNWDQPILTDSGGFQVYSLADSRNITEEGVTFKNHLNGSKMFLSPEKAISIQNNLGSDIMMSFDECPQFYQPYDYVKKSIERTSRWAERGLKAHRRPHDQGLFGIVQGAGFEDLRRQSAHDLVSMDFSGYSIGGLAVGETHEEMNAVLDFTTQLLPENKPRYLMGVGAPDSLIDGVIRGVDMFDCVLPTRIARNGTCMTSQGRLVVKNAQFAEDFTPLDPECDCYTCNNYTRAYLRHLLKADETFGIRLTSYHNLYFLLNLMKQVRQAIMDDNLLEFREYFVEKYGYNKSGRNF

SEQ ID NO: 4291 - DNA, 855 bp, Streptococcus pneumoniae
atgaactatccaaaaattgatttaaaaacaattcgtcaggagtcaaaacattttcaggctgacaccccccgtctctttctcctctatatccttcccagtatgctggtcatcttatctggttttcttaatcccttatctcggatccacgggactgttttagaacagccatttttcagcatacttggccaaatacttcaaacctacctctttcctctactagtctcctttatcgggactattcttttgaccagttccgtctatgcaacactgacactcatgaaagattctaaaacggagccatctgtaaaaaacagcctagctctctttgatgaggagcgcttttctcaaacctttttgaccctacttctcaaacgtttctatctctttttatggagtatccctaatttacttgggatttacctcctcttttatagtagctttttagccaaaaaattcgtcaccctacatcctgagtttccaaatctagatctctcatcagttgaaaccgagcgtttcctcatggtctttggactctactttcttgcaagtctcatcttgatcattgtaggaaatatcctctatattccacagtattatgcctattcacaggtggaatttcttctctgttatagtctagacctaggacaggtcccaccaagacgaatcctaaaaactagccgttcctttatgaagggctacaagttccagcactttgtcctagatttacagcttcttccttggtacttcctcaattggattacctttggcattgctagtttttcactcctaccttatatccaatgcactaaaattatgttttaccgagcagtattggcccgaaaacgtccaaaagct

SEQ ID NO: 4292 - protein, 285 aa, Streptococcus pneumoniae
  conserved hypothetical protein; Cellular location: membrane; Similar to strain R6 sequence 15903911 (e-161)
MNYPKIDLKTIRQESKHFQADTPRLFLLYILPSMLVILSGFLNPLSRIHGTVLEQPFFSILGQILQTYLFPLLVSFIGTILLTSSVYATLTLMKDSKTEPSVKNSLALFDEERFSQTFLTLLLKRFYLFLWSIPNLLGIYLLFYSSFLAKKFVTLHPEFPNLDLSSVETERFLMVFGLYFLASLILIIVGNILYIPQYYAYSQVEFLLCYSLDLGQVPPRRILKTSRSFMKGYKFQHFVLDLQLLPWYFLNWITFGIASFSLLPYIQCTKIMFYRAVLARKRPKA

SEQ ID NO: 4293 - DNA, 642 bp, Streptococcus pneumoniae
atgaaagtattagtgacaggttttgagccctttggaggggaaaagggcaatccagctttggaggccattaaaggtttaccagctgaaatccatggtgctgaggtccgttggctagaggtgccgacagtttttcacaaatctgctcaagtattggaagaagagatgaatcgttatcaacctgactttgtcctttgtattgggcaagctggtggaagaactagtttgacacctgaacgagtgaccattaatcaagacgatgcatgcatttctgataacgaagataatcaaccgattgaccgtcccattcgcccagatggtgcttcggcctactttagtagtttgccgattaaagcgatggttcaagctataaaaaaagagggcttaccggcctctgtttccaatacggcagggacttttgtctgcagccatttgatgtatcaggctctctatttggtagaaaagaaatctccatatgttaaggcaggttttatgcatattccttatatgatggaacaggtggtgaacagaccgactactccagctatgagtttagtggatattcggcgagggatagaagcagcaatcggcgctataatagaacatggagatcaggaactcaagttggtaggcggagaaactcat

SEQ ID NO: 4294 - protein, 214 aa, Streptococcus pneumoniae
  pyrrolidone-carboxylate peptidase (pcp); Cellular location: cytoplasm; Similar to strain R6 sequence 15902806 (6.E-95)
MKVLVTGFEPFGGEKGNPALEAIKGLPAEIHGAEVRWLEVPTVFHKSAQVLEEEMNRYQPDFVLCIGQAGGRTSLTPERVTINQDDACISDNEDNQPIDRPIRPDGASAYFSSLPIKAMVQAIKKEGLPASVSNTAGTFVCSHLMYQALYLVEKKSPYVKAGFMHIPYMMEQVVNRPTTPAMSLVDIRRGIEAAIGAIIEHGDQELKLVGGETH

SEQ ID NO: 4295 - DNA, 357 bp, Streptococcus pneumoniae
atgtcaattattttaacaacgatcgttgctttggagcatttttacattttttatttggaaagtattgccacgcaatcagatgcgactagtcgtgtatttaatatggaaaaggaagaattggctcatccgtcagtaagttcattgttcaaaaatcaaggaatttataaggctctgctaggagtctttctcttgtatgtcatttatttctcacagaatttagaaattgtgactatttttgtcttatttgtgattggtgctgcgacttacggctctttaacagcggataaaaaaattattttgaaacaaggtggatcagctattttggccttgattagtattttactctttaaatacact

SEQ ID NO: 4296 - protein, 119 aa, Streptococcus pneumoniae
  conserved hypothetical protein; Cellular location: membrane; Similar to strain R6 sequence 15903914 (3.E-49)
MSIILTTIVALEHFYIFYLESIATQSDATSRVFNMEKEELAHPSVSSLFKNQGIYKALLGVFLLYVIYFSQNLEIVTIFVLFVIGAATYGSLTADKKIILKQGGSAILALISILLFKYT

SEQ ID NO: 4297 - DNA, 423 bp, Streptococcus pneumoniae
atgctagagattcaagatttactgtatcaactccgcttgtctgagcaagcgagtacgcaattgtttgaaaaaaggcttgggattagtttgacacggtatcagattttactgtttttgctggagcattctccttgtaaccaaatggcggttcaggagcgtttgaaaattgatcaggctgctttgacacggcatttcaaaattttggaaacggaaggtttggtggagcgtcatcgtaatcctgaaaatcagcgggaagtgttggtagaggctgcgaagtatgccaaggagcagttagtggtgaatccccctctgcaacatatcagggttaaggaagagatagaaagtatcttaacagagtttgagagaacagaactcagccgtttattaaataaattggttttgggtattgaaaatatagaaatt

SEQ ID NO: 4298 - protein, 141 aa, Streptococcus pneumoniae
  transcriptional regulator, MarR family; Cellular location: cytoplasm; Similar to strain R6 sequence 15903915 (6.E-58)
MLEIQDLLYQLRLSEQASTQLFEKRLGISLTRYQILLFLLEHSPCNQMAVQERLKIDQAALTRHFKILETEGLVERHRNPENQREVLVEAAKYAKEQLVVNPPLQHIRVKEEIESILTEFERTELSRLLNKLVLGIENIEI

SEQ ID NO: 4299 - DNA, 144 bp, Streptococcus pneumoniae
ttgaagtttcagataaaactgacgtggtttgaagagattttcgaagagtatgacaaagaaaaaacgaacgagaatcgctttccatcacgaaagctagatctcattcgtcaaaatgatgttatcaagtcgggtttatccattcat

SEQ ID NO: 4300 - protein, 48 aa, Streptococcus pneumoniae
  box element
MKFQIKLTWFEEIFEEYDKEKTNENRFPSRKLDLIRQNDVIKSGLSIH

SEQ ID NO: 4301 - DNA, 1110 bp, Streptococcus pneumoniae
atgaagaaaagaatgttattagcgtcaacagtagccttgtcatttgccccagtattggcaactcaagcagaagaagttctttggactgcacgtagtgttgagcaaatccaaaacgatttgactaaaacggacaacaaaacaagttataccgtacagtatggtgatactttgagcaccattgcagaagccttgggtgtagatgtcacagtgcttgcgaatctgaacaaaatcactaatatggacttgattttcccagaaactgttttgacaacgactgtcaatgaagcagaagaagtaacagaagttgaaatccaaacacctcaagcagactctagtgaagaagtgacaactgcgacagcagatttgaccactaatcaagtgaccgttgatgatcaaactgttcaggttgcagacctttctcaaccaattgcagaagttacaaagacagtgattgcttctgaagaagtggcaccatctacgggcacttctgtcccagaggagcaaacgaccgaaacaactcgcccagttgaagaagcaactcctcaggaaacgactccagctgagaagcaggaaacacaagcaagccctcaagctgcatcagcagtggaagtaactacaacaagttcagaagcaaaagaagtagcatcatcaaatggagctacagcagcagtttctacttatcaaccagaagagacgaaaataatttcaacaacttacgaggctccagctgcgcccgattatgctggacttgcagtagcaaaatctgaaaatgcaggtcttcaaccacaaacagctgcctttaaagaagaaattgctaacttgtttggcattacatcctttagtggttatcgtccaggagacagtggagatcacggaaaaggtttggctatcgactttatggtaccagaacgttcagaattaggggataagattgcggaatatgctattcaaaatatggccagccgtggcattagttacatcatctggaaacaacgtttctatgctccattcgatagcaaatatgggccagctaacacttggaacccaatgccagaccgtggtagtgtgacagaaaatcactatgatcacgttcacgtttcaatgaatgga

SEQ ID NO: 4302 - protein, 370 aa, Streptococcus pneumoniae
  LysM domain protein, FRAMESHIFT; Cellular location: outside; Similar to strain R6 sequence 15903916 (0.E+01)
MKKRMLLASTVALSFAPVLATQAEEVLWTARSVEQIQNDLTKTDNKTSYTVQYGDTLSTIAEALGVDVTVLANLNKITNMDLIFPETVLTTTVNEAEEVTEVEIQTPQADSSEEVTTATADLTTNQVTVDDQTVQVADLSQPIAEVTKTVIASEEVAPSTGTSVPEEQTTETTRPVEEATPQETTPAEKQETQASPQAASAVEVTTTSSEAKEVASSNGATAAVSTYQPEETKIISTTYEAPAAPDYAGLAVAKSENAGLQPQTAAFKEEIANLFGITSFSGYRPGDSGDHGKGLAIDFMVPERSELGDKIAEYAIQNMASRGISYIIWKQRFYAPFDSKYGPANTWNPMPDRGSVTENHYDHVHVSMNG

SEQ ID NO: 4303 - DNA, 618 bp, Streptococcus pneumoniae
atgcaaaaaacagcttttatttgggatttagacgggactttattggactcttacgaagcgattttatcagggattgaggagacttttgctcagttttctattccttatgataaggagaaggtgagagagtttatcttcaagtattcggtgcaagatttgcttgtgcgggtggcagaagatagaaatctggatgttgaggtgctaaatcaggtgcgtgcccagagtctggctgagaagaatgctcaggtagttttgatgccaggtgcgcgtgaggtgctagcttgggcagacgaatcaggaattcagcagtttatatatactcataaggggaacaacgcttttaccattctcaaggacttgggggtggaatcctattttacagagattttaaccagtcagagtggctttgtgcggaagccaagtccagaagcggctacctatctgctagataagtatcagttgaattctgataatacttattatataggggatcggactctggatgtggaatttgcccagaatagtgggattcaaagcatcaactttttagagtctacttatgaagggaatcacaggattcaagcgttagcagatatttcccgtatttttgagactaag

SEQ ID NO: 4304 - protein, 206 aa, Streptococcus pneumoniae
  hydrolase, haloacid dehalogenase-like family; Cellular location: cytoplasm; Similar to strain R6 sequence 15903917 (e-115)
MQKTAFIWDLDGTLLDSYEAILSGIEETFAQFSIPYDKEKVREFIFKYSVQDLLVRVAEDRNLDVEVLNQVRAQSLAEKNAQVVLMPGAREVLAWADESGIQQFIYTHKGNNAFTILKDLGVESYFTEILTSQSGFVRKPSPEAATYLLDKYQLNSDNTYYIGDRTLDVEFAQNSGIQSINFLESTYEGNHRIQALADISRIFETK

SEQ ID NO: 4305 - DNA, 1233 bp, Streptococcus pneumoniae
atgggtgaaaactttttgcagatgctaatgggaatggtggacagttatttggttgctcatttaggattgatagctatttcaggggtttcagtagctggtaatattatcaccatttatcaggcgattttcatcgctctgggagctgctatttccagtgttatttcaaaaagcatagggcagaaagaccagtcgaagttggcctatcatgtgactgaggcgttgaagattaccttactattaagtttccttttaggatttttgtccatcttcgctgggaaagagatgataggacttttggggacggagagggatgtagctgagagtggtggactgtatctatctttggtaggcggatcgattgttctcttaggtttaatgactagtctaggagccttgattcgtgcaacgcataatccacgtctgcctctctatgttagttttttatccaatgccttgaatattcttttttcaagtctagctatttttgttctggatatggggatagctggtgttgcttgggggacaattgtgtctcgtttggttggtcttgtgattttgtggtcacaattaaaactgccttatgggaagccaacttttggtttagataaggaactgttgaccttggctttaccagcagctggagagcgacttatgatgagggctggagatgtagtgatcattgccttggtcgtttcttttgggacggaggcagttgctgggaatgcaatcggagaagtcttgacccagtttaactatatgcctgcctttggcgtcgctacggcaacggtcatgctgttggcccgagcagttggagaggatgattggaaaagagttgctagtttgagtaaacaaaccttttggctttctctgttcctcatgttgcccctgtcctttagtatatatgtcttgggtgtaccattaactcatctctatacgactgattctctagcggtggaggctagtgttctagtgacactgttttcactacttgggacccctatgacgacaggaacagtcatctatacggcagtctggcagggattaggaaatgcacgcctccctttttatgcgacaagtataggaatgtggtgtatccgcattgggacaggatatctgatggggattgtgcttggttggggcttgcctggtatttgggcagggtctctcttggataatggttttcgctggttatttctacgctatcgttaccagcgctatatgagcttgaaagga

SEQ ID NO: 4306 - protein, 411 aa, Streptococcus pneumoniae
  MATE efflux family protein; Cellular location: membrane; Similar to strain R6 sequence 15903918 (0.E+01)
MGENFLQMLMGMVDSYLVAHLGLIAISGVSVAGNIITIYQAIFIALGAAISSVISKSIGQKDQSKLAYHVTEALKITLLLSFLLGFLSIFAGKEMIGLLGTERDVAESGGLYLSLVGGSIVLLGLMTSLGALIRATHNPRLPLYVSFLSNALNILFSSLAIFVLDMGIAGVAWGTIVSRLVGLVILWSQLKLPYGKPTFGLDKELLTLALPAAGERLMMRAGDVVIIALVVSFGTEAVAGNAIGEVLTQFNYMPAFGVATATVMLLARAVGEDDWKRVASLSKQTFWLSLFLMLPLSFSIYVLGVPLTHLYTTDSLAVEASVLVTLFSLLGTPMTTGTVIYTAVWQGLGNARLPFYATSIGMWCIRIGTGYLMGIVLGWGLPGIWAGSLLDNGFRWLFLRYRYQRYMSLKG

(The sequence listing continues in the following parts.)

1. A protein comprising an amino acid sequence selected from the group consisting of SEQ IDs 2, 4, 6, 8, 10, 12, 14, 16, 18, 20, 22, 24, 26, 28, 30, 32, 34, 36, 38, 40, 42, 44, 46, 48, 50, 52, 54, 56, 58, 60, 62, 64, 66, 68, 70, 72, 74, 76, 78, 80, 82, 84, 86, 88, 90, 92, 94, 96, 98, 100, 102, 104, 106, 108, 110, 112, 114, 116, 118, 120, 122, 124, 126, 128, 130,132,134,136, 138, 140, 142, 144, 146, 148, 150, 152, 154, 156, 158, 160, 162, 164, 166, 168, 170, 172, 174, 176, 178, 180, 182, 184, 186, 188, 190, 192, 194, 196, 198, 200, 202, 204, 206, 208, 210, 212, 214, 216, 218, 220, 222, 224, 226, 228, 230, 232, 234, 236, 238, 240, 242, 244, 246, 248, 250, 252, 254, 256, 258, 260, 262, 264, 266, 268, 270, 272, 274, 276, 278, 280, 282, 284, 286, 288, 290, 292, 294, 296, 298, 300, 302, 304, 306, 308, 310, 312, 314, 316, 318, 320, 322, 324, 326, 328, 330, 332, 334, 336, 338, 340, 342, 344, 346, 348, 350, 352, 354, 356, 358, 360, 362, 364, 366, 368, 370, 372, 374, 376, 378, 380, 382, 384, 386, 388, 390, 392, 394, 396, 398, 400, 402, 404, 406, 408, 410, 412, 414, 416, 418, 420, 422, 424, 426, 428, 430, 432, 434, 436, 438, 440, 442, 444, 446, 448, 450, 452, 454, 456, 458, 460, 462, 464, 466, 468, 470, 472, 474, 476, 478, 480, 482, 484, 486, 488, 490, 492, 494, 496, 498, 500, 502, 504, 506, 508, 510, 512, 514, 516, 518, 520, 522, 524, 526, 528, 530, 532, 534, 536, 538, 540, 542, 544, 546, 548, 550, 552, 554, 556, 558, 560, 562, 564, 566, 568, 570, 572, 574, 576, 578, 580, 582, 584, 586, 588, 590, 592, 594, 596, 598, 600, 602, 604, 606, 608, 610, 612, 614, 616, 618, 620, 622, 624, 626, 628, 630, 632, 634, 636, 638, 640, 642, 644, 646, 648, 650, 652, 654, 656, 658, 660, 662, 664, 666, 668, 670, 672, 674, 676, 678, 680, 682, 684, 686, 688, 690, 692, 694, 696, 698, 700, 702, 704, 706, 708, 710, 712, 714, 716, 718, 720, 722, 724, 726, 728, 730, 732, 734, 736, 738, 740, 742, 744, 746, 748, 750, 752, 754, 756, 758, 760, 762, 764, 766, 768, 770, 772, 774, 776, 778, 780, 782, 784, 786, 788, 790, 792, 794, 796, 798, 800, 802, 804, 806, 808, 810, 812, 814, 816, 818, 820, 822, 824, 826, 828, 830, 832, 834, 836, 838, 840, 842, 844, 846, 848, 850, 852, 854, 856, 858, 860, 862, 864, 866, 868, 870, 872, 874, 876, 878, 880, 882, 884, 886, 888, 890, 892, 894, 896, 898, 900, 902, 904, 906, 908, 910, 912, 914, 916, 918, 920, 922, 924, 926, 928, 930, 932, 934, 936, 938, 940, 942, 944, 946, 948, 950, 952, 954, 956, 958, 960, 962, 964, 966, 968, 970, 972, 974, 976, 978, 980, 982, 984, 986, 988, 990, 992, 994, 996, 998, 1000, 1002, 1004, 1006, 1008, 1010, 1012, 1014, 1016, 1018, 1020, 1022, 1024, 1026, 1028, 1030, 1032, 1034, 1036, 1038, 1040, 1042, 1044, 1046, 1048, 1050, 1052, 1054, 1056, 1058, 1060, 1062, 1064, 1066, 1068, 1070, 1072, 1074, 1076, 1078, 1080, 1082, 1084, 1086, 1088, 1090, 1092, 1094, 1096, 1098, 1100, 1102, 1104, 1106, 1108, 1110, 1112, 1114, 1116, 1118, 1120, 1122, 1124, 1126, 1128, 1130, 1132, 1134, 1136, 1138, 1140, 1142, 1144, 1146, 1148, 1150, 1152, 1154, 1156, 1158, 1160, 1162, 1164, 1166, 1168, 1170, 1172, 1174, 1176, 1178, 1180, 1182, 1184, 1186, 1188, 1190, 1192, 1194, 1196, 1198, 1200, 1202, 1204, 1206, 1208, 1210, 1212, 1214, 1216, 1218, 1220, 1222, 1224, 1226, 1228, 1230, 1232, 1234, 1236, 1238, 1240, 1242, 1244, 1246, 1248, 1250, 1252, 1254, 1256, 1258, 1260, 1262, 1264, 1266, 1268, 1270, 1272, 1274, 1276, 1278, 1280, 1282, 1284, 1286, 1288, 1290, 1292, 1294, 1296, 1298, 1300, 1302, 1304, 1306, 1308, 1310, 1312, 1314, 1316, 1318, 1320, 1322, 1324, 1326, 1328, 1330, 1332, 1334, 1336, 1338, 1340, 1342, 1344, 1346, 1348, 1350, 1352, 1354, 1356, 1358, 1360, 1362, 1364, 1366, 1368, 1370, 1372, 1374, 1376, 1378, 1380, 1382, 1384, 1386, 1388, 1390, 1392, 1394, 1396, 1398, 1400, 1402, 1404, 1406, 1408, 1410, 1412, 1414, 1416, 1418, 1420, 1422, 1424, 1426, 1428, 1430, 1432, 1434, 1436, 1438, 1440, 1442, 1444, 1446, 1448, 1450, 1452, 1454, 1456, 1458, 1460, 1462, 1464, 1466, 1468, 1470, 1472, 1474, 1476, 1478, 1480; 1482, 1484, 1486, 1488, 1490, 1492, 1494, 1496, 1498, 1500, 1502, 1504, 1506, 1508, 1510, 1512, 1514, 1516, 1518, 1520, 1522, 1524, 1526, 1528, 1530, 1532, 1534, 1536, 1538, 1540, 1542, 1544, 1546, 1548, 1550, 1552, 1554, 1556, 1558, 1560, 1562, 1564, 1566, 1568, 1570, 1572, 1574, 1576, 1578, 1580, 1582, 1584, 1586, 1588, 1590, 1592, 1594, 1596, 1598, 1600, 1602, 1604, 1606, 1608, 1610, 1612, 1614, 1616, 1618, 1620, 1622, 1624, 1626, 1628, 1630, 1632, 1634, 1636, 1638, 1640, 1642, 1644, 1646, 1648, 1650, 1652, 1654, 1656, 1658, 1660, 1662, 1664, 1666, 1668, 1670, 1672, 1674, 1676, 1678, 1680, 1682, 1684, 1686, 1688, 1690, 1692, 1694, 1696, 1698, 1700, 1702, 1704, 1706, 1708, 1710, 1712, 1714, 1716, 1718, 1720, 1722, 1724, 1726, 1728, 1730, 1732, 1734, 1736, 1738, 1740, 1742, 1744, 1746, 1748, 1750, 1752, 1754, 1756, 1758, 1760, 1762, 1764, 1766, 1768, 1770, 1772, 1774, 1776, 1778, 1780, 1782, 1784, 1786, 1788, 1790, 1792, 1794, 1796, 1798, 1800, 1802, 1804, 1806, 1808, 1810, 1812, 1814, 1816, 1818, 1820, 1822, 1824, 1826, 1828, 1830, 1832, 1834, 1836, 1838, 1840, 1842, 1844, 1846, 1848, 1850, 1852, 1854, 1856, 1858, 1860, 1862, 1864, 1866, 1868, 1870, 1872, 1874, 1876, 1878, 1880, 1882, 1884, 1886, 1888, 1890, 1892, 1894, 1896, 1898, 1900, 1902, 1904, 1906, 1908, 1910, 1912, 1914, 1916, 1918, 1920, 1922, 1924, 1926, 1928, 1930, 1932, 1934, 1936, 1938, 1940, 1942, 1944, 1946, 1948, 1950, 1952, 1954, 1956, 1958, 1960, 1962, 1964, 1966, 1968, 1970, 1972, 1974, 1976, 1978, 1980, 1982, 1984, 1986, 1988, 1990, 1992, 1994, 1996, 1998, 2000, 2002, 2004, 2006, 2008, 2010, 2012, 2014, 2016, 2018, 2020, 2022, 2024, 2026, 2028, 2030, 2032, 2034, 2036, 2038, 2040, 2042, 2044, 2046, 2048, 2050, 2052, 2054, 2056, 2058, 2060, 2062, 2064, 2066, 2068, 2070, 2072, 2074, 2076, 2078, 2080, 2082, 2084, 2086, 2088, 2090, 2092, 2094, 2096, 2098, 2100, 2102, 2104, 2106, 2108, 2110, 2112, 2114, 2116, 2118, 2120, 2122, 2124, 2126, 2128, 2130, 2132, 2134, 2136, 2138, 2140, 2142, 2144, 2146, 2148, 2150, 2152, 2154, 2156, 2158, 2160, 2162, 2164, 2166, 2168, 2170, 2172, 2174, 2176, 2178, 2180, 2182, 2184, 2186, 2188, 2190, 2192, 2194, 2196, 2198, 2200, 2202, 2204, 2206, 2208, 2210, 2212, 2214, 2216, 2218, 2220, 2222, 2224, 2226, 2228, 2230, 2232, 2234, 2236, 2238, 2240, 2242, 2244, 2246, 2248, 2250, 2252, 2254, 2256, 2258, 2260, 2262, 2264, 2266, 2268, 2270, 2272, 2274, 2276, 2278, 2280, 2282, 2284, 2286, 2288, 2290, 2292, 2294, 2296, 2298, 2300, 2302, 2304, 2306, 2308, 2310, 2312, 2314, 2316, 2318, 2320, 2322, 2324, 2326, 2328, 2330, 2332, 2334, 2336, 2338, 2340, 2342, 2344, 2346, 2348, 2350, 2352, 2354, 2356, 2358, 2360, 2362, 2364, 2366, 2368, 2370, 2372, 2374, 2376, 2378, 2380, 2382, 2384, 2386, 2388, 2390, 2392, 2394, 2396, 2398, 2400, 2402, 2404, 2406, 2408, 2410, 2412, 2414, 2416, 2418, 2420, 2422, 2424, 2426, 2428, 2430, 2432, 2434, 2436, 2438, 2440, 2442, 2444, 2446, 2448, 2450, 2452, 2454, 2456, 2458, 2460, 2462, 2464, 2466, 2468, 2470, 2472, 2474, 2476, 2478, 2480, 2482, 2484, 2486, 2488, 2490, 2492, 2494, 2496, 2498, 2500, 2502, 2504, 2506, 2508, 2510, 2512, 2514, 2516, 2518, 2520, 2522, 2524, 2526, 2528, 2530, 2532, 2534, 2536, 2538, 2540, 2542, 2544, 2546, 2548, 2550, 2552, 2554, 2556, 2558, 2560, 2562, 2564, 2566, 2568, 2570, 2572, 2574, 2576, 2578, 2580, 2582, 2584, 2586, 2588, 2590, 2592, 2594, 2596, 2598, 2600, 2602, 2604, 2606, 2608, 2610, 2612, 2614, 2616, 2618, 2620, 2622, 2624, 2626, 2628, 2630, 2632, 2634, 2636, 2638, 2640, 2642, 2644, 2646, 2648, 2650, 2652, 2654, 2656, 2658, 2660, 2662, 2664, 2666, 2668, 2670, 2672, 2674, 2676, 2678, 2680, 2682, 2684, 2686, 2688, 2690, 2692, 2694, 2696, 2698, 2700, 2702, 2704, 2706, 2708, 2710, 2712, 2714, 2716, 2718, 2720, 2722, 2724, 2726, 2728, 2730, 2732, 2734, 2736, 2738, 2740, 2742, 2744, 2746, 2748, 2750, 2752, 2754, 2756, 2758, 2760, 2762, 2764, 2766, 2768, 2770, 2772, 2774, 2776, 2778, 2780, 2782, 2784, 2786, 2788, 2790, 2792, 2794, 2796, 2798, 2800, 2802, 2804, 2806, 2808, 2810, 2812, 2814, 2816, 2818, 2820, 2822, 2824, 2826, 2828, 2830, 2832, 2834, 2836, 2838, 2840, 2842, 2844, 2846, 2848, 2850, 2852, 2854, 2856, 2858, 2860, 2862, 2864, 2866, 2868, 2870, 2872, 2874, 2876, 2878, 2880, 2882, 2884, 2886, 2888, 2890, 2892, 2894, 2896, 2898, 2900, 2902, 2904, 2906, 2908, 2910, 2912, 2914, 2916, 2918, 2920, 2922, 2924, 2926, 2928, 2930, 2932, 2934, 2936, 2938, 2940, 2942, 2944, 2946, 2948, 2950, 2952, 2954, 2956, 2958, 2960, 2962, 2964, 2966, 2968, 2970, 2972, 2974, 2976, 2978, 2980, 2982, 2984, 2986, 2988, 2990, 2992, 2994, 2996, 2998, 3000, 3002, 3004, 3006, 3008, 3010, 3012, 3014, 3016, 3018, 3020, 3022, 3024, 3026, 3028, 3030, 3032, 3034, 3036, 3038, 3040, 3042, 3044, 3046, 3048, 3050, 3052, 3054, 3056, 3058, 3060, 3062, 3064, 3066, 3068, 3070, 3072, 3074, 3076, 3078, 3080, 3082, 3084, 3086, 3088, 3090, 3092, 3094, 3096, 3098, 3100, 3102, 3104, 3106, 3108, 3110, 3112, 3114, 3116, 3118, 3120, 3122, 3124, 3126, 3128, 3130, 3132, 3134, 3136, 3138, 3140, 3142, 3144, 3146, 3148, 3150, 3152, 3154, 3156, 3158, 3160, 3162, 3164, 3166, 3168, 3170, 3172, 3174, 3176, 3178, 3180, 3182, 3184, 3186, 3188, 3190, 3192, 3194, 3196, 3198, 3200, 3202, 3204, 3206, 3208, 3210, 3212, 3214, 3216, 3218, 3220, 3222, 3224, 3226, 3228, 3230, 3232, 3234, 3236, 3238, 3240, 3242, 3244, 3246, 3248, 3250, 3252, 3254, 3256, 3258, 3260, 3262, 3264, 3266, 3268, 3270, 3272, 3274, 3276, 3278, 3280, 3282, 3284, 3286, 3288, 3290, 3292, 3294, 3296, 3298, 3300, 3302, 3304, 3306, 3308, 3310, 3312, 3314, 3316, 3318, 3320, 3322, 3324, 3326, 3328, 3330, 3332, 3334, 3336, 3338, 3340, 3342, 3344, 3346, 3348, 3350, 3352, 3354, 3356, 3358, 3360, 3362, 3364, 3366, 3368, 3370, 3372, 3374, 3376, 3378, 3380, 3382, 3384, 3386, 3388, 3390, 3392, 3394, 3396, 3398, 3400, 3402, 3404, 3406, 3408, 3410, 3412, 3414, 3416, 3418, 3420, 3422, 3424, 3426, 3428, 3430, 3432, 3434, 3436, 3438, 3440, 3442, 3444, 3446, 3448, 3450, 3452, 3454, 3456, 3458, 3460, 3462, 3464, 3466, 3468, 3470, 3472, 3474, 3476, 3478, 3480, 3482, 3484, 3486, 3488, 3490, 3492, 3494, 3496, 3498, 3500, 3502, 3504, 3506, 3508, 3510, 3512, 3514, 3516, 3518, 3520, 3522, 3524, 3526, 3528, 3530, 3532, 3534, 3536, 3538, 3540, 3542, 3544, 3546, 3548, 3550, 3552, 3554, 3556, 3558, 3560, 3562, 3564, 3566, 3568, 3570, 3572, 3574, 3576, 3578, 3580, 3582, 3584, 3586, 3588, 3590, 3592, 3594, 3596, 3598, 3600, 3602, 3604, 3606, 3608, 3610, 3612, 3614, 3616, 3618, 3620, 3622, 3624, 3626, 3628, 3630, 3632, 3634, 3636, 3638, 3640, 3642, 3644, 3646, 3648, 3650, 3652, 3654, 3656, 3658, 3660, 3662, 3664, 3666, 3668, 3670, 3672, 3674, 3676, 3678, 3680, 3682, 3684, 3686, 3688, 3690, 3692, 3694, 3696, 3698, 3700, 3702, 3704, 3706, 3708, 3710, 3712, 3714, 3716, 3718, 3720, 3722, 3724, 3726, 3728, 3730, 3732, 3734, 3736, 3738, 3740, 3742, 3744, 3746, 3748, 3750, 3752, 3754, 3756, 3758, 3760, 3762, 3764, 3766, 3768, 3770, 3772, 3774, 3776, 3778, 3780, 3782, 3784, 3786, 3788, 3790, 3792, 3794, 3796, 3798, 3800, 3802, 3804, 3806, 3808, 3810, 3812, 3814, 3816, 3818, 3820, 3822, 3824, 3826, 3828, 3830, 3832, 3834, 3836, 3838, 3840, 3842, 3844, 3846, 3848, 3850, 3852, 3854, 3856, 3858, 3860, 3862, 3864, 3866, 3868, 3870, 3872, 3874, 3876, 3878, 3880, 3882, 3884, 3886, 3888, 3890, 3892, 3894, 3896, 3898, 3900, 3902, 3904, 3906, 3908, 3910, 3912, 3914, 3916, 3918, 3920, 3922, 3924, 3926, 3928, 3930, 3932, 3934, 3936, 3938, 3940, 3942, 3944, 3946, 3948, 3950, 3952, 3954, 3956, 3958, 3960, 3962, 3964, 3966, 3968, 3970, 3972, 3974, 3976, 3978, 3980, 3982, 3984, 3986, 3988, 3990, 3992, 3994, 3996, 3998, 4000, 4002, 4004, 4006, 4008, 4010, 4012, 4014, 4016, 4018, 4020, 4022, 4024, 4026, 4028, 4030, 4032, 4034, 4036, 4038, 4040, 4042, 4044, 4046, 4048, 4050, 4052, 4054, 4056, 4058, 4060, 4062, 4064, 4066, 4068, 4070, 4072, 4074, 4076, 4078, 4080, 4082, 4084, 4086, 4088, 4090, 4092, 4094, 4096, 4098, 4100, 4102, 4104, 4106, 4108, 4110, 4112, 4114, 4116, 4118, 4120, 4122, 4124, 4126, 4128, 4130, 4132, 4134, 4136, 4138, 4140, 4142, 4144, 4146, 4148, 4150, 4152, 4154, 4156, 4158, 4160, 4162, 4164, 4166, 4168, 4170, 4172, 4174, 4176, 4178, 4180, 4182, 4184, 4186, 4188, 4190, 4192, 4194, 4196, 4198, 4200, 4202, 4204, 4206, 4208, 4210, 4212, 4214, 4216, 4218, 4220, 4222, 4224, 4226, 4228, 4230, 4232, 4234, 4236, 4238, 4240, 4242, 4244, 4246, 4248, 4250, 4252, 4254, 4256, 4258, 4260, 4262, 4264, 4266, 4268, 4270, 4272, 4274, 4276; 4278, 4280, 4282, 4284, 4286, 4288, 4290, 4292, 4294, 4296, 4298, 4300, 4302, 4304, 4306, 4308, 4310, 4312, 4314, 4316, 4318, 4320, 4322, 4324, 4326, 4328, 4330, 4332, 4334, 4336, 4338, 4340, 4342, 4344, 4346, 4348, 4350, 4352, 4354, 4356, 4358, 4360, 4362, 4364, 4366, 4368, 4370, 4372, 4374, 4376, 4378, 4380, 4382, 4384, 4386, 4388, 4390, 4392, 4394, 4396, 4398, 4400, 4402, 4404, 4406, 4408, 4410, 4412, 4414, 4416, 4418, 4420, 4422, 4424, 4426, 4428, 4430, 4432, 4434, 4436, 4438, 4440, 4442, 4444, 4446, 4448, 4450, 4452, 4454, 4456, 4458, 4460, 4462, 4464, 4466, 4468, 4470, 4472, 4474, 4476, 4478, 4480, 4482, 4484, 4486, 4488, 4490, 4492, 4494, 4496, 4498, 4500, 4502, 4504, 4506, 4508, 4510, 4512, 4514, 4516, 4518, 4520, 4522, 4524, 4526, 4528, 4530, 4532, 4534, 4536, 4538, 4540, 4542, 4544, 4546, 4548, 4550, 4552, 4554, 4556, 4558, 4560, 4562, 4564, 4566, 4568, 4570, 4572, 4574, 4576, 4578, 4580, 4582, 4584, 4586, 4588, 4590, 4592, 4594, 4596, 4598, 4600, 4602, 4604, 4606, 4608, 4610, 4612, 4614, 4616, 4618, 4620, 4622, 4624, 4626, 4628, 4630, 4632, 4634, 4636, 4638, 4640, 4642, 4644, 4646, 4648, 4650, 4652, 4654, 4656, 4658, 4660, 4662, 4664, 4666, 4668, 4670, 4672, 4674, 4676, 4678, 4680, 4682, 4684, 4686, 4688, 4690, 4692, 4694, 4696, 4698, 4700, 4702, 4704, 4706, 4708, 4710, 4712, 4714, 4716, 4718, 4720, 4722, 4724, 4726, 4728, 4730, 4732, 4734, 4736, 4738, 4740, 4742, 4744, 4746, 4748, 4750, 4752, 4754, 4756, 4758, 4760, 4762, 4764, 4766, 4768, 4770, 4772, 4774, 4776, 4778, 4780, 4782, 4784, 4786, 4788, 4790, 4792, 4794, 4796, 4798, 4800, 4802, 4804, 4806, 4808, 4810, 4812, 4814, 4816, 4818, 4820, 4822, 4824, 4826, 4828, 4830, 4832, 4834, 4836, 4838, 4840, 4842, 4844, 4846, 4848, 4850, 4852, 4854, 4856, 4858, 4860, 4862, 4864, 4866, 4868, 4870, 4872, 4874, 4876, 4878, 4880, 4882, 4884, 4886, 4888, 4890, 4892, 4894, 4896, 4898, 4900, 4902, 4904, 4906, 4908, 4910, 4912, 4914, 4916, 4918, 4920, 4922, 4924, 4926, 4928, 4930, 4932, 4934, 4936, 4938, 4940, 4942, 4944, 4946, 4948, 4950, 4952, 4954, 4956, 4958, 4960, 4962, 4964, 4966, 4968, 4970, 4972, 4974, 4976, 4978.

2. A protein having 50% or greater sequence identity to a protein according to claim 1.

3. A protein comprising a fragment of an amino acid sequence selected from the group consisting of SEQ IDs 2, 4, 6, 8, 10, 12, 14, 16, 18, 20, 22, 24, 26, 28, 30, 32, 34, 36, 38, 40, 42, 44, 46, 48, 50, 52, 54, 56, 58, 60, 62, 64, 66, 68, 70, 72, 74, 76, 78, 80, 82, 84, 86, 88, 90, 92, 94, 96, 98, 100, 102, 104, 106, 108, 110, 112, 114, 116, 118, 120, 122, 124, 126, 128, 130, 132, 134, 136, 138, 140, 142, 144, 146, 148, 150, 152, 154, 156, 158, 160, 162, 164, 166, 168, 170, 172, 174, 176, 178, 180, 182, 184, 186, 188, 190, 192, 194, 196, 198, 200, 202, 204, 206, 208, 210, 212, 214, 216, 218, 220, 222, 224, 226, 228, 230, 232, 234, 236, 238, 240, 242, 244, 246, 248, 250, 252, 254, 256, 258, 260, 262, 264, 266, 268, 270, 272, 274, 276, 278, 280, 282, 284, 286, 288, 290, 292, 294, 296, 298, 300, 302, 304, 306, 308, 310, 312, 314, 316, 318, 320, 322, 324, 326, 328, 330, 332, 334, 336, 338, 340, 342, 344, 346, 348, 350, 352, 354, 356, 358, 360, 362, 364, 366, 368, 370, 372, 374, 376, 378, 380, 382, 384, 386, 388, 390, 392, 394, 396, 398, 400, 402, 404, 406, 408, 410, 412, 414, 416, 418, 420, 422, 424, 426, 428, 430, 432, 434, 436, 438, 440, 442, 444, 446, 448, 450, 452, 454, 456, 458, 460, 462, 464, 466, 468, 470, 472, 474, 476, 478, 480, 482, 484, 486, 488, 490, 492, 494, 496, 498, 500, 502, 504, 506, 508, 510, 512, 514, 516, 518, 520, 522, 524, 526, 528, 530, 532, 534, 536, 538, 540, 542, 544, 546, 548, 550, 552, 554, 556, 558, 560, 562, 564, 566, 568, 570, 572, 574, 576, 578, 580, 582, 584, 586, 588, 590, 592, 594, 596, 598, 600, 602, 604, 606, 608, 610, 612, 614, 616, 618, 620, 622, 624, 626, 628, 630, 632, 634, 636, 638, 640, 642, 644, 646, 648, 650, 652, 654, 656, 658, 660, 662, 664, 666, 668, 670, 672, 674, 676, 678, 680, 682, 684, 686, 688, 690, 692, 694, 696, 698, 700, 702, 704, 706, 708, 710, 712, 714, 716, 718, 720, 722, 724, 726, 728, 730, 732, 734, 736, 738, 740, 742, 744, 746, 748, 750, 752, 754, 756, 758, 760, 762, 764, 766, 768, 770, 772, 774, 776, 778, 780, 782, 784, 786, 788, 790, 792, 794, 796, 798, 800, 802, 804, 806, 808, 810, 812, 814, 816, 818, 820, 822, 824, 826, 828, 830, 832, 834, 836, 838, 840, 842, 844, 846, 848, 850, 852, 854, 856, 858, 860, 862, 864, 866, 868, 870, 872, 874, 876, 878, 880, 882, 884, 886, 888, 890, 892, 894, 896, 898, 900, 902, 904, 906, 908, 910, 912, 914, 916, 918, 920, 922, 924, 926, 928, 930, 932, 934, 936, 938, 940, 942, 944, 946, 948, 950, 952, 954, 956, 958, 960, 962, 964, 966, 968, 970, 972, 974, 976, 978, 980, 982, 984, 986, 988, 990, 992, 994, 996, 998, 1000, 1002, 1004, 1006, 1008, 1010, 1012, 1014, 1016, 1018, 1020, 1022, 1024, 1026, 1028, 1030, 1032, 1034, 1036, 1038, 1040, 1042, 1044, 1046, 1048, 1050, 1052, 1054, 1056, 1058, 1060, 1062, 1064, 1066, 1068, 1070, 1072, 1074, 1076, 1078, 1080, 1082, 1084, 1086, 1088, 1090, 1092, 1094, 1096, 1098, 1100, 1102, 1104, 1106, 1108, 1110, 1112, 1114, 1116, 1118, 1120, 1122, 1124, 1126, 1128, 1130, 1132, 1134, 1136, 1138, 1140, 1142, 1144, 1146, 1148, 1150, 1152, 1154, 1156, 1158, 1160, 1162, 1164, 1166, 1168, 1170, 1172, 1174, 1176, 1178, 1180, 1182, 1184, 1186, 1188, 1190, 1192, 1194, 1196, 1198, 1200, 1202, 1204, 1206, 1208, 1210, 1212, 1214, 1216, 1218, 1220, 1222, 1224, 1226, 1228, 1230, 1232, 1234, 1236, 1238, 1240, 1242, 1244, 1246, 1248, 1250, 1252, 1254, 1256, 1258, 1260, 1262; 1264, 1266, 1268, 1270, 1272, 1274, 1276, 1278, 1280, 1282, 1284, 1286, 1288, 1290, 1292, 1294, 1296, 1298, 1300, 1302, 1304, 1306, 1308, 1310, 1312, 1314, 1316, 1318, 1320, 1322, 1324, 1326, 1328, 1330, 1332, 1334, 1336, 1338, 1340, 1342, 1344, 1346, 1348, 1350, 1352, 1354, 1356, 1358, 1360, 1362, 1364, 1366, 1368, 1370, 1372, 1374, 1376, 1378, 1380, 1382, 1384, 1386, 1388, 1390, 1392, 1394, 1396, 1398; 1400, 1402, 1404, 1406, 1408, 1410, 1412, 1414, 1416, 1418, 1420, 1422, 1424, 1426, 1428, 1430, 1432, 1434, 1436, 1438, 1440, 1442, 1444, 1446, 1448, 1450, 1452, 1454, 1456, 1458, 1460, 1462, 1464, 1466, 1468, 1470, 1472, 1474, 1476, 1478, 1480, 1482, 1484, 1486, 1488, 1490, 1492, 1494, 1496, 1498, 1500, 1502, 1504, 1506, 1508, 1510, 1512, 1514, 1516, 1518, 1520, 1522, 1524, 1526, 1528, 1530, 1532, 1534, 1536, 1538, 1540, 1542, 1544, 1546, 1548, 1550, 1552, 1554, 1556, 1558, 1560, 1562, 1564, 1566, 1568, 1570, 1572, 1574, 1576, 1578, 1580, 1582, 1584, 1586, 1588, 1590, 1592, 1594, 1596, 1598, 1600, 1602, 1604, 1606, 1608, 1610, 1612, 1614, 1616, 1618, 1620, 1622, 1624, 1626, 1628, 1630, 1632, 1634, 1636, 1638, 1640, 1642, 1644, 1646, 1648, 1650, 1652, 1654, 1656, 1658, 1660, 1662, 1664, 1666, 1668, 1670, 1672, 1674, 1676, 1678, 1680, 1682, 1684, 1686, 1688, 1690, 1692, 1694, 1696, 1698, 1700, 1702, 1704, 1706, 1708, 1710, 1712, 1714, 1716, 1718, 1720, 1722, 1724, 1726, 1728, 1730, 1732, 1734, 1736, 1738, 1740, 1742, 1744, 1746, 1748, 1750, 1752, 1754, 1756, 1758, 1760, 1762, 1764, 1766, 1768, 1770, 1772, 1774, 1776, 1778, 1780, 1782, 1784, 1786, 1788, 1790, 1792, 1794, 1796, 1798, 1800, 1802, 1804, 1806, 1808, 1810, 1812, 1814, 1816, 1818, 1820, 1822, 1824, 1826, 1828, 1830, 1832, 1834, 1836, 1838, 1840, 1842, 1844, 1846, 1848, 1850, 1852, 1854, 1856, 1858, 1860, 1862, 1864, 1866, 1868, 1870, 1872, 1874, 1876, 1878, 1880, 1882, 1884, 1886, 1888, 1890, 1892, 1894, 1896, 1898, 1900, 1902, 1904, 1906, 1908, 1910, 1912, 1914, 1916, 1918, 1920, 1922, 1924, 1926, 1928, 1930, 1932, 1934, 1936, 1938, 1940, 1942, 1944, 1946, 1948, 1950, 1952, 1954, 1956, 1958, 1960, 1962, 1964, 1966, 1968, 1970, 1972, 1974, 1976, 1978, 1980, 1982, 1984, 1986, 1988, 1990, 1992, 1994, 1996, 1998, 2000, 2002, 2004, 2006, 2008, 2010, 2012, 2014, 2016, 2018, 2020, 2022, 2024, 2026, 2028, 2030, 2032, 2034, 2036, 2038, 2040, 2042, 2044, 2046, 2048, 2050, 2052, 2054, 2056, 2058, 2060, 2062, 2064, 2066, 2068, 2070, 2072, 2074, 2076, 2078, 2080, 2082, 2084, 2086, 2088, 2090, 2092, 2094, 2096, 2098, 2100, 2102, 2104, 2106, 2108, 2110, 2112, 2114, 2116, 2118, 2120, 2122, 2124, 2126, 2128, 2130, 2132, 2134, 2136, 2138, 2140, 2142, 2144, 2146, 2148, 2150, 2152, 2154, 2156, 2158, 2160, 2162, 2164, 2166, 2168, 2170, 2172, 2174, 2176, 2178, 2180, 2182, 2184, 2186, 2188, 2190, 2192, 2194, 2196, 2198, 2200, 2202, 2204, 2206, 2208, 2210, 2212, 2214, 2216, 2218, 2220, 2222, 2224, 2226, 2228, 2230, 2232, 2234, 2236, 2238, 2240, 2242, 2244, 2246, 2248, 2250, 2252, 2254, 2256, 2258, 2260, 2262, 2264, 2266, 2268, 2270, 2272, 2274, 2276, 2278, 2280, 2282, 2284, 2286, 2288, 2290, 2292, 2294, 2296, 2298, 2300, 2302, 2304, 2306, 2308, 2310, 2312, 2314, 2316, 2318, 2320, 2322, 2324, 2326, 2328, 2330, 2332, 2334, 2336, 2338, 2340, 2342, 2344, 2346, 2348, 2350, 2352, 2354, 2356, 2358, 2360, 2362, 2364, 2366, 2368, 2370, 2372, 2374, 2376, 2378, 2380, 2382, 2384, 2386, 2388, 2390, 2392, 2394, 2396, 2398, 2400, 2402, 2404, 2406, 2408, 2410, 2412, 2414, 2416, 2418, 2420, 2422, 2424, 2426, 2428, 2430, 2432, 2434, 2436, 2438, 2440, 2442, 2444, 2446, 2448, 2450, 2452, 2454, 2456, 2458, 2460, 2462, 2464, 2466, 2468, 2470, 2472, 2474, 2476, 2478, 2480, 2482, 2484, 2486, 2488, 2490, 2492, 2494, 2496, 2498, 2500, 2502, 2504, 2506, 2508, 2510, 2512, 2514, 2516, 2518, 2520, 2522, 2524, 2526, 2528, 2530, 2532, 2534, 2536, 2538, 2540, 2542, 2544, 2546, 2548, 2550, 2552, 2554, 2556, 2558, 2560, 2562, 2564, 2566, 2568, 2570, 2572, 2574, 2576, 2578, 2580, 2582, 2584, 2586, 2588, 2590, 2592, 2594, 2596, 2598, 2600, 2602, 2604, 2606, 2608, 2610, 2612, 2614, 2616, 2618, 2620, 2622, 2624, 2626, 2628, 2630, 2632, 2634, 2636, 2638, 2640, 2642, 2644, 2646, 2648, 2650, 2652, 2654, 2656, 2658, 2660, 2662, 2664, 2666, 2668, 2670, 2672, 2674, 2676, 2678, 2680, 2682, 2684, 2686, 2688, 2690, 2692, 2694, 2696, 2698, 2700, 2702, 2704, 2706, 2708, 2710, 2712, 2714, 2716, 2718, 2720, 2722, 2724, 2726, 2728, 2730, 2732, 2734, 2736, 2738, 2740, 2742, 2744, 2746, 2748, 2750, 2752, 2754, 2756, 2758, 2760, 2762, 2764, 2766, 2768, 2770, 2772, 2774, 2776, 2778, 2780, 2782, 2784, 2786, 2788, 2790, 2792, 2794, 2796, 2798, 2800, 2802, 2804, 2806, 2808, 2810, 2812, 2814, 2816, 2818, 2820, 2822, 2824, 2826, 2828, 2830, 2832, 2834, 2836, 2838, 2840, 2842, 2844, 2846, 2848, 2850, 2852, 2854, 2856, 2858, 2860, 2862, 2864, 2866, 2868, 2870, 2872, 2874, 2876, 2878, 2880, 2882, 2884, 2886, 2888, 2890, 2892, 2894, 2896, 2898, 2900, 2902, 2904, 2906, 2908, 2910, 2912, 2914, 2916, 2918, 2920, 2922, 2924, 2926, 2928, 2930, 2932, 2934, 2936, 2938, 2940, 2942, 2944, 2946, 2948, 2950, 2952, 2954, 2956, 2958, 2960, 2962, 2964, 2966, 2968, 2970, 2972, 2974, 2976, 2978, 2980, 2982, 2984, 2986, 2988, 2990, 2992, 2994, 2996, 2998, 3000, 3002, 3004, 3006, 3008, 3010, 3012, 3014, 3016, 3018, 3020, 3022, 3024, 3026, 3028, 3030, 3032, 3034, 3036, 3038, 3040, 3042, 3044, 3046, 3048, 3050, 3052, 3054, 3056, 3058, 3060, 3062, 3064, 3066, 3068, 3070, 3072, 3074, 3076, 3078, 3080, 3082, 3084, 3086, 3088, 3090, 3092, 3094, 3096, 3098, 3100, 3102, 3104, 3106, 3108, 3110, 3112, 3114, 3116, 3118, 3120, 3122, 3124, 3126, 3128, 3130, 3132, 3134, 3136, 3138, 3140, 3142, 3144, 3146, 3148, 3150, 3152, 3154, 3156, 3158, 3160, 3162, 3164, 3166, 3168, 3170, 3172, 3174, 3176, 3178, 3180, 3182, 3184, 3186, 3188, 3190, 3192, 3194, 3196, 3198, 3200, 3202, 3204, 3206, 3208, 3210, 3212, 3214, 3216, 3218, 3220, 3222, 3224, 3226, 3228, 3230, 3232, 3234, 3236, 3238, 3240, 3242, 3244, 3246, 3248, 3250, 3252, 3254, 3256, 3258, 3260, 3262, 3264, 3266, 3268, 3270, 3272, 3274, 3276, 3278, 3280, 3282, 3284, 3286, 3288, 3290, 3292, 3294, 3296, 3298, 3300, 3302, 3304, 3306, 3308, 3310, 3312, 3314, 3316, 3318, 3320, 3322, 3324, 3326, 3328, 3330, 3332, 3334, 3336, 3338, 3340, 3342, 3344, 3346, 3348, 3350, 3352, 3354, 3356, 3358, 3360, 3362, 3364, 3366, 3368, 3370, 3372, 3374, 3376, 3378, 3380, 3382, 3384, 3386, 3388, 3390, 3392, 3394, 3396, 3398, 3400, 3402, 3404, 3406, 3408, 3410, 3412, 3414, 3416, 3418, 3420, 3422, 3424, 3426, 3428, 3430, 3432, 3434, 3436, 3438, 3440, 3442, 3444, 3446, 3448, 3450, 3452, 3454, 3456, 3458, 3460, 3462, 3464, 3466, 3468, 3470, 3472, 3474, 3476, 3478, 3480, 3482, 3484, 3486, 3488, 3490, 3492, 3494, 3496, 3498, 3500, 3502, 3504, 3506, 3508, 3510, 3512, 3514, 3516, 3518, 3520, 3522, 3524, 3526, 3528, 3530, 3532, 3534, 3536, 3538, 3540, 3542, 3544, 3546, 3548, 3550, 3552, 3554, 3556, 3558, 3560, 3562, 3564, 3566, 3568, 3570, 3572, 3574, 3576, 3578, 3580, 3582, 3584, 3586, 3588, 3590, 3592, 3594, 3596, 3598, 3600, 3602, 3604, 3606, 3608, 3610, 3612, 3614, 3616, 3618, 3620, 3622, 3624, 3626, 3628, 3630, 3632, 3634, 3636, 3638, 3640, 3642, 3644, 3646, 3648, 3650, 3652, 3654, 3656, 3658, 3660, 3662, 3664, 3666, 3668, 3670, 3672, 3674, 3676, 3678, 3680, 3682, 3684, 3686, 3688, 3690, 3692, 3694, 3696, 3698, 3700, 3702, 3704, 3706, 3708, 3710, 3712, 3714, 3716, 3718, 3720, 3722, 3724, 3726, 3728, 3730, 3732, 3734, 3736, 3738, 3740, 3742, 3744, 3746, 3748, 3750, 3752, 3754, 3756, 3758, 3760, 3762, 3764, 3766, 3768, 3770, 3772, 3774, 3776, 3778, 3780, 3782, 3784, 3786, 3788, 3790, 3792, 3794, 3796, 3798, 3800, 3802, 3804, 3806, 3808, 3810, 3812, 3814, 3816, 3818, 3820, 3822, 3824, 3826, 3828, 3830, 3832, 3834, 3836, 3838, 3840, 3842, 3844, 3846, 3848, 3850, 3852, 3854, 3856, 3858, 3860, 3862, 3864, 3866, 3868, 3870, 3872, 3874, 3876, 3878, 3880, 3882, 3884, 3886, 3888, 3890, 3892, 3894, 3896, 3898, 3900, 3902, 3904, 3906, 3908, 3910, 3912, 3914, 3916, 3918, 3920, 3922, 3924, 3926, 3928, 3930, 3932, 3934, 3936, 3938, 3940, 3942, 3944, 3946, 3948, 3950, 3952, 3954, 3956, 3958, 3960, 3962, 3964, 3966, 3968, 3970, 3972, 3974, 3976, 3978, 3980, 3982, 3984, 3986, 3988, 3990, 3992, 3994, 3996, 3998, 4000, 4002, 4004, 4006, 4008, 4010, 4012, 4014, 4016, 4018, 4020, 4022, 4024, 4026, 4028, 4030, 4032, 4034, 4036, 4038, 4040, 4042, 4044, 4046, 4048, 4050, 4052, 4054, 4056, 4058, 4060, 4062, 4064, 4066, 4068, 4070, 4072, 4074, 4076, 4078, 4080, 4082, 4084, 4086, 4088, 4090, 4092, 4094, 4096, 4098, 4100, 4102, 4104, 4106, 4108, 4110, 4112, 4114, 4116, 4118, 4120, 4122, 4124, 4126, 4128, 4130, 4132, 4134, 4136, 4138, 4140, 4142, 4144, 4146, 4148, 4150, 4152, 4154, 4156, 4158, 4160, 4162, 4164, 4166, 4168, 4170, 4172, 4174, 4176, 4178, 4180, 4182, 4184, 4186, 4188, 4190, 4192, 4194, 4196, 4198, 4200, 4202, 4204, 4206, 4208, 4210, 4212, 4214, 4216, 4218, 4220, 4222, 4224, 4226, 4228, 4230, 4232, 4234, 4236, 4238, 4240, 4242, 4244, 4246, 4248, 4250, 4252, 4254, 4256, 4258, 4260, 4262, 4264, 4266, 4268, 4270, 4272, 4274, 4276, 4278, 4280, 4282, 4284, 4286, 4288, 4290, 4292, 4294, 4296, 4298, 4300, 4302, 4304, 4306, 4308, 4310, 4312, 4314, 4316, 4318, 4320, 4322, 4324, 4326, 4328, 4330, 4332, 4334, 4336, 4338, 4340, 4342, 4344, 4346, 4348, 4350, 4352, 4354, 4356, 4358, 4360, 4362, 4364, 4366, 4368, 4370, 4372, 4374, 4376, 4378, 4380, 4382, 4384, 4386, 4388, 4390, 4392, 4394, 4396, 4398, 4400, 4402, 4404, 4406, 4408, 4410, 4412, 4414, 4416, 4418, 4420, 4422, 4424, 4426, 4428, 4430, 4432, 4434, 4436, 4438, 4440, 4442, 4444, 4446, 4448, 4450, 4452, 4454, 4456, 4458, 4460, 4462, 4464, 4466, 4468, 4470, 4472, 4474, 4476, 4478, 4480, 4482, 4484, 4486, 4488, 4490, 4492, 4494, 4496, 4498, 4500, 4502, 4504, 4506, 4508, 4510, 4512, 4514, 4516, 4518, 4520, 4522, 4524, 4526, 4528, 4530, 4532, 4534, 4536, 4538, 4540, 4542, 4544, 4546, 4548, 4550, 4552, 4554, 4556, 4558, 4560, 4562, 4564, 4566, 4568, 4570, 4572, 4574, 4576, 4578, 4580, 4582, 4584, 4586, 4588, 4590, 4592, 4594, 4596, 4598, 4600, 4602, 4604, 4606, 4608, 4610, 4612, 4614, 4616, 4618, 4620, 4622, 4624, 4626, 4628, 4630, 4632, 4634, 4636, 4638, 4640, 4642, 4644, 4646, 4648, 4650, 4652, 4654, 4656, 4658, 4660, 4662, 4664, 4666, 4668, 4670, 4672, 4674, 4676, 4678, 4680, 4682, 4684, 4686, 4688, 4690, 4692, 4694, 4696, 4698, 4700, 4702, 4704, 4706, 4708, 4710, 4712, 4714, 4716, 4718, 4720; 4722, 4724, 4726, 4728, 4730, 4732, 4734, 4736, 4738, 4740, 4742, 4744, 4746, 4748, 4750, 4752, 4754, 4756, 4758, 4760, 4762, 4764, 4766, 4768, 4770, 4772, 4774, 4776, 4778, 4780, 4782, 4784, 4786, 4788, 4790, 4792, 4794, 4796, 4798, 4800, 4802, 4804, 4806, 4808, 4810, 4812, 4814, 4816, 4818, 4820, 4822, 4824, 4826, 4828, 4830, 4832, 4834, 4836, 4838, 4840, 4842, 4844, 4846, 4848, 4850, 4852, 4854, 4856, 4858, 4860, 4862, 4864, 4866, 4868, 4870, 4872, 4874, 4876, 4878, 4880, 4882, 4884, 4886, 4888, 4890, 4892, 4894, 4896, 4898, 4900 4902, 4904, 4906, 4908, 4910, 4912, 4914, 4916, 4918, 4920, 4922, 4924, 4926, 4928, 4930, 4932, 4934, 4936, 4938, 4940, 4942, 4944, 4946, 4948, 4950, 4952, 4954, 4956, 4958, 4960, 4962, 4964, 4966, 4968, 4970, 4972, 4974, 4976, 4978.

4. An antibody which-binds to a protein according to any one of claims 1 to 3.

5. A nucleic acid molecule which encodes a protein according to any one of claims 1 to 3.

6. A nucleic acid molecule according to claim 5, comprising a nucleotide sequence selected from the group consisting of SEQ IDs 1, 3, 5, 7, 9, 11, 13, 15, 17, 19, 21, 23, 25, 27, 29, 31, 33, 35, 37, 39, 41, 43, 45, 47, 49, 51, 53, 55, 57, 59, 61, 63, 65, 67, 69, 71, 73, 75, 77, 79, 81, 83, 85, 87, 89, 91, 93, 95, 97, 99, 101, 103, 105, 107, 109, 111,113, 115, 117, 119, 121, 123, 125, 127, 129, 131, 133, 135, 137, 139, 141, 143, 145, 147, 149, 151, 153, 155, 157, 159, 161, 163, 165, 167, 169, 171, 173, 175, 177, 179, 181, 183, 185, 187, 189, 191, 193, 195, 197, 199, 201, 203, 205, 207, 209, 211, 213, 215, 217, 219, 221, 223, 225, 227, 229, 231, 233, 235, 237, 239, 241, 243, 245, 247, 249, 251, 253, 255, 257, 259, 261, 263, 265, 267, 269, 271, 273, 275, 277, 279, 281, 283, 285, 287, 289, 291, 293, 295, 297, 299, 301, 303, 305, 307, 309, 311, 313, 315, 317, 319, 321, 323, 325, 327, 329, 331, 333, 335, 337, 339, 341, 343, 345, 347, 349, 351, 353, 355, 357, 359, 361, 363, 365, 367, 369, 371, 373, 375, 377, 379, 381, 383, 385, 387, 389, 391, 393, 395, 397, 399, 401, 403, 405, 407, 409, 411, 413, 415, 417, 419, 421, 423, 425, 427, 429, 431, 433, 435, 437, 439, 441, 443, 445, 447, 449, 451, 453, 455, 457, 459, 461, 463, 465, 467, 469, 471, 473, 475, 477, 479, 481, 483, 485, 487, 489, 491, 493, 495, 497, 499, 501, 503, 505, 507, 509, 511, 513, 515, 517, 519, 521, 523, 525, 527, 529, 531, 533, 535, 537, 539, 541, 543, 545, 547, 549, 551, 553, 555, 557, 559, 561, 563, 565, 567, 569, 571, 573, 575, 577, 579, 581; 583, 585, 587, 589, 591, 593, 595, 597, 599, 601, 603, 605, 607, 609, 611, 613, 615, 617, 619, 621, 623, 625, 627, 629, 631, 633, 635, 637, 639, 641, 643, 645, 647, 649, 651, 653, 655, 657, 659, 661, 663, 665, 667, 669, 671, 673, 675, 677, 679, 681, 683, 685, 687, 689, 691, 693, 695, 697, 699, 701, 703, 705, 707, 709, 711, 713, 715, 717, 719, 721, 723, 725, 727, 729, 731, 733, 735, 737, 739, 741, 743, 745, 747, 749, 751, 753, 755, 757, 759, 761, 763, 765, 767, 769, 771, 773, 775, 777, 779, 781, 783, 785, 787, 789, 791, 793, 795, 797, 799, 801, 803, 805, 807, 809, 811, 813, 815, 817, 819, 821, 823, 825, 827, 829, 831, 833, 835, 837, 839, 841, 843, 845, 847, 849, 851, 853, 855, 857, 859, 861, 863, 865, 867, 869, 871, 873, 875, 877, 879, 881, 883, 885, 887, 889, 891, 893, 895, 897, 899, 901, 903, 905, 907, 909, 911, 913, 915, 917, 919, 921, 923, 925, 927, 929, 931, 933, 935, 937, 939, 941, 943, 945, 947, 949, 951, 953, 955, 957, 959, 961, 963, 965, 967, 969, 971, 973, 975, 977, 979, 981, 983, 985, 987, 989, 991, 993, 995, 997, 999, 1001, 1003, 1005, 1007, 1009, 1011, 1013, 1015, 1017, 1019, 1021, 1023, 1025, 1027, 1029, 1031, 1033, 1035, 1037, 1039, 1041, 1043, 1045, 1047, 1049, 1051, 1053, 1055, 1057, 1059, 1061, 1063, 1065, 1067, 1069, 1071, 1073, 1075, 1077, 1079, 1081, 1083, 1085, 1087, 1089, 1091, 1093, 1095, 1097, 1099, 1101, 1103, 1105, 1107, 1109, 1111, 1113, 1115, 1117, 1119, 1121, 1123, 1125, 1127, 1129, 1131, 1133, 1135, 1137, 1139, 1141, 1143, 1145, 1147, 1149, 1151, 1153, 1155, 1157, 1159, 1161, 1163, 1165, 1167, 1169, 1171, 1173, 1175, 1177, 1179, 1181, 1183, 1185, 1187, 1189, 1191, 1193, 1195, 1197, 1199, 1201, 1203, 1205, 1207, 1209, 1211, 1213, 1215, 1217, 1219, 1221, 1223, 1225, 1227, 1229, 1231, 1233, 1235, 1237, 1239, 1241, 1243, 1245, 1247, 1249, 1251, 1253, 1.255, 1257, 1259, 1261, 1263, 1265, 1267, 1269, 1271, 1273, 1275, 1277, 1279, 1281, 1283, 1285, 1287, 1289, 1291, 1293, 1295, 1297, 1299, 1301, 1303, 1305, 1307, 1309, 1311, 1313, 1315, 1317, 1319, 1321, 1323, 1325, 1327, 1329, 1331, 1333, 1335, 1337, 1339, 1341, 1343, 1345, 1347, 1349, 1351, 1353, 1355, 1357, 1359, 1361, 1363, 1365, 1367, 1369, 1371, 1373, 1375, 1377, 1379, 1381, 1383, 1385, 1387, 1389, 1391, 1393, 1395, 1397, 1399, 1401, 1403, 1405, 1407, 1409, 1411, 1413, 1415, 1417, 1419, 1421, 1423, 1425, 1427, 1429, 1431, 1433, 1435, 1437, 1439, 1441, 1443, 1445, 1447, 1449, 1451, 1453, 1455, 1457, 1459, 1461, 1463, 1465, 1467, 1469, 1471, 1473, 1475, 1477, 1479, 1481, 1483, 1485, 1487, 1489, 1491, 1493, 1495, 1497, 1499, 1501, 1503, 1505, 1507, 1509, 1511, 1513, 1515, 1517, 1519, 1521, 1523, 1525, 1527, 1529, 1531, 1533, 1535, 1537, 1539, 1541, 1543, 1545, 1547, 1549, 1551, 1553, 1555, 1557, 1559, 1561, 1563, 1565, 1567, 1569, 1571, 1573, 1575, 1577, 1579, 1581, 1583; 1585, 1587, 1589, 1591, 1593, 1595, 1597, 1599, 1601, 1603, 1605, 1607, 1609, 1611, 1613, 1615, 1617, 1619, 1621, 1623, 1625, 1627, 1629, 1631, 1633, 1635, 1637, 1639, 1641, 1643, 1645, 1647, 1649, 1651, 1653, 1655, 1657, 1659, 1661, 1663, 1665, 1667, 1669, 1671, 1673, 1675, 1677, 1679, 1681, 1683, 1685, 1687, 1689, 1691, 1693, 1695, 1697, 1699, 1701, 1703, 1705, 1707, 1709, 1711, 1713, 1715, 1717, 1719, 1721, 1723, 1725, 1727, 1729, 1731, 1733, 1735, 1737, 1739, 1741, 1743, 1745, 1747, 1749, 1751, 1753, 1755, 1757, 1759, 1761, 1763, 1765, 1767, 1769, 1771, 1773, 1775, 1777, 1779, 1781, 1783, 1785, 1787, 1789, 1791, 1793, 1795, 1797, 1799, 1801, 1803, 1805, 1807, 1809, 1811, 1813, 1815, 1817, 1819, 1821, 1823, 1825, 1827, 1829, 1831, 1833, 1835, 1837, 1839, 1841, 1843, 1845, 1847, 1849, 1851, 1853, 1855, 1857, 1859, 1861, 1863, 1865, 1867, 1869, 1871, 1873, 1875, 1877, 1879, 1881, 1883, 1885, 1887, 1889, 1891, 1893, 1895, 1897, 1899, 1901, 1903, 1905, 1907, 1909, 1911, 1913, 1915, 1917, 1919, 1921, 1923, 1925, 1927, 1929, 1931, 1933, 1935, 1937, 1939, 1941, 1943, 1945, 1947, 1949, 1951, 1953, 1955, 1957, 1959, 1961, 1963, 1965, 1967, 1969, 1971, 1973, 1975, 1977, 1979, 1981, 1983, 1985, 1987, 1989, 1991, 1993, 1995, 1997, 1999, 2001, 2003, 2005, 2007, 2009, 2011, 2013, 2015, 2017, 2019, 2021, 2023, 2025, 2027, 2029, 2031, 2033, 2035, 2037, 2039, 2041, 2043, 2045, 2047, 2049, 2051, 2053, 2055, 2057, 2059, 2061, 2063, 2065, 2067, 2069, 2071, 2073, 2075, 2077, 2079, 2081, 2083, 2085, 2087, 2089, 2091, 2093, 2095, 2097, 2099, 2101, 2103, 2105, 2107, 2109, 2111, 2113, 2115, 2117, 2119, 2121, 2123, 2125, 2127, 2129, 2131, 2133, 2135, 2137, 2139, 2141, 2143, 2145, 2147, 2149, 2151, 2153, 2155, 2157, 2159, 2161, 2163, 2165, 2167, 2169, 2171, 2173, 2175, 2177, 2179, 2181, 2183, 2185, 2187, 2189, 2191, 2193, 2195, 2197, 2199, 2201, 2203, 2205, 2207, 2209, 2211, 2213, 2215, 2217, 2219, 2221, 2223, 2225, 2227, 2229, 2231, 2233, 2235, 2237, 2239, 2241, 2243, 2245, 2247, 2249, 2251, 2253, 2255, 2257, 2259, 2261, 2263, 2265, 2267, 2269, 2271, 2273, 2275, 2277, 2279, 2281, 2283, 2285, 2287, 2289, 2291, 2293, 2295, 2297, 2299, 2301, 2303, 2305, 2307, 2309, 2311, 2313, 2315, 2317, 2319, 2321, 2323, 2325, 2327, 2329, 2331, 2333, 2335, 2337, 2339, 2341, 2343, 2345, 2347, 2349, 2351, 2353, 2355, 2357, 2359, 2361, 2363, 2365, 2367, 2369, 2371, 2373, 2375, 2377, 2379, 2381, 2383, 2385, 2387, 2389, 2391, 2393, 2395, 2397, 2399, 2401, 2403, 2405, 2407, 2409, 2411, 2413; 2415, 2417, 2419, 2421, 2423, 2425, 2427, 2429, 2431, 2433, 2435, 2437, 2439, 2441, 2443, 2445, 2447, 2449, 2451, 2453, 2455, 2457, 2459, 2461, 2463, 2465, 2467, 2469, 2471, 2473, 2475, 2477, 2479, 2481, 2483, 2485, 2487, 2489, 2491, 2493, 2495, 2497, 2499, 2501, 2503, 2505, 2507, 2509, 2511, 2513, 2515, 2517, 2519, 2521, 2523, 2525, 2527, 2529, 2531, 2533, 2535, 2537, 2539, 2541, 2543, 2545, 2547, 2549, 2551, 2553, 2555, 2557, 2559, 2561, 2563, 2565, 2567, 2569, 2571, 2573, 2575, 2577, 2579, 2581, 2583, 2585, 2587, 2589, 2591, 2593, 2595, 2597, 2599, 2601, 2603, 2605, 2607, 2609, 2611, 2613, 2615, 2617, 2619, 2621, 2623, 2625, 2627, 2629, 2631, 2633, 2635, 2637, 2639, 2641, 2643, 2645, 2647, 2649, 2651, 2653, 2655, 2657, 2659, 2661, 2663, 2665, 2667, 2669, 2671, 2673, 2675, 2677, 2679, 2681, 2683, 2685, 2687, 2689, 2691, 2693, 2695, 2697, 2699, 2701, 2703, 2705, 2707, 2709, 2711, 2713, 2715, 2717, 2719, 2721, 2723, 2725, 2727, 2729, 2731, 2733, 2735, 2737, 2739, 2741, 2743, 2745, 2747, 2749, 2751, 2753, 2755, 2757, 2759, 2761, 2763, 2765, 2767, 2769, 2771, 2773, 2775, 2777, 2779, 2781, 2783, 2785, 2787, 2789, 2791, 2793, 2795, 2797, 2799, 2801, 2803, 2805, 2807, 2809, 2811, 2813, 2815, 2817, 2819, 2821, 2823, 2825, 2827, 2829, 2831, 2833, 2835, 2837, 2839, 2841, 2843, 2845, 2847, 2849, 2851, 2853, 2855, 2857, 2859, 2861, 2863, 2865, 2867, 2869, 2871, 2873, 2875, 2877, 2879, 2881, 2883, 2885, 2887, 2889, 2891, 2893, 2895, 2897, 2899, 2901, 2903, 2905, 2907, 2909, 2911, 2913, 2915, 2917, 2919, 2921, 2923, 2925, 2927, 2929, 2931, 2933, 2935, 2937, 2939, 2941, 2943, 2945, 2947, 2949, 2951, 2953, 2955, 2957, 2959, 2961, 2963, 2965, 2967, 2969, 2971, 2973, 2975, 2977, 2979, 2981, 2983, 2985, 2987, 2989, 2991, 2993, 2995, 2997, 2999, 3001, 3003, 3005, 3007, 3009, 3011, 3013, 3015, 3017, 3019, 3021, 3023, 3025, 3027, 3029, 3031, 3033, 3035, 3037, 3039, 3041, 3043, 3045, 3047, 3049, 3051, 3053, 3055, 3057, 3059, 3061, 3063, 3065, 3067, 3069, 3071, 3073, 3075, 3077, 3079, 3081, 3083, 3085, 3087, 3089, 3091, 3093, 3095, 3097, 3099, 3101, 3103, 3105, 3107, 3109, 3111, 3113, 3115, 3117, 3119, 3121, 3123, 3125, 3127, 3129, 3131, 3133, 3135, 3137, 3139, 3141, 3143, 3145, 3147, 3149, 3151, 3153, 3155, 3157, 3159, 3161, 3163, 3165, 3167, 3169, 3171, 3173, 3175, 3177, 3179, 3181, 3183, 3185, 3187, 3189, 3191, 3193, 3195, 3197, 3199, 3201, 3203, 3205, 3207, 3209, 3211, 3213, 3215, 3217, 3219, 3221, 3223, 3225, 3227, 3229, 3231, 3233, 3235, 3237, 3239, 3241, 3243, 3245, 3247, 3249, 3251, 3253, 3255, 3257, 3259, 3261, 3263, 3265, 3267, 3269, 3271, 3273, 3275, 3277, 3279, 3281, 3283, 3285, 3287, 3289, 3291, 3293, 3295, 3297, 3299, 3301, 3303, 3305, 3307, 3309, 3311, 3313, 3315, 3317, 3319, 3321, 3323, 3325, 3327, 3329, 3331, 3333, 3335, 3337, 3339, 3341, 3343, 3345, 3347, 3349, 3351, 3353, 3355, 3357, 3359, 3361, 3363, 3365, 3367, 3369, 3371, 3373, 3375, 3377, 3379, 3381, 3383, 3385, 3387, 3389, 3391, 3393, 3395, 3397, 3399, 3401, 3403, 3405, 3407, 3409, 3411, 3413, 3415, 3417, 3419, 3421, 3423, 3425, 3427, 3429, 3431, 3433, 3435, 3437, 3439, 3441, 3443, 3445, 3447, 3449, 3451, 3453, 3455, 3457, 3459, 3461, 3463, 3465, 3467, 3469, 3471, 3473, 3475, 3477, 3479, 3481, 3483, 3485, 3487, 3489, 3491, 3493, 3495, 3497, 3499, 3501, 3503, 3505, 3507, 3509, 3511, 3513, 3515, 3517, 3519, 3521, 3523, 3525, 3527, 3529, 3531, 3533, 3535, 3537, 3539, 3541, 3543, 3545, 3547, 3549, 3551, 3553, 3555, 3557, 3559, 3561, 3563, 3565, 3567, 3569, 3571, 3573, 3575, 3577, 3579, 3581, 3583, 3585, 3587, 3589, 3591, 3593, 3595, 3597, 3599, 3601, 3603, 3605, 3607, 3609, 3611, 3613, 3615, 3617, 3619, 3621, 3623, 3625, 3627, 3629, 3631, 3633, 3635, 3637, 3639, 3641, 3643, 3645, 3647, 3649, 3651, 3653, 3655, 3657, 3659, 3661, 3663, 3665, 3667, 3669, 3671, 3673, 3675, 3677, 3679, 3681, 3683, 3685, 3687, 3689, 3691, 3693, 3695, 3697, 3699, 3701, 3703, 3705, 3707, 3709, 3711, 3713, 3715, 3717, 3719, 3721, 3723, 3725, 3727, 3729, 3731, 3733, 3735, 3737, 3739, 3741, 3743, 3745, 3747, 3749, 3751, 3753, 3755, 3757, 3759, 3761, 3763, 3765, 3767, 3769, 3771, 3773, 3775, 3777, 3779, 3781, 3783, 3785, 3787, 3789, 3791, 3793, 3795, 3797, 3799, 3801, 3803, 3805, 3807, 3809, 3811, 3813, 3815, 3817, 3819, 3821, 3823, 3825, 3827, 3829, 3831, 3833, 3835, 3837, 3839, 3841, 3843, 3845, 3847, 3849, 3851, 3853, 3855, 3857, 3859, 3861, 3863, 3865, 3867, 3869, 3871, 3873, 3875, 3877, 3879, 3881, 3883, 3885, 3887, 3889, 3891, 3893, 3895, 3897, 3899, 3901, 3903, 3905, 3907, 3909, 3911, 3913, 3915, 3917, 3919, 3921, 3923, 3925, 3927, 3929, 3931, 3933, 3935, 3937, 3939, 3941, 3943, 3945, 3947, 3949, 3951, 3953, 3955, 3957, 3959, 3961, 3963, 3965, 3967, 3969, 3971, 3973, 3975, 3977, 3979, 3981, 3983, 3985, 3987, 3989, 3991, 3993, 3995, 3997, 3999, 4001, 4003, 4005, 4007, 4009, 4011, 4013, 4015, 4017, 4019, 4021, 4023, 4025, 4027, 4029, 4031, 4033, 4035, 4037, 4039, 4041, 4043, 4045, 4047, 4049, 4051, 4053, 4055, 4057, 4059, 4061, 4063, 4065, 4067, 4069, 4071, 4073, 4075, 4077, 4079, 4081, 4083, 4085, 4087, 4089, 4091, 4093, 4095, 4097, 4099, 4101, 4103, 4105, 4107, 4109, 4111, 4113, 4115, 4117, 4119, 4121, 4123, 4125, 4127, 4129, 4131, 4133, 4135, 4137, 4139, 4141, 4143, 4145, 4147, 4149, 4151, 4153, 4155, 4157, 4159, 4161, 4163, 4165, 4167, 4169, 4171, 4173, 4175, 4177, 4179, 4181, 4183, 4185, 4187, 4189, 4191, 4193, 4195, 4197, 4199, 4201, 4203, 4205, 4207, 4209, 4211, 4213, 4215, 4217, 4219, 4221, 4223, 4225, 4227, 4229, 4231, 4233, 4235, 4237, 4239, 4241, 4243, 4245, 4247, 4249, 4251, 4253, 4255, 4257, 4259, 4261, 4263, 4265, 4267, 4269, 4271, 4273, 4275, 4277, 4279, 4281, 4283, 4285, 4287, 4289, 4291, 4293, 4295, 4297, 4299, 4301, 4303, 4305, 4307, 4309, 4311, 4313, 4315, 4317, 4319, 4321, 4323, 4325, 4327, 4329, 4331, 4333, 4335, 4337, 4339, 4341, 4343, 4345, 4347, 4349, 4351, 4353, 4355, 4357, 4359, 4361, 4363, 4365, 4367, 4369, 4371, 4373, 4375, 4377, 4379, 4381, 4383, 4385, 4387, 4389, 4391, 4393, 4395, 4397, 4399, 4401, 4403, 4405, 4407, 4409, 4411, 4413, 4415, 4417, 4419, 4421, 4423, 4425, 4427, 4429, 4431, 4433, 4435, 4437, 4439, 4441, 4443, 4445, 4447, 4449, 4451, 4453, 4455, 4457, 4459, 4461, 4463, 4465, 4467, 4469, 4471, 4473, 4475, 4477, 4479, 4481, 4483, 4485, 4487, 4489, 4491, 4493, 4495, 4497, 4499, 4501, 4503, 4505, 4507, 4509, 4511, 4513, 4515, 4517, 4519, 4521, 4523, 4525, 4527, 4529, 4531, 4533, 4535, 4537, 4539, 4541, 4543, 4545, 4547, 4549, 4551, 4553, 4555, 4557, 4559, 4561, 4563, 4565, 4567, 4569, 4571, 4573, 4575, 4577, 4579, 4581, 4583, 4585, 4587, 4589, 4591, 4593, 4595, 4597, 4599, 4601, 4603, 4605, 4607, 4609, 4611, 4613, 4615, 4617, 4619, 4621, 4623, 4625, 4627, 4629, 4631, 4633, 4635, 4637, 4639, 4641, 4643, 4645, 4647, 4649, 4651, 4653, 4655, 4657, 4659, 4661, 4663, 4665, 4667, 4669, 4671, 4673, 4675, 4677, 4679, 4681, 4683, 4685, 4687, 4689, 4691, 4693, 4695, 4697, 4699, 4701, 4703, 4705, 4707, 4709, 4711, 4713, 4715, 4717, 4719, 4721, 4723, 4725, 4727, 4729, 4731, 4733, 4735, 4737, 4739, 4741, 4743, 4745, 4747, 4749, 4751, 4753, 4755, 4757, 4759, 4761, 4763, 4765, 4767, 4769, 4771, 4773, 4775, 4777, 4779, 4781, 4783, 4785, 4787, 4789, 4791, 4793, 4795, 4797, 4799, 4801, 4803, 4805, 4807, 4809, 4811, 4813, 4815, 4817, 4819, 4821, 4823, 4825, 4827, 4829, 4831, 4833, 4835, 4837, 4839, 4841, 4843, 4845, 4847, 4849, 4851, 4853, 4855, 4857, 4859, 4861, 4863, 4865, 4867, 4869, 4871, 4873, 4875, 4877, 4879, 4881, 4883, 4885, 4887, 4889, 4891; 4893, 4895, 4897, 4899, 4901, 4903, 4905, 4907, 4909, 4911, 4913, 4915, 4917, 4919, 4921, 4923, 4925, 4927, 4929, 4931, 4933, 4935, 4937, 4939, 4941, 4943, 4945, 4947, 4949, 4951, 4953, 4955, 4957, 4959, 4961, 4963, 4965, 4967, 4969, 4971, 4973, 4975, 4977.

7. A nucleic acid molecule comprising a fragment of a nucleotide sequence selected from the group consisting of SEQ IDs 1, 3, 5, 7, 9, 11, 13, 15, 17, 19, 21, 23, 25, 27, 29, 31, 33, 35, 37, 39, 41, 43, 45, 47, 49, 51, 53, 55, 57, 59, 61, 63, 65, 67, 69, 71, 73, 75, 77, 79, 81, 83, 85, 87, 89, 91, 93, 95, 97, 99, 101, 103, 105, 107, 109, 111, 113, 115, 117, 119, 121, 123, 125, 127, 129, 131, 133, 135, 137, 139, 141, 143, 145, 147, 149, 151, 153, 155, 157, 159, 161, 163, 165, 167, 169, 171, 173, 175, 177, 179, 181, 183, 185, 187, 189, 191, 193, 195, 197, 199, 201, 203, 205, 207, 209, 211, 213, 215, 217, 219, 221, 223, 225, 227, 229, 231, 233, 235, 237, 239, 241, 243, 245, 247, 24.9, 251, 253, 255, 257, 259, 261, 263, 265, 267, 269, 271, 273, 275, 277, 279, 281, 283, 285, 287, 289, 291, 293, 295, 297, 299, 301, 303, 305, 307, 309, 311, 313, 315, 317, 319, 321, 323, 325, 327, 329, 331, 333, 335, 337, 339, 341, 343, 345, 347, 349, 351, 353, 355, 357, 359, 361, 363, 365, 367, 369, 371, 373, 375, 377, 379, 381, 383, 385, 387, 389, 391, 393, 395, 397, 399, 401, 403, 405, 407, 409, 411, 413, 415, 417, 419, 421, 423, 425, 427, 429, 431, 433, 435, 437, 439, 441, 443, 445, 447, 449, 451, 453, 455, 457, 459, 461, 463, 465, 467, 469, 471, 473, 475, 477, 479, 481, 483, 485, 487, 489, 491, 493, 495, 497, 499, 501, 503, 505, 507, 509, 511, 513, 515, 517, 519, 521, 523, 525, 527, 529, 531, 533, 535, 537, 539, 541, 543, 545, 547, 549, 551, 553, 555, 557, 559, 561, 563, 565, 567, 569, 571, 573, 575, 577, 579, 581, 583, 585, 587, 589, 591, 593, 595, 597, 599, 601, 603, 605, 607, 609, 611, 613, 615, 617, 619, 621, 623, 625, 627, 629, 631, 633, 635, 637, 639, 641, 643, 645, 647, 649, 651, 653, 655, 657, 659, 661, 663, 665, 667, 669, 671, 673, 675, 677, 679, 681, 683, 685, 687, 689, 691, 693, 695, 697, 699, 701, 703, 705, 707, 709, 711, 713, 715, 717, 719, 721, 723, 725, 727, 729, 731, 733, 735, 737, 739, 741, 743, 745, 747, 749, 751, 753, 755, 757, 759, 761, 763, 765, 767, 769, 771, 773, 775, 777, 779, 781, 783, 785, 787, 789, 791, 793, 795, 797, 799, 801, 803, 805, 807, 809, 811, 813, 815, 817, 819, 821, 823, 825, 827, 829, 831, 833, 835, 837, 839, 841, 843, 845, 847, 849, 851, 853, 855, 857, 859, 861, 863, 865, 867, 869, 871, 873, 875, 877, 879, 881, 883, 885, 887, 889, 891, 893, 895, 897, 899, 901, 903, 905, 907, 909, 911, 913, 915, 917, 919, 921, 923, 925, 927, 929, 931, 933, 935, 937, 939, 941, 943, 945, 947, 949, 951, 953, 955, 957, 959, 961, 963, 965, 967, 969, 971, 973, 975, 977, 979, 981, 983, 985, 987, 989, 991, 993, 995, 997, 999, 1001, 1003, 1005, 1007, 1009, 1011, 1013, 1015, 1017, 1019, 1021, 1023, 1025, 1027, 1029, 1031, 1033, 1035, 1037, 1039, 1041, 1043, 1045, 1047, 1049, 1051, 1053, 1055, 1057, 1059, 1061, 1063, 1065, 1067, 1069, 1071, 1073, 1075, 1077, 1079, 1081, 1083, 1085, 1087, 1089, 1091, 1093, 1095, 1097, 1099, 1101, 1103, 1105, 1107, 1109, 1111, 1113, 1115, 1117, 1119, 1121, 1123, 1125, 1127, 1129, 1131, 1133, 1135, 1137, 1139, 1141, 1143, 1145, 1147, 1149, 1151, 1153, 1155, 1157, 1159, 1161, 1163, 1165, 1167, 1169, 1171, 1173, 1175, 1177, 1179, 1181, 1183, 1185, 1187, 1189, 1191, 1193, 1195, 1197, 1199, 1201, 1203, 1205, 1207, 1209, 1211, 1213, 1215, 1217, 1219, 1221, 1223, 1225, 1227, 1229, 1231, 1233, 1235, 1237, 1239, 1241, 1243, 1245, 1247, 1249, 1251, 1253, 1255, 1257, 1259, 1261, 1263, 1265, 1267, 1269, 1271, 1273, 1275, 1277, 1279, 1281, 1283, 1285, 1287, 1289, 1291, 1293, 1295, 1297, 1299, 1301, 1303, 1305, 1307, 1309, 1311, 1313, 1315, 1317, 1319, 1321, 1323, 1325, 1327, 1329, 1331, 1333, 1335, 1337, 1339, 1341, 1343, 1345, 1347, 1349, 1351, 1353, 1355, 1357, 1359, 1361, 1363, 1365, 1367, 1369, 1371, 1373, 1375, 1377, 1379, 1381, 1383, 1385, 1387, 1389, 1391, 1393, 1395, 1397, 1399, 1401, 1403, 1405, 1407, 1409, 1411, 1413, 1415, 1417, 1419, 1421, 1423, 1425, 1427, 1429, 1431, 1433, 1435, 1437, 1439, 1441, 1443, 1445, 1447, 1449, 1451, 1453, 1455, 1457, 1459, 1461, 1463, 1465, 1467, 1469, 1471, 1473, 1475, 1477, 1479, 1481, 1483, 1485, 1487, 1489, 1491, 1493, 1495, 1497, 1499, 1501, 1503, 1505, 1507, 1509, 1511, 1513, 1515, 1517, 1519, 1521, 1523, 1525, 1527, 1529, 1531, 1533, 1535, 1537, 1539, 1541, 1543, 1545, 1547, 1549, 1551, 1553, 1555, 1557, 1559, 1561, 1563, 1565, 1567, 1569, 1571, 1573, 1575, 1577, 1579, 1581, 1583, 1585, 1587, 1589, 1591, 1593, 1595, 1597, 1599, 1601, 1603, 1605, 1607, 1609, 1611, 1613, 1615, 1617, 1619, 1621, 1623, 1625, 1627, 1629, 1631, 1633, 1635, 1637, 1639, 1641, 1643, 1645, 1647, 1649, 1651, 1653, 1655, 1657, 1659, 1661, 1663, 1665, 1667, 1669, 1671, 1673, 1675, 1677, 1679, 1681, 1683, 1685, 1687, 1689, 1691, 1693, 1695, 1697, 1699, 1701, 1703, 1705, 1707, 1709, 1711, 1713, 1715, 1717, 1719, 1721, 1723, 1725, 1727, 1729, 1731, 1733, 1735, 1737, 1739, 1741, 1743, 1745, 1747, 1749, 1751, 1753, 1755, 1757, 1759, 1761, 1763, 1765, 1767, 1769, 1771, 1773, 1775, 1777, 1779, 1781, 1783, 1785, 1787, 1789, 1791, 1793, 1795, 1797, 1799, 1801, 1803, 1805, 1807, 1809, 1811, 1813, 1815, 1817, 1819, 1821, 1823, 1825, 1827, 1829, 1831, 1833, 1835, 1837, 1839, 1841, 1843, 1845, 1847, 1849, 1851, 1853, 1855, 1857, 1859, 1861, 1863, 1865, 1867, 1869, 1871, 1873, 1875, 1877, 1879, 1881, 1883, 1885, 1887, 1889, 1891, 1893, 1895, 1897, 1899, 1901, 1903, 1905, 1907, 1909, 1911, 1913, 1915, 1917, 1919, 1921, 1923, 1925, 1927, 1929, 1931, 1933, 1935, 1937, 1939, 1941, 1943, 1945, 1947, 1949, 1951, 1953, 1955, 1957, 1959, 1961, 1963, 1965, 1967, 1969, 1971, 1973, 1975, 1977, 1979, 1981, 1983, 1985, 1987, 1989, 1991, 1993, 1995, 1997, 1999, 2001, 2003, 2005, 2007, 2009, 2011, 2013, 2015, 2017, 2019, 2021, 2023, 2025, 2027, 2029, 2031, 2033, 2035, 2037, 2039, 2041, 2043, 2045, 2047, 2049, 2051, 2053, 2055, 2057, 2059, 2061, 2063, 2065, 2067, 2069, 2071, 2073, 2075, 2077, 2079, 2081, 2083, 2085, 2087, 2089, 2091, 2093, 2095, 2097, 2099, 2101, 2103, 2105, 2107, 2109, 2111, 2113, 2115, 2117, 2119, 2121, 2123, 2125, 2127, 2129, 2131, 2133, 2135, 2137, 2139, 2141, 2143, 2145, 2147, 2149, 2151, 2153, 2155, 2157, 2159, 2161, 2163, 2165, 2167, 2169, 2171, 2173, 2175, 2177, 2179, 2181, 2183, 2185, 2187, 2189, 2191, 2193, 2195, 2197, 2199, 2201, 2203, 2205, 2207, 2209, 2211, 2213, 2215, 2217, 2219, 2221, 2223, 2225, 2227, 2229, 2231, 2233, 2235, 2237, 2239, 2241, 2243, 2245, 2247, 2249, 2251, 2253, 2255, 2257, 2259, 2261, 2263, 2265, 2267, 2269, 2271, 2273, 2275, 2277, 2279, 2281, 2283, 2285, 2287, 2289, 2291, 2293, 2295, 2297, 2299, 2301, 2303, 2305, 2307, 2309, 2311, 2313, 2315, 2317, 2319, 2321, 2323, 2325, 2327, 2329, 2331, 2333, 2335, 2337, 2339, 2341, 2343, 2345, 2347, 2349, 2351, 2353, 2355, 2357, 2359, 2361, 2363, 2365, 2367, 2369, 2371, 2373, 2375, 2377, 2379, 2381, 2383, 2385, 2387, 2389, 2391, 2393, 2395, 2397, 2399, 2401, 2403, 2405, 2407, 2409, 2411, 2413, 2415, 2417, 2419, 2421, 2423, 2425, 2427, 2429, 2431, 2433, 2435, 2437, 2439, 2441, 2443, 2445, 2447, 2449, 2451, 2453, 2455, 2457, 2459, 2461, 2463, 2465, 2467, 2469, 2471, 2473, 2475, 2477, 2479, 2481, 2483, 2485, 2487, 2489, 2491, 2493, 2495, 2497, 2499, 2501, 2503, 2505, 2507, 2509, 2511, 2513, 2515, 2517, 2519, 2521, 2523, 2525, 2527, 2529, 2531, 2533, 2535, 2537, 2539, 2541, 2543, 2545, 2547, 2549, 2551, 2553, 2555, 2557, 2559, 2561, 2563, 2565, 2567, 2569, 2571, 2573, 2575, 2577, 2579, 2581, 2583, 2585, 2587, 2589, 2591, 2593, 2595, 2597, 2599, 2601, 2603, 2605, 2607, 2609, 2611, 2613, 2615, 2617, 2619, 2621, 2623, 2625, 2627, 2629, 2631, 2633, 2635, 2637, 2639, 2641, 2643, 2645, 2647, 2649, 2651, 2653, 2655, 2657, 2659, 2661, 2663, 2665, 2667, 2669, 2671, 2673, 2675, 2677, 2679, 2681, 2683, 2685, 2687, 2689, 2691, 2693, 2695, 2697, 2699, 2701, 2703, 2705, 2707, 2709, 2711, 2713, 2715, 2717, 2719, 2721, 2723, 2725, 2727, 2729, 2731, 2733, 2735, 2737, 2739, 2741, 2743, 2745, 2747, 2749, 2751, 2753, 2755, 2757, 2759, 2761, 2763, 2765, 2767, 2769, 2771, 2773, 2775, 2777, 2779, 2781, 2783, 2785, 2787, 2789, 2791, 2793, 2795, 2797, 2799, 2801, 2803, 2805, 2807, 2809, 2811, 2813, 2815, 2817, 2819, 2821, 2823, 2825, 2827, 2829, 2831, 2833, 2835, 2837, 2839, 2841, 2843, 2845, 2847, 2849, 2851, 2853, 2855, 2857, 2859, 2861, 2863, 2865, 2867, 2869, 2871, 2873, 2875, 2877, 2879, 2881, 2883, 2885, 2887, 2889, 2891, 2893, 2895, 2897, 2899, 2901, 2903, 2905, 2907, 2909, 2911, 2913, 2915, 2917, 2919, 2921, 2923, 2925, 2927, 2929, 2931, 2933, 2935, 2937, 2939, 2941, 2943, 2945, 2947, 2949, 2951, 2953, 2955, 2957, 2959, 2961, 2963, 2965, 2967, 2969, 2971, 2973, 2975, 2977, 2979, 2981, 2983, 2985, 2987, 2989, 2991, 2993, 2995, 2997, 2999, 3001, 3003, 3005, 3007, 3009, 3011, 3013, 3015, 3017, 3019, 3021, 3023, 3025, 3027, 3029, 3031, 3033, 3035, 3037, 3039, 3041, 3043, 3045, 3047, 3049, 3051, 3053, 3055, 3057, 3059, 3061, 3063, 3065, 3067, 3069, 3071, 3073, 3075, 3077, 3079, 3081, 3083, 3085, 3087, 3089, 3091, 3093, 3095, 3097, 3099, 3101, 3103, 3105, 3107, 3109, 3111, 3113, 3115, 3117, 3119, 3121, 3123, 3125, 3127, 3129, 3131, 3133, 3135, 3137, 3139, 3141, 3143, 3145, 3147, 3149, 3151, 3153, 3155, 3157, 3159, 3161, 3163, 3165, 3167, 3169, 3171, 3173, 3175, 3177, 3179, 3181, 3183, 3185, 3187, 3189, 3191, 3193, 3195, 3197, 3199, 3201, 3203, 3205, 3207, 3209, 3211, 3213, 3215, 3217, 3219, 3221, 3223, 3225, 3227, 3229, 3231, 3233, 3235, 3237, 3239, 3241, 3243, 3245, 3247, 3249, 3251, 3253, 3255, 3257, 3259, 3261, 3263, 3265, 3267, 3269, 3271, 3273, 3275, 3277, 3279, 3281, 3283, 3285, 3287, 3289, 3291, 3293, 3295, 3297, 3299, 3301, 3303, 3305, 3307, 3309, 3311, 3313, 3315, 3317, 3319, 3321, 3323, 3325, 3327, 3329, 3331, 3333, 3335, 3337, 3339, 3341, 3343, 3345, 3347, 3349, 3351, 3353, 3355, 3357, 3359, 3361, 3363, 3365, 3367, 3369, 3371, 3373, 3375, 3377, 3379, 3381, 3383, 3385, 3387, 3389, 3391, 3393, 3395, 3397, 3399, 3401, 3403, 3405, 3407, 3409, 3411, 3413, 3415, 3417, 3419, 3421, 3423, 3425, 3427, 3429, 3431, 3433, 3435, 3437, 3439, 3441, 3443, 3445, 3447, 3449, 3451, 3453, 3455, 3457, 3459, 3461, 3463, 3465, 3467, 3469, 3471, 3473, 3475, 3477, 3479, 3481, 3483, 3485, 3487, 3489, 3491, 3493, 3495, 3497, 3499, 3501, 3503, 3505, 3507, 3509, 3511, 3513, 3515, 3517, 3519, 3521, 3523, 3525, 3527, 3529, 3531, 3533, 3535, 3537, 3539, 3541, 3543, 3545, 3547, 3549, 3551, 3553, 3555, 3557, 3559, 3561, 3563, 3565, 3567, 3569, 3571, 3573, 3575, 3577, 3579, 3581, 3583, 3585, 3587, 3589, 3591, 3593, 3595, 3597, 3599, 3601, 3603, 3605, 3607, 3609, 3611, 3613, 3615, 3617, 3619, 3621, 3623, 3625, 3627, 3629, 3631, 3633, 3635, 3637, 3639, 3641, 3643, 3645, 3647, 3649, 3651, 3653, 3655, 3657, 3659, 3661, 3663, 3665, 3667, 3669, 3671, 3673, 3675, 3677, 3679, 3681, 3683, 3685, 3687, 3689, 3691, 3693, 3695, 3697, 3699, 3701, 3703, 3705, 3707, 3709, 3711, 3713, 3715, 3717, 3719, 3721, 3723, 3725, 3727, 3729, 3731, 3733, 3735, 3737, 3739, 3741, 3743, 3745, 3747, 3749, 3751, 3753, 3755, 3757, 3759, 3761, 3763, 3765, 3767, 3769, 3771, 3773, 3775, 3777, 3779, 3781, 3783, 3785, 3787, 3789, 3791, 3793, 3795, 3797, 3799, 3801, 3803, 3805, 3807, 3809, 3811, 3813, 3815, 3817, 3819, 3821, 3823, 3825, 3827, 3829, 3831, 3833, 3835, 3837, 3839, 3841, 3843, 3845, 3847, 3849, 3851, 3853, 3855, 3857, 3859, 3861, 3863, 3865, 3867, 3869, 3871, 3873, 3875, 3877, 3879, 3881, 3883, 3885, 3887, 3889, 3891, 3893, 3895, 3897, 3899, 3901, 3903, 3905, 3907, 3909, 3911, 3913, 3915, 3917, 3919, 3921, 3923, 3925, 3927, 3929, 3931, 3933, 3935, 3937, 3939, 3941, 3943, 3945, 3947, 3949, 3951, 3953, 3955, 3957, 3959, 3961, 3963, 3965, 3967, 3969, 3971, 3973, 3975, 3977, 3979, 3981, 3983, 3985, 3987, 3989, 3991, 3993, 3995, 3997, 3999, 4001, 4003, 4005, 4007, 4009, 4011, 4013, 4015, 4017, 4019, 4021, 4023, 4025, 4027, 4029, 4031, 4033, 4035, 4037, 4039, 4041, 4043, 4045, 4047, 4049, 4051, 4053, 4055, 4057, 4059, 4061, 4063, 4065, 4067, 4069, 4071, 4073, 4075, 4077, 4079, 4081, 4083, 4085, 4087, 4089, 4091, 4093, 4095, 4097, 4099, 4101, 4103, 4105, 4107, 4109, 4111, 4113, 4115, 4117, 4119, 4121, 4123, 4125, 4127, 4129, 4131, 4133, 4135, 4137, 4139, 4141, 4143, 4145, 4147, 4149, 4151, 4153, 4155, 4157, 4159, 4161, 4163, 4165, 4167, 4169, 4171, 4173, 4175, 4177, 4179, 4181, 4183, 4185, 4187, 4189, 4191, 4193, 4195, 4197, 4199, 4201, 4203, 4205, 4207, 4209, 4211, 4213, 4215, 4217, 4219, 4221, 4223, 4225, 4227, 4229, 4231, 4233, 4235, 4237, 4239, 4241, 4243, 4245, 4247, 4249, 4251, 4253, 4255, 4257, 4259, 4261, 4263, 4265, 4267, 4269, 4271, 4273, 4275, 4277, 4279, 4281, 4283, 4285, 4287, 4289, 4291, 4293, 4295, 4297, 4299, 4301, 4303, 4305, 4307, 4309, 4311, 4313, 4315, 4317, 4319, 4321, 4323, 4325, 4327, 4329, 4331, 4333, 4335, 4337, 4339, 4341, 4343, 4345, 4347, 4349, 4351, 4353, 4355, 4357, 4559, 4361, 4363, 4365, 4367, 4369, 4371, 4373, 4375, 4377, 4379, 4381, 4383, 4385, 4387, 4389, 4391, 4393, 4395, 4397, 4399, 4401, 4403, 4405, 4407, 4409, 4411, 4413, 4415, 4417, 4419, 4421, 4423, 4425, 4427, 4429, 4431, 4433, 4435, 4437, 4439, 4441, 4443, 4445, 4447, 4449, 4451, 4453, 4455, 4457, 4459, 4461, 4463, 4465, 4467, 4469, 4471, 4473, 4475, 4477, 4479, 4481, 4483, 4485, 4487, 4489, 4491, 4493, 4495, 4497, 4499, 4501, 4503, 4505, 4507, 4509, 4511, 4513, 4515, 4517, 4519, 4521, 4523, 4525, 4527, 4529, 4531, 4533, 4535, 4537, 4539, 4541, 4543, 4545, 4547, 4549, 4551, 4553, 4555, 4557, 4559, 4561, 4563, 4565, 4567, 4569, 4571, 4573, 4575, 4577, 4579, 4581, 4583, 4585, 4587, 4589, 4591, 4593, 4595, 4597, 4599, 4601, 4603, 4605, 4607, 4609, 4611, 4613, 4615, 4617, 4619, 4621, 4623, 4625, 4627, 4629, 4631, 4633, 4635, 4637, 4639, 4641, 4643, 4645, 4647, 4649, 4651, 4653, 4655, 4657, 4659, 4661, 4663, 4665, 4667, 4669, 4671, 4673, 4675, 4677, 4679, 4681, 4683, 4685, 4687, 4689, 4691, 4693, 4695, 4697, 4699, 4701, 4703, 4705, 4707, 4709, 4711, 4713, 4715, 4717, 4719, 4721, 4723, 4725, 4727, 4729, 4731, 4733, 4735, 4737, 4739, 4741, 4743, 4745, 4747, 4749, 4751, 4753, 4755, 4757, 4759, 4761, 4763, 4765; 4767, 4769, 4771, 4773, 4775, 4777, 4779, 4781, 4783, 4785, 4787, 4789, 4791, 4793, 4795, 4797, 4799, 4801, 4803, 4805, 4807, 4809, 4811, 4813, 4815, 4817, 4819, 4821, 4823, 4825, 4827, 4829, 4831, 4833, 4835, 4837, 4839, 4841, 4843, 4845, 4847, 4849, 4851, 4853, 4855, 4857, 4859, 4861, 4863, 4865, 4867, 4869, 4871, 4873, 4875, 4877, 4879, 4881, 4883, 4885, 4887, 4889, 4891, 4893, 4895, 4897, 4899, 4901, 4903, 4905, 4907, 4909, 4911, 4913, 4915, 4917, 4919, 4921, 4923, 4925, 4927, 4929, 4931, 4933, 4935, 4937, 4939, 4941, 4943, 4945, 4947, 4949, 4951, 4953, 4955, 4957, 4959, 4961, 4963, 4965, 4967, 4969, 4971, 4973, 4975, 4977.

8. A nucleic acid molecule comprising a nucleotide sequence complementary to a nucleic acid molecule according to any one of claims 5 to 7.

9. A nucleic acid molecule comprising a nucleotide sequences having 50% or greater sequence identity to a nucleic acid molecule according to any one of claims 5 to 8.

10. A nucleic acid molecule which can hybridise to a nucleic acid molecule according to any one of claims 5 to 9 under high stringency conditions.

11. A composition comprising a protein, a nucleic acid molecule, or an antibody according to any preceding claim.

12. A composition according to claim 11 being a vaccine composition or a diagnostic composition.

13. A composition according to claim 11 or claim 12 for use as a pharmaceutical.

14. The use of a composition according to claim 13 in the manufacture of a medicament for the treatment or prevention of a disease or infection due to streptococcus bacteria, particularly S.pneumoniae.

15. The use of claim 14, wherein the disease is meningitis, pneumonia, sepsis, otitis media or an ear infection.

16. A method of treating a patient, comprising administering to the patient a therapeutically effective amount of a composition according to claim 13.

17. A kit comprising primers for amplifying a target sequence contained within a Streptococcus nucleic acid sequence, the kit comprising a first primer and a second primer, wherein the first primer is substantially complementary to said target sequence and the second primer is substantially complementary to a complement of said target sequence, wherein the parts of said primers which have substantial complementarity define the termini of the target sequence to be amplified, and wherein the first and/or second primer is a nucleic acid according to any one of claims 5 to 10, or a fragment of between 8 and 100 nucleotides of SEQ ID 4979.

18. A kit comprising first and second single-stranded oligonucleotides which allow amplification of a Streptococcus template nucleic acid sequence contained in a single- or double-stranded nucleic acid (or mixture thereof), wherein: (a) the first oligonucleotide comprises a primer sequence which is substantially complementary to said template nucleic acid sequence; (b) the second oligonucleotide comprises a primer sequence which is substantially complementary to the complement of said template nucleic acid sequence; (c) the first oligonucleotide and/or the second oligonucleotide comprise(s) sequence which is not complementary to said template nucleic acid; (d) said primer sequences define the termini of the template sequence to be amplified; and (e) the first and/or second oligonucleotide is a nucleic acid according to any one of claims 5 to 10, or a fragment of between 8 and 100 nucleotides of SEQ ID 4979.

19. A hybrid protein represented by the formula NH₂-A-[-X-L-]ₐ, —B—COOH, wherein X is the amino acid sequence of a protein according to claim 1, claim 2 or claim 3, L is an optional linker amino acid sequence, A is an optional N-terminal amino acid sequence, B is an optional C-terminal amino acid sequence, and n is an integer greater than 1.

20. An assay comprising the steps of contacting a test compound with a protein according to any one of claims 1 to 3, and determining whether the test compound binds to said protein.

21. The composition of claim 13 further comprising one or more of the following antigens:
a protein antigen from Helicobacter pylori;
a protein antigen from N.meningitidis serogroup B;
an outer-membrane vesicle (OMV) preparation from N.meningitidis;
a saccharide antigen from N.meningitidis serogroup A, C, W 135 and/or Y;
a saccharide antigen from Streptococcus pneumoniae;
an antigen from hepatitis A virus;
an antigen from hepatitis B virus;
an antigen from hepatitis C virus;
an antigen from Bordetelia pertussis;
a diphtheria antigen;
a tetanus antigen;
a saccharide antigen from Haemophilus influenzae B.
an antigen from N.gonorrhoeae;
an antigen from Chlamydia pneumoniae;
an antigen from Streptococcus agalactiae;
an antigen from Streptococcus pyogenes
an antigen from Chlamydia trachonzatis
an antigen from Porphyromonas gingivalis;
polio antigen(s);
rabies antigen(s);
measles, mumps and/or rubella antigens;
influenza antigen(s);
an antigen from Moraxella catarrhalis; and/or
an antigen from Staphylococcus aureus.

22. A composition comprising two or more proteins of any one of claims 1 to 3.

23. A S.pneumoniae bacterium wherein one or more genes encoding a protein according to claim 1 or claim 2 has been rendered inactive.

24. The S.pneumoniae bacterium of claim 23, wherein the gene(s) is/are deleted.

25. The S.pneumoniae bacterium of claim 24, wherein the deletions are isogenic.
